United States Patent Application Publication US 2025/0130221 A1 - sequence listing, part 2

SEQ ID NO: 249 - DNA, 1901041 bp, Homo sapiens
  source 1..1901041: mol_type = genomic DNA; note = NC_000002.12:c142132463-140231423 LRP1B [organism=Homo sapiens] [GeneID=53353] [chromosome=2]
gcatacacttttgaatgtaggagtcatatttcaaacacaaaatggttgtattttcaagggaaagtaaactttataatttaaaacatggaaaaagtgacataaaatacatttataatcacagagtaagaataaaaaggtgaaatccacagattattgacaatgttctgcaaagtcatctctgtgttctttcatctagtccagtttttaatggcttcaaaggagcatctaaagatatttctggataattttactctcataaataggtagatagtaatgctggcattcacttataagtctcaaacagcaaagtaaataaagcttttaaagcatcttccttcacttttcaatcgttctcttccttagttctgttcccttctcatagttttcctctccactcatgtccagtttcaaaatattaaatataaaaccttttcaactcttgttcttagaagagaattcctgatgttacaaggaagaaagtaagtctacaactattaagatttctgagttttaattccgtagccactttgtaatggcaaactaaaattttagggactgggatgatcatgttgtaaacttaagtggtcataaaaacaactttactaatattattattccagtgattcccgttgatgcctccgatggctcgggaaagttcttacaccgcccctgtagtatatggaaaaggaaaacaaaacaaaacacaaaacaaaaacaacaaaaccctcaaagcctgtttaaaatggctcgaagtacccttttaaagacagaaccccagagaaaaacgctgccaattcgttgctttattgttccctgcctggggacctcaatagccttttccattaaccttcccttcttacgcaacggttaatgactttgggggttgttttgctttctgtttctgctgagtcactaaattttgcctctttgtccccaggtgctgctcagcataaaagttaaaagtgcaattcaggaagtactgggattctgtgtagagccgaggaaaccatttccctaagagaagctctgttccttggcttgtccttccttcccgggaaggaagcttccgaggaacgaagggagaagctttgttttgcctgcagaagcagccctgtgctcggctgagggttctcagctggctgtgaactgcggagcattgtaggcgcctggctggctcaggccaatgcagaagtctctcccttctccaaagacccaaatccccacagaaccagcttcgagttactttcccttcaaggggattaaaataattgtgatttgtggcgctctccgttcgcggtggtattttcctgttgtgttaaatgcctcttattaagtaatagatgtgatttatgtgaacgacgaaggggtgtgtggtggattcggtgattaatcagtgaattcccatccgctggcatctctcactgcccctcttgcgtgatgtaagatcagacgtaccctgcattgaaaagtcaagacacacgggcgtctcgctcgcgctcacacacgctctgcctcctctctcccgcacgcgcgcatccctccaccttccacatcctgctccaggcaggagaaggctgactggctggactcattgagctgaagaatttccagtgacatttgtaaatgacgccgctcgattccaggctccaagcggcccctgccgccgccgccgccgccgggccgaaggtgccgccgagcagtctccagcgcaggcttccttaccgggcgaccacaatgtccgagtttctcctcgccttactcactctctcgggattattgccgattgccagggtgctgaccgtgggagccgaccgaggtaaggagaacacctccccgctcccctcccctgacttccttggctttcctgctgggcgatgcttgcagataagtgagtgtgaaacttaagtccttgcagctccgctccccgggaccgggtgaccaccgtgcgctggccctgtgcgggggtgagaggtgcggtgcgggatttctgaaccaagtgcctgagtcctcggcacccccacagcttttccctttggccgtttcccggtccccattttgtcccctccgggagtgtgtgcacttggctgtgcgcttctgtccgcgaattctaagcgctgcagatgttggaatgagaattcgcatttccgaaagacttccctccgcgatggccctcaactgcgagcttttgcgagctccaggttctccgcgttaagcgtgtccgccctcaacttagctcccaggttaacttccttacctgctgcattcgaggtccgtggagcggcgaaagcgccgattcaggcccctttcgtttctatagccccttcctgggggcagactggggtcagagtcctgtcatcagcagagaggcttttaggacgattccgggcgcacgcacctgcttgaaattgacttttcgattatgagggtctgtgacacagcccaggtgctctgaggggctaacccacccctggagtgcctctctccagtctggcgctttgcttttcctttttctccaagcagctggtgaatggtagaagtttagaagggaatggatatggggagcagaggagaaaggaggtaggaattagaaaaagccgggattctataaacttttcatctggaaaatcaagaatccctgtgcgagtttaataatctttgacaacagatgcactggtgaaaaagggaggaaaatactagatgaatatttggggcactggccctggccttggaatggttaactggttaaagtaaaatcagaagtatcatagatttttttaaaatcagaaaatgagcttatattgactggtatagttcagctttttagtttaaataagagagagagagagagagagagagagagagagagagagagagagagaaagagagaaagaaacccagatcccaatgccaagcaaataggcagaatgttgcattgggagatttagttattgtatttacatgaagcagattatgaattgacaaaaaatattgcttcattataggaaagaacaggggaatgaactgcagtgtttctattcaacctgctgttggcagccagattctagcctttgtaacatacctacacgtgttatttcctctaccagtggtgggactaatctgagttcctttaggaaatctgacacttattggtgataatcttttaagcatatcattgccacctaaccatagcttctgaacttgctcaacttgccttgaagttggtgtggaatggttggaaactatactgatgaaatggaagcacatagctcgccttgaaatgatgatgtctttgatctggaacaatcagctctcaacctttcttaggaaaaatgtttgaagttggaccagagcagatgaacagaatggagattttcagcccagtatgctagcaaaatataatggtactggcagactactgctattgggctcttcctgattgagtctccaatctccagaaatttgacttcatctaaagctgagttctcaatgcttttgtatacatttatgaggatagaactactgctaccatgattggagtaaatatctgaagagaattttgtatagaacataaaaaatacagaccccacaactttcttctgagatagaatattaaataactaagaggattatatttggtgccaatttagtttcatgagggagaggaacatctaagatagaagcagagcacatggtaaacgattgctagtttttttctaaaaaatgaaatagtgtcgtgttgtatcaccacgtccacatgaagtactatatcagatagcacaagtaaaaataattgtagaccagcactttgccactattatatatttaacacactttcaaaactgttagcaaagagctaaaattctcacagttaccaaaagtgaaaaggatgggccccatttggaaaaaggaattttaaagagagaaatcttgttgaaagttaagaaagaaagtgttactgcattatgacaagcttccctcactaatatgctgaaacagaagatatgggaatataaactcaagaaagaggttaatgagatgtaactttctgcacaggcttatgtcaatcgtccttgaataacagaacaggcatgtgaattatacagatgcgttttgtagtgcaagagctaactgcttgacaaaaaatgagaattcacatttaggttctacgtgtacttattgtgtaataggtagcttctcaaactgtatgaactatatcagaagtgtttgtattaccttctagctgtgtttttcctttatacattcataagttcaaacattgtattaaatagaacaaggcttgaaactaactcgtatgtttatgttcaaaccatatacgtgcacttgtcttttaattccttattgtttattttattagtttatattgattctatatagagctaaactaatgtacatgtaagtttttattacattctatcacatcttaaaaaggaaacatctttgtaactcttaacagccaaaattggaagataaatcagattcacttagaatcaactaatttgtcatataacaatgtcatatcatatcaaagtattgcttgataaggattaaaacttaaaaggaagtatatcttaaagtgtcaaattttctgaaaagggattgagaggcctaatgctagtctgtgttaaattctcgagtatgatacaatgtggagacacatttccaaataattaaagttcatgctgttatagtcattttaatgtatctgtatagaaaaccatcaaacaatggcaattaaatgtatatcaaaattttaatctcccctcaaagaagaatgaactgcgatttatgtctcttcatatgccacaaataacattaaagttttgttttgaagaggttgctaatctttgaatttgttctctttctctcttctcaagctcaaatttaaactgagtgagagagaaaagagaaaatggaaaaggtaaagaaagaatttaaatgtgctaaaacaataagaaagaatgtgaattgcagaaaacagaattcaggaggaaaaatggagttaagagaaagctgaagataaatttaggaaaaagatgaatggatggatggatggatggatggatggatggatggattctgccatacatcagaatctgaatcagtatttcttgaataggttaaaatatctttagacaaaataatttcttaaaatgtttttatctcattattaaaaacattatatgaaaatatttacagtataaaaataatttaaggaaagtgccaccagtgtgaatctgaatataattagacctctaagaatggagagagacatgagaatattgcagaaaaattaaatattaactgtgctagaattacaaatatggaagtgattttttaaaaatgtaagtgaaggtaaaggaaattttcttagaaagggtgctagatgagtgatatggttaatgtattcttaggacttagatgacactttctaaatgctgcttgtttttcaaggtggaggtatgcagaaatacttagtttgcaaatctattggatccaggacattagtttcttgccagttaccttgtcaatttcttttctcagcccaggggataccataaaaatcagctccatttaaagtcacctgaactgaacaggacttggtcttctacaaggattatgatgttgagggaactttatgtcttttctccattctatatatggatccagttttttatgtttctgccattaatttttgtatcttaatgtgaaatgtgcaactctccctccctttccttcagcattttcctggttataggaattctgtgtagtaaaaagtaccaatcaaacatactgatagatttctctatcttctgtggctgtctgtcaaaacaattcttgtacaaaggaaacacttgtcttcattctagatagatgcattcaaagaaagtagaattaatcctaaaagttaaacatgcctgtgccaacatgatatcattcgtcaaactaagttagtagtaagtggaacccaactatacaattgcccccaaccccgtttttaatctctctctgtgtgtgtttatgtgtgtctgtatatctgctttaaaatggctttccttggcacaaacgccattaaaaataccactctggcttgaaaattggtgatggtttttatgaatgaaacttttgcttttgaaaactccagataaacatgtctatttatctggacaaaaaaaaaagtgaaatgaaaaaaattttaagttattttttgactcatagcatataatattctaatacatttcgatataacaagtattttgttttaacagaatctgactgtgtggcagaaacacgtgtcaaaattatctgcttttgaaatgaatataattatggtatacccaatgcttataatttgaagcaatacatttagtagcagaatgctaaagaaaataaagccaaagactgagttccattatgaattaatcagaatatatgctcagccaaactcctatgagaaaatatctatgtctaccttagatagttttaaaacttttcttaaatttcttcaagaaacctggcttcccccatataatccaagaataatgaccaaaactatcttgatgcatagaaaggtcaaataagaaggtttttcttttggttttggcagaggaggggggagagtagggaaaattagctaatcaaacagaaaaatgtcaagggatgctttttattttcttctgtggagttgctatacattttcacatggatagctattcccaaatttaacctgtgtcacaaaccattgtctagagacatagaaatgaaattgcaacagagcaatcacaaattgtatagtctataggccttgggaacattctccagttattttattttggatggagatttttaaaacttattagttttttgggataaaatattatttaaacagtaaataagacaaaaaatgaaaatatctctaaaaataatttgagtttttaaaagttggtttttggactaatttccatatgtgagttccactggcacagaatgagtgtctttacctcactcactcaattttgaaaagtattatacttgcaatagtattgaatctctgttctggctcttcagtcctctctcatttgaataacatgtcaatctcaccaagtacatatgaaccctctattttagagaaaggagaatgaaggattcaggagattctgccattcagcacaacaagtaagcttacatcttccaaatgtatatgctgttttttttctgtttgtcttctataatctgccctcacaattttaaatctatattttcctcttcataaatgatcagatggcctccctttttcccctggcataattacaaggccaagttagaaagtatgtattatgtattgctctgttctaaattgagtgatattaaaatgtagagtcagtctcactctctccatctctctttctctccatcctttctatttaggctatctctatacaagcccacatattttgactgagctccctgactaaaccaattgatgaaactgactagtaactaaatggaaatcaaaactattaaataatagccatacatcctgtaaaaaaaaaaagtaagactggtcttgcaggaaaagcctaaattgagattctatgaagaaacaataacaacaacatatttccctgaaagaattatgcaacatatttctagtttgcagagcaaatcatatgtgcttttgctgttgtgtctctcatactaggcaaatgaaatatttttggtagtaactacatatttatataatggggtattatacaagtttaaaacactattagaaaataaataagtattctgaattcatttgtactcaaagagaatttactatattgaaagtggaaatttattatttttctttttgtctttactttttaactgaatttgtatttctccattttgtgaaacattaaaaaaaacttaaatatattccaaaatgtgatttcaaagattttctctcaataaagaatatatatagtggaaatcattcataaattggacaacaggattaaatgctcttttaaatatgactataataattttcatatgcagtcacattaacttagttttagtctacaattaggtacccaattatgatttttaaaaatgcaatggcatgaataaataaatgagtatacccatttgttgatcttattccctattacttcaaatttgtaagtatccttagtggaaaagagtaatgttcattttggaaataatcatgtctcaacatgattggggtctactcaagggggagggtgggaggaagaagaggagcagaaaggataactattgggcactgggcttaacacctgggtggtaagataatatgatcaacaaacccttgttacacatgtttacctatgtaacaaaccttcacatgtacccccaaatctaaaattaaaattaaaaaaaacatgtttttctgttgttcaataactctactcatatttgtttaataatgatgtattgtctacatttgggatttcttcttaaatattgcagaatagttgtaaatacgtaacgcttttcaaaggtgtctttacctttagaaaagaaagaaaattaattttgattaatacatttgtaccacagatccatttgtttaatcttatttttctcaaatataagctcgtatataaaagtttctcagatataagcttgtgtatttaaaagtttccatttaaacatgaataatattataactatatcctttacagaagttgagaaagtaccttttcatatacaatttcttccaactttgttaagagaaaaataaccaaaaaaaaaaaaaaacttcttgaagaagatagatcatgttgccttgctaagataccgacattacatttcatctcacaatacattcttattaacagtcagacatctcttcctgagttgcatacacctcattgtcctgactggcttagccttcagaccaaagacaggtattgttgaaacatgacctcattttagtcaaaagaatatgtttcttctttaggtaagatcaaggtaccacctatcgtctcttgttttattcttgcaatcaataggacatcccttcctaacttttccacattgcattgacatccttcaagatttccaagactgcttaactttagaaatacgaatatataattccttaagaatttttctaccgctgagtttttctttaatgacgatttgtcatcttagccctttcttcttaaaatgagaaaagataactaacaatgagttttggggagaaatgaaacttagttatggttgctttgtgtgttcctagcatatcttaagatatttgtgagaaagaaaagctgtaggtgtaatgctgataaccgaaatgtgtttagaatcatctgttttcttttgaaactaggatgtgtaaggaaaggaagaaaaacaatgccaagaaagagaactttgatagtcagaatttattgaagcttctgtccactactgctcagatcaagtagctgagctaattagaaccttaaacttttgctaaaatagatattatagagatttaaaaatgattcagtttttagattatctaagacattttgtgcatttccaaagcttttaatggtatatttttattgggacaaaaatgttagaatagcaagtgtgctttattgaaatattccactttatccaactctattaacttttaaggcatttttttcatgactaagatctggaagtacagtgataatgacaccacctcgtgagtgagattcttgcctcatcaggtgaaagcactacagattgtgcccactgggcatccatatttttgagattttcattaagcataataactacatcagatttgtagatggaattactaactcagaattcaggcactcttgctgagcgcccttgtattgatgtcatttctaacacaaagactagcagttcaggagcactatattgatgtcctgtaatacaacagcacactaatcttatttgcaagaaaatttgatgactatccaacatgatcaacatttagaatatctaaatctaaatgttgaatttagatatactaaatatatcagatattcagaacttaaaccttcttctttgtccgttgttgtattacactcaattctacagttccttctcctagcacgttttcttcctattttcacttgctagtgatcttgtcaaatatttagaaattaatcttgacagtgaaagaaccaacatcttagcacattttgacttcctttgctattctcattgctaggagaacataaagtaatgaagggcatgagggttttaccttgtgtgtattttcatctgggtgtctatgaaaacaccaccagagttttacagaaaattgctccgacccattctgagaagataaacatagctatgaccctaacgttctgtgagtgcacagagtgtaatgtctgtgaaaacacatcgtatcatgtattgcattacataaatacctattattttattaattatattaattgcttaatatgagttactaatagcaagaagctctttacattttcagcataccttcgcttttcattcaaattttttttttcttgctgaatcacatgatccttgaagcaactcatatagttggtgatcactcatgtgtttattcactcatttgacaaagatgagcaaataagtggtaatcactattttacgtggttggaatgaagcaagtgaacaaggtagacaatgtaactgggctgatagggctttagtgcaagaggagacagaaacagcaaacaaataaataaataacatccttgctaaaaagaaagaaaaataatgtaatgtgactgaggacaatgcaattgggagtcgtagttataatcgcagaaggccttgttgagtaagtgacatatttggtaaaactaagtgacgagaggggacaagctctgagtcatctagagggaggaattttctatgcaacccttgagaggaagttgtgattttggtattttaaagaaagcaggtcactttgtctgaaataaactgtgtgtgtttgggagagaacagaagtagagaaagccatatttacagtgaagtcagattaggtcaggtagggtcatgcagatcaaattgaggcatttgggtttggttctgattttgagcagctactggctgtctaatcagaggtgaaaatgatgcaacttactttttaaagagatcatgcttggtctgaaaagaaggacaagaagggaaatgatgaatccagttcagggattatcaaattcatcctggaaaagatgttgatggcttgaatgagggagtagtagtggcaataacgacaagctacaacagagatttgcatttttagtttagaaagattttctataagaacgaatgcagcaccattctatgtattagggaggataggcatgaaataaagccgcaaaagataatctttgggggaaagggttaatattctaatcagataataaattatttcaggctattttaaatgggtacattccattttgcagtgccttttattgatttgtgtaaaacatggttcacaataaaagtcacatgatggtcatatgtgggccctacaatattgtttactttcttattgctttttcttttatatttcagaattattaataccatatttcctaacaccctgtgtttgcctatgccatgtctgtaaaatggaattaattgagtctgactcacagtattctttagggaattagttaaaatgatacacttagcaatgttttaagcattgacaagtatggaagcaataattttgctgttatttctatcaacataaaccagcataatagcaaaagaaacaggcattggcctatgaagacttatttgggtttgtttgttgaagaaatttgcagtgttttaaagaaagagctccttttcaattgtccctgaattcttgacatgattgagaagagtttgtactgacactcaagttcctgctgatgaatatttaattaggaaaaagggaagaaattgtaacaaagctattattggctgtattcatcaccctccctggaaattccaagaaaactgtagtaaaggccgggcatggtggctcacgcctgtaatcccagcactttgggagtctgaggtgggcagatcacctgaaggcaggagtttgagaccaacctggccaacatggtgaaaccctgtctctacaaaaaatacaaaaattagccaggcatagttgcatgtgcctgtagtcccagctactcaggaggctgaggcaggagaatcacttaagcctggtaagcagaggttgcagtgagcagagattgtgccacagcactccaacctgagcaactgagactctgtctcaaaaaacaaacaaacaaaaaaacctgtagtaaagaagtgagtggtgaggatctgccaggttaggagaacctaccaggtaagagtttatgatatacggttattacctgttggacaattagagcccttggattattcttatgtatctacacattcattgaataaacattgtagtgcctgacatgctaacatgtaccagtctcagtgtggtttgtagactcggaggcagaaataaccaccctattaaaaccaaaactagaaaataaaaacactagcaattgtacaactttggattgtcaaggaaagcttgcttgtggatacggatcaaacggtttggggtctatttagtccttgttgaagctaaaaaggaaagagagagtgagaggcaaagaaagacaaaggaggaaagtactataaaaatgatggaaagaaaaatatcacagcctagagaatatatgaaaaaaagagaaaggaatacactatttgaaggaaatattgttactgttaagctgattgaattaccctgggtcctaaggtatttgaagattgttttgggattttgttcctatgatttttttcattgctctgttttctcttttggtgctttctctcccattctccactgtgagaaaaagtgagagtttaggtttataagttgatgtccaaatctgcatttcagagtaccagcttaatccccaaaatatctcactcagtttgtttttaggttatgaagagcatctaaacagagtgccaaaaaggcagcttggagtaatcaacccttttaaacactatttaatttatattgctggacctgcagcattgtggaagaatatactttacttcaaccagagaaattaccttggaaatgctacatgatcattataagtaatgtataagaaaataacttgctttcttagttttcaagcatggtatgtttttacacttaagggaagagacactaaacatgcattaggttaaaatgaaaagagattcaaagctcaggcatttaaaattttagaaatgcctaaataaaatattgaagcaaaagatctcaactaatttatttgttgtgtaaagagcttacttgcaggtttggtagatatttgctagatgcatgtgtagaaatataatttgtcactttaagtttacttttcattcatgttgtcaaaccctctttgataatttggctccaaaatttcaatgctaaagtcaacattataccttgaaataagttaaatatgaaacacataccaaaattttattaaattttacagtgactgaaccaaatgaaatttggagctggagattttgcattaatatttaatttgggactcactgtaaatttgtttgctgtgtactttagcagaggggtgccaaatgtttggaaataaattaatctaagtaaataaaaacagcagaaaggggaagggttacttgtatatatgtgaatacgaggtatgatttatgccccctgactggaactctgctcatatcacaccaaagtctgctgaagggcttttttctttcataaggaaagtactatgggaacaggttcaaaatgaatataagggagttatttatatattaggtaaagcacaaaaatgataattactgactgcacactcacagttaaagtcatttgggcagaaaatgttgacccgttggaacagaccataaacctgctgtaaagagccaagggaagtaaccaaagcgtattcagatagctgtgaagctggggagacacctgaaaaatctagcaatagcgtgaaaatcacttaagtaaaaaataaactttcagaggctgaagctatttgaatttaccaagatttagagatgaatgccaaagaggattagtaaaattcttccatgcaaaatacaacagtaatggctccatcacgacattgtaaacccaagcccgagagtcactatgtaagtgagagttgagtgcaatttgtaataagaataaaaacatttccttaaaaagcaaagaaaaaaaaatcatataaaggaacccgaagtaggaatcctgccctttttcttcccttctgcaggcaaaagaaaatgattggcaacttttcttctatggtttcacagagagaaatagggttgactgtggcttctgagattcctagactcagaggaaaaggctgcttaaatttctatgctcatcatgtcaagcaatggcactcagacatatttgactgatctttatggattaaaagtcaagatatagggcaagctttgcaaacacaaaagcatatagcagccaggctggtcagaagatgatgtgggtgacttgtaaattggagaaaatccacactgtccaaaagggcagctgatattcaacttgagcagactctggccttgagtgattgtgggcccagggttacaggcctttaagactggctgggaatctgaatttttatggaaaatatcctaagttttaaatattgcctatcaagataaagcagaaaacacatacacagactctctctttctctctctctctcacacacacacaaacacacacacacacaaataaaaatccattgtgggaaccaataaagcaagttgctggattcaacattgaggctaacagcctgtggtttactatgcaacccctgagttgccgatatcagtagaaggctggactgggtcacaatgaaaacatgtttttacttggtgcactgcaggcaaaagatggccctagagagccgagcataatgactagatatttcgactgggccattatggcaggatgtgggttcggaaagaagaatacgaggatgaatcctgcatttctgtcttcacatcttcctcccccttgctaaacgtaaagcagaatcgggggagagaacgtggatgcagagaaaatcattaatgacccagcagaggtttaatgatattagacccaattgtgacttaacatgggatcatgtttctgaaagtgctctaagaaacaaaactctcttaatactaatgaagaaatgctaagcggagatttcagccttagtactgcagggacctgggggaaaatattccgtgtgggaagtaacagcacgtggttgaaacaacattacaatgtcacacacacattgttagtgaaatgtggaaggaaataaagaaaagaaaaaaagggagcagaagaaaaacacagcaaagggaagacagcagagatatgattctgataagtagacaaattctcatactgagatacaaatgagatcacatttaggtttgtattttatctttctgttccttgggaagctgtgactaaacaagggccaactgtgtgctctattaccacacactgacttcagacttcatacatgtgtttcacataagaattagtttatccaaactcattatttgacgaagtatttttttaactttatattttgatataattttagacttacagaaaatttgtaagtctaatacagagtttccatatacccttcaaccaattccccagatactaacataatacataactataatacaatattaaaacaaaaatgtagcattggcaagacaacattattaatgagggtatagattttattcatattttaccagttttttccactaatgaccttctatcccaatatccaatccaggatgcaatgttcactgcattaaattgtcatgcatcctttgattcatccagttggtgagagtatctgtctttcatttacttttataacctgggctcatttgaggactgctggtcagttctttagtaactgtcctacaatttggctttgtctgatgttttctcatgatcaaatggaaattatgcattcttgtcacaaagagatgtgccctactcagtatacccttgggaaatgcatgacaatataccctattattagttatgttaatcttgatcaattgagtgaggtgatatctttctcattctttttttttttttttttttttttgagacagactctcgctctgtcacccaggctggagttcagtgttgcggtctcagctcactccaacctcctcctcccaggctcttgagtagctgggactacaggcatatgcaaccgcacccagataatttttgtatttttagtagagatagacatttcaccatgttggccgcctgctcccacactcctgacctcaaatgattcacccgccttggcctcccaaagtgctgggattacaggtataagctactgtgcccagatgcattctttctactataggtttattaattggaatgcttctctaaggaagagctgtcacttcccccatatatatatatatgtatatatatatattacatatatatgatatatattacatatatatgatatatattacatatatatgatatatattacatatatatgatatatattacatatatataatatatatattacatatatattatatatatattacatatatattatatatatattacatatatattatatatatattacatatatatattacatataatatatatattacatatataatatatatattacatatatataatatatattacatatataatatatatattacatatataatatatattacatatataatatatatattacatatgtaatatatatattatatatgtaatatataatatatattatatataattatatattatatgtatgtaatatatatatataggtatagactcacagatattttattttattttttgtgatataatctagtactatcactgtttattttctcactcaaattgttccacctttggccactgggagctctttcagtttgcctcctctaccctttgacatatcttcaaccttttttgagcgctttcttattttctaacactgccagatgttccaagctcatcttgtatttttttttctctgtttgcagcctggaatcaatcacttctctaaagcatttcataggatgttgaaattttacagacttctaactgaatgcactctcttaagtatcataaggttatcttaaaggtgataaccaattgcaagaacaattcctccgttaatatgttttactgttccaaaagaaatcattttgctcattaccttatgtatttctatttttaatttttatggattcatagaagctgtacatatttatggacacgtcatattttgatacaaatatacaatgtgtaatgattgaaactgggtaattgggatttttatcacctcaaacatttattatttctttttgttgtcaacattccaaatctttcactttgaaatgtacaataaattattaactatagtcaccctattgtgctatcaaacaccagatctttttctgtctatctaaatgtatgttgtaatcattaaccagctactcttcatttcccaccctagcacacctttcccgggcttcagtatctattgctctactctctaccttcatgaactcccacatataagtaataacatgtgatacttgcctttttgggcctggcttatttccctttgtttaatgccccccagttccatctatgttgctgtaaatgacagaattgtattatttttcatgaccgaataatatttcattgtgtatatgtaccacattttgtttatccattcatcttgatagatacttaggttgatttcatatcttggctgttatgaatagtgctgcaataaaaatagtggcacagatatctctttgatatgctgatttcttttcttttagatatatactctgcagtggggttgctggactagaactgttcaatactttaattttaatattcactgcaataattgattatatgctgactaaaattctgaattactatgattacttcttatgatgctccttaaggcatttgaaatccactgttttcaaagtttctgaggaaaaatatagatacgttttataaaacagactactgcatattgatcatttttagggaaatctgtgttaggtatgttgacttaaaaagaagcataagcaagtcatataaaagacaatagcaaaggatttgatcagaactgggaggtaagacactgggtctataaggattctatatcttggcttgcagaagggagtgcatagataagtagatgctagatatagtgaatgggtttaatgtttcggaccagtcatgaccaattggtggtggctgttcatactgctctatagaaagagatcctatactgagtctggattcattggtaaagggcattgttatcagttagtgatgtttccagtgatcacagctggaggactgtgtatagaagtttgagtatctggcctgcttagttaccatttctggttgagttagcacaataagaggctctagtaattatcactgaaaaggatggtgcctgtccatgatccagaattcccaatgaactaactggtaaaatcccagctaatggaacaagcattgctttgaataaaaacaagtgtccagaatcttcttgaaaggcctaggatctccactgtttcaatgtacacacgtatttatttatttagttagttagttttgtttttagtgctgcttcaccatgaacacaacattgttgtgttctttttgttttaaaatttctggtggctgatgagaccttgttctacatgatcatttccactttctcctaactttgaagctacatttttttttttgtggcaactgtaaaggttactcctaacctcattctctaaaaactctgattcttcttagatatttgtatatatccagttttaatgaggtattgcttaaaaattatagatatggaattactaatctgacaattagtttaacttctgataatagctctagtaaggtagtgagaaacagagctagctggaaagtaatgtaacacccatattgaatttttaacaacttaatacattttaggaaatgatccttctgaaaggcattatggcttgctgagaaaagctgtacactgggaaccaagagaagtgggcttgattcccagctctgcatctgactcactctttgtccttgggcaagtcacttagcctctctctgtgtctatttcctgtcttgtaaaatcaggagaataatgcataaagcctcccaccttaccaagatatgttgaggctgcattctataaccaccagggggaagaaagattcctttctttctggtggttaagtaccaacttatttttattagcatctagttagattaaattttgcaataagagaatggaattacaaataacttcaaagagtcctttaatccatgactttacactggaattttattgcaacacacattgctttgtgttaatacacccattggctagcaagaggctttgagagtcttgtgtgtacatacatattcaatgcctcaatctatttgagtacctactatagagtcttgtactgagcacatcagaaccaattcgaagagtagaagatagaatcctggggagaagaggcttaaacaccagaaacaattagagaacgccatctagaaatatttattcaaaaatgttattgtcaagattctagtttagacaatgaggaaatcaatgtagtctggaaaatcacagagcaatgccatgcaatagatggaacaaatgcctctgattttatgacatcttccatgattcctccagtaaaactcatcttctttatttccctcccgaatttgatagctcattttacatttttccaattttctctatcttttatggctttttaaaacatttttttccttttaactactacataatcatggatcacacattatatttggttgttctttttcttaattctccttttataatgaattgtagtccctccctattttttacatgagtttgaccttttgaaatgattccgtcacttatagaatattcaatgttctgaatttgctctgactttctcattattttatctatctttgtcctctataactgatattttctgtaaactagatattagatctatcgcctagactagagtaaggttgagcatttctgggcggaatgttttctgggtggtgttaggcatctgtatattaataactgtgatgtaagttatcggtacatgtactagtagaattcatagcatagatggaaaggcaccttgatgtaatgctttgcagcttctgctttgctaccatactcagtggcaatatggtgtatcattgtataagaaaagactgcacttatatagcactgtgacctctgatcaattacattatctcttcaagtttatattttcttatctataaaatggggataatgatacctagtatacattattcttttgaagttttgagataatacctgttttttgcactcaattaaaggaagtttattagtagcagtattagtaataatgtttgttataatagtagtagtcagtcatatagtcctgtgtgatgaaaatatttaagactggcatggattccacaaacagaacagcaatgctattcatatcagaatccccactgtaacagatggaatttacctgtttgtttgcttgtttggttgtttaatatgccaccatgtggtatgatttaaatggaggatatcatctttaaatccttttcaggatgaatcaggttataaaaatccaataaagaagttaaaacattattcatggacaaaaggctctctcaagactctcatgtttctttgccccatgatcatgttttgcttcctatacttgaatgcaaggagagaaatgtatgcgcaggatccaggagcctacacttgagctgttcccagtaatttacaaaacacacattagggttgaggtaatgagattaagttttaaagtcagtctgcttgtcctcaaatgcaggctttatcacttgttagctgtataacactggccatgatacacaatctccctgaacctttgcgcacctctttgcaaaaaagctcaaagggatgttgtgagtatagaacagatttataaaactccaactcaaagtgacttcctaacacacactaagcattattgtagttttattattacatacatacttttctggatctccagttttgcccacagtgggcagttattaatgcttagaaatcagtgaagtttagaataggagagatcagggctgctgcaaggtctgtgcactgcacaaaggaactacatataaaaactgaaaggaggagtgacatccacattgcattctatttatcaaactatgtgccctaatccagggttgcatttgtccaaagttgcctttttctaattagcacaaaagtgccatatagactattgctgccatagatggatatctaagcagagggaattgcaggaacaaaattagtgaagaaaaagagaaccaatttacaataggttgttcatcatgatacagtaaatataagatgaactcctgaagagtgagatatgtaggagatgtcctttataatctggtgaacccaaggtgggctttaaaaatagttcctaaaagaaatcattaacaattgtatgaatataattaatgaactcctttattatcaaaggaaagatccttgttgcagaaaatacttcagtatagattctcatattttctccttagattagtcattcaaaatgtaatttattttttcctcagatagtttaaaatgacatttttgctacattagaactgagggtttctcccactacttattaacttattggtggcccctcaaatcatgactgctctcttgctgcgtgtcctgtgaggatccaccgccatgttgaatctgaaaatatcaagactaaattactggcaatctggaatacttttctgatcttggtagtattatttcagatagctttttttaaattttatcagttaaaaataaagatttttctgattttcattatatcttttcaccatgcagggcttttacatttgccttataaataaacaggtatggagaaaaggaccatctattttactttttatgctccataagtaccactttacttcttgaaaaaagaggaatttttattccaggaagaatgatgggcttgtataacatcaagtacatgttcaatgcttctaagtgataaatttacataaaggatagtttgctttctcatcagagtctctacattaaagattttctgtcggaaaatcagaatgaagactaaaatcaaggcttaggtttgtctcttttaatactacacatatcattctatacagcttttgaaaacaaccaaaccaagcatcacttttaaatgttgacactgtactttgctgatgctattattttctcttcaggtaaggggcctgtgaggaatgcttaatgcatgtattattttcctcctcattgggaaaaactcccgtttaaataaaataatcctgaaatttaaaacaacatgttttattacttttgtcttttgaaaaccaaacatgttacacttttggtttcatgcaaagcaattaaaaccagtaattttagacaaatatgtacaatgttaatcttggccttcctttaactaaaggggcataatttattagagtgtgctgatatttgaaaattctttatttctgataaattcataggtattctcaaaattatttttaataattggaagaatatcatttcttaaaataagcattgcttacagtaacaacacagaactgctatcagaagtacccaagttatgttattttgtttttgctcttacattttcttggtaaattcaagccttgttctaatgttgtaaaaataggagaaaaagaaattaaaacatttctagggtgttcaagtgagttaacatcataaccaccaattgtcagcaggctttggggagccagcagggagccatgtttacctgacataatggatgtgtgatcacggaactcattaagctataacaatctttgggaaaccgttgttcccctcccaaagtccactctaaatgtcctttttcctagtccactgaggtccataatgtttataaggtcatcatgttctttttgttgttgttagtctctttaagttgatcttcacatgtaacagaattctgtcaaatgaaaattgagatatttgtctctgaaaaatacattttcaagtaagacaccactttaggctcactagaaaagttcttggataagcataattcctgtgaccaatggtcctgaaataataaggcaccccagcacttgaaatactcagttgtctttacctgacgtcagttgggcaaaatatacaagtgatctgactttagtgaccttggtgaataaattctacagagcaaattttagctgaaggctggagacaaaaatataactaggtctcaggtgtgtggagcaatgtgagtatctataggattcttttgtccctttttacttgtgttgtgtcttatataagataatcgtaagtgatagaaaacttatgtaaatatgtactaatggcaaattaaagagcacgcttgaaaaataattttaaaaatcctccatccacttggtagtgaaagcaaaactgttgaatgtccaagcctcctcagtcagctttgtcagtattcaatcatttaatcctttagttcttcagattttcatgaagcctatatttcacatgaaagcaaatataggatattagaacaatagtgccatgaaataattattaaaaaggcaaagactctaaaaatggaaattctttgtcattcagtgacggacttttcttttcccatgagagaggatagtagtcaataacattgacaacctatgccttagtggtttttttattgaacatctattgattaattacttgcaaattacactcttagtggataacacgaaaagactgatcctatagattttttaagctaattttaaattttggattgctatttcccatggaattgaaacatatagaagcttatttgagaaaaataatttagcataacggtagagctctaaaatcataggaaagatttatttcagagaacatgtctgctttattatttatggagagttccctataaattcatttttatatttgagtcatctcatatattatatataatttttaaagagatttatatttgattttcagaaatgtgttaggaaactttttggagccattaagatatatctgtagccctaagtacccaaactataagaactttgtctgaaaattataatagcagaatgaagaaaattatgaacatatatgacataagctcttatgaaaaattatataatataaatatatataattcattgaatccactgggcatggtggttcatgtctataatcccagcactttgggaggccgaggtgggcggatcacttgaggtcaggagttcaagaccagccaagccaacacggtgaaaccctgtctctactaaaaatacaaaaaaaaaaaaaaaaaaaaaaattagctaggcgtggtggtgggtgcctgtaatcccagctactcagggggctgagacaggagaatcgcttgaacccaggaggcggaggttgcaatgagccgagattgtgccactgcgcttcagcctgggaaacagagcgagactctgtctcaaaacaacaaaacaaaacaaaacaaaagacacattattgaatgcctatatgagacagactaagaacaactgtcttagcccattttatggtgttgaaacaaaaacgttgagactaggtgacttataaaaaacagataatttctggaggcttggatgtccaatattaaggtgtcagcatctggtggggcccttttgctgcgtcagcccatagcagaaggcagaggtgcaaaagaaaaaggacagaaggggaccaaactcatccttttatcagcaacccactcctgtgataactaactcattctcacaatagccacattaatccatcaacgagggcagaacccttatgacctaatcacctcttaaggttccacctctctacaacattgcattgggaattaagtttctaatatataaactttaggggacacatttaaaacatagcatcaacctttttgagcagtataattttattttaacccagaaactgttgtaataaatagaacttgtttttaaatgtcaatttttatattgtgaaatatatcaacattttttctcatctcacagaattaaacaactaagcagaactcactcataaaatgcacttataattaaggcaaaaaacatatgaattttatatatacatttttgtcttaaatatgaagctttatattaaatatgtataatgttataattatttttataacatatgcctttatgctcatgtatatttgtcccattaattattttagctaaatgagagctaacatgtgatcacataaaaatgtcattaattttttaaaaagcaggatacaataattgttgcatagcattgcctagatatgagacataatataaccttcaacttttaaaaattttgtattgttatcagatttttcaaggtcatcattattaccactgattattatactctagactttgtcttaacctcatattaaattgctccagcatttttgggtgaggtgtggggaggcaagaggatgtttgcagtgggcaatggcatattccaagtgacaaaaaaggaaatattttaaaatctgatatattttatatcttaatgacatagaatttataatggagtatagattggccctgaagccaaagatttaggtttgtgttcaggctttttattctactattttctagtggagaaactctgaacaagtcacttaatttcttcaaaactgagattttgtatctgcaaaatgtaactaattacagcttatgacatgaggttgtttcaaaattgaataagataatgaaagtgctttacaaattttgcagcactttacagaattaaaacttaattattccacaatagtaataatcaaagtcacttaacttttgtgattttaaaaaattatccaattttgcaatctttatttcttttgtttaattcttgtttccttaacttgcttctatagatggcaggaaaatttaactgaaggacaaattcattatttcaaaaacacttcttacagatatactaaataaaattgtactttgaaaaatgtgtgaatgacactataatgaaaaatcatagctaaggctgcagagtaaagcaagtgtggtagacatagggcttgagaagagcagggagtatgtgtaccagtaatccagcagttcattgttttgtggtgttaaatgccgtaagaaaagtagagatgaaatactgtgaaacttcaactttcattgtttataaacctaagtacttttagaaaacagggttaaatgatattttatctaatttagacttacattatcagaggagtatacaaccttaaggaacatgtaaatttagacattattatttaaaataaatttcctactaaaatacgtatattaataattgaagtataaacaaaaaagaatcactgctaggtagtggaattaatttaaaatctagaccctgaagaagttttcaaaatataaacagagttttggtttgttttaaaaaatacaaatcttcagtgctaattaattttctctacaaatctgcaagcttggaccaattaaatcattttagctgatctccttgtgaaccatatgtttatcagcttaagactgataactaattcatcaaccataagcagaaaattccatagaaaatagtcatttcaatctgtgatttttccaaaattctacattttgtgaactatacagccatgtaagagttaacagtgaaaagtatgatattagccatatctagccctatttaatgggatgtgtcaatgagaaatgacacatcattgttgttaaagccagaggtagatatgtatacaattttgttaattgaaaagaactaggatgtccaatccatttggcaccctgaaattagaatgacctttttagaaacccaaagagatctgtctaaaactctttaatggttttcagttgcttttagaataaaatgaaacgttccttggcaggacatctggggatagtgatgacctataatttgctctcctttttggtttcacctccattcaggtttgttcagtagcctttcccgcctttgcacctcagccaatgatgcacatcagcctatgagcctccttccctcacagtgtttgccaacaagtgctgtgattgttgtccagtgctgacattttttctcttagactgtgaactccttgagggtagtgagtatatttcatttctatatctgatgtgtagtgtctggaacatgttaggacatttgagacagatgaataaatgtaaccaaagatcttcacaactggtcttgaagaaaattgattggagagcttctgataggtaaagacaatatgaagctcttcagatgtttacataaagaagacatgagttgtttactgctcgcatttttaaggcttggttaagtataaggctgagaaaatgtttcagaaaatatgtggttactatttcctggaatgagacccaagtaaagtaactctggtgagctgaagagagacaggttttgactacactgcagcctattagaagctccaatgcaaacacagtactaatgagttaagtgcaaagcagaatgtcaaaaaaatacctttatgattctgcattgtatcaaacttatctccatcttatataaacactcacaggactcaatccaatatttggaaaatggccagctttaaagaaactatttggagcattggtttcaggccaatctttgctaaatcaaagggtgccagtttccttcatgccaaacagcacaataaacccctctgcaaaaggaataaagactgctgagaaataactgatgaggcttttaatgtcaataaatgtcattttatgcatcagtattgtgagagcttccttttcacaagtggaagatggattttataaactctcccgtaaaagaatggggatttagagttggcattagtagacctgtaataaaacaaatccttccttccagttccccttgaagtgaagaatagcacttgaacttctcatttggtaatatgtggattatagatatccctcttccgcaccactaaggtgtgtgtcatcttttttctacgttcataaatatcctcttggaagaaaaaggaagtggaaaagaattgaaaaattgtcttttggcttcattagatgttgcttgattaaagatttggaaggtactgtgaaaatacatttagttttctgacaatcttgtaaatgaagctcaacaagtatgcaccagagtactgatcagacacttgtgaggaaggttttacacagctgacacgttctgctaatgaatcctggattggcacaatatttaatttggctttttcttatacacggtaggtaagaatcagccaatagtatgaggtcagaaatgccatttatttagcatattgtccttattgcattttgtgatatattctagcttaaaatattctgctattctgaatatatttaattcatgaaaaatcattgggtcatcttttacaagattagaatgttaaatggtatttgggaaagacaaaaatgcccttttgtcatttcattgtttggccaagacttctttcttttttattttttaactgcaaaatttgtacattacaagtgactagtcagcttccttggtgactgccaaaaactaataaacactttaaactcaaagtgtgtcctttcacataccaaagaacataaaggttagagttaggtttctttattaaggaaaaagtgattataagaatgcccattataaaactaggctcatcacagagagaaaaaaatgataaacagtagcttttatattcaaaggacaattgatagacttgtatatatacattgagttaacagtttggtcttatgggttctcagggactaaagctaatgcataataagaaaagaagtttatgcaaataatttactaaattaatttacacaaattaatctcataatttaatatgaataatttgcatgattattttaatctagatgaaaattaaggttgataaagtataatgtggataacttgttagcaaaatccttcaaatactaaaatatgtaatatttaaaatagcaaaaacattacttaaccctttgatttttacaaatcttaaagtagtgagacttagcaggaaaattctgctcacccaaatacaaagtcaccttcacactagaggatcatgtttatcctttcttcatgattaagaaagaaaaattatatttatacagtgatacctagaagacaaagcccagaaattcaaggagtaattaaaatagtgcttaaccaaccaccaaattattcttagttatttttgtccacattaattatattttaaaaggtaagatttttagcttttaaaatgtgaacacttagtttttgctaatatttttattttgttatggttatgagtttttgcattatacctgacttggacacatagaataaatttagggagacaatttttttatatatgtaaagtatctgattctgttttctagatcttccatgacccaattttgtggcacgagtttcatagcaaaagatttgcattctaacttttattttcagtagccaaattatgaatccacattttctttaagtaattttaagaatgtaattacttttttatttttttattttattttaattttttcacctttgcctcccagtgtaattcattttagatactttcaaaatacttatatcagcagtttcattctttcctaggttcctaggagataggaacctagccctgacatttgtctccaaaggaatggctgccagatcttaagtgaatttgtctgatacaaactcaagtttaatacaaagaagtactcaatagaggaatcgtcatgttttcttttgtgtgtgtgtgtgtctgtgtcattttcaggcatttaatgaggaattagaggagatttgtgattggggtacaaattggttcacaatgcatgtggctgtaacatgcataaggctaatgttttgagacgctgctttagactttaaaatgcattttcaaatacagttcaacagccagtaagtgttaaagcactgcagagagagactagaattcagatcttgcaatgtctacgtcttttgttttctcactatactatcataatgtagcatcccagagagactacattaatacttaataaaatgtagtgatatgacgataaagcactatcagagttttattatttaacatctcagaactaaaagaaccatgtaagttttctctctccatactatctcagagccaatgggaggctaaaagcttgttcaagtaatggtttatgttctcagaacatttttggaattcttattttggaatgccttcagagcctacggcattttctattaaacgtgatactttcatatcttgatttctaaaatataaccctaatttttaaaaataatcagaaaccatataaagttaagatctctgaatgaagtgagtgattagacttgtcattttggttttgactttcaaagtttgagcctgattttttaagtgataggttgtgtctaaaggtaattctagaagaaacagttaaaaatagttttcttaatagcatcaatacaatattaaacttccaatctatgtctaccttaagtaatagcttcatttggagtctttaggactgtaagagtcatctagaatcctatatcatcaggatatatgaatatatgttttatatctgaatatgtctaacatatgcaaaatatgtcaaacatttgctttatatcaaaatatacgtaacatatgcagagagatagacatactaacatgtcttatattccatttttattaagtgtgagtgtggccagcttcagtccaaatcatgtagatcacctgtgtaactcacatgttacctaaacttttcccaaagcaataactttttttactatgtgaatgattatgaagttgcatttgagagtgtttaattgccaacctacaatgccaaggatatccagcctggctgtggtccaaatcaccagagcaatcaccactgtttgagaatgaatcagcctacagttgatcctttattcctttatgtacaaactctgcagcctgttagcacacttatttctacctttccctctagttcactcacaaaaacagcaagtggggagagctcaatcaggagaaaaacaattttaaaataattgtacctgtgcgatatgatttatttgattgagaactcctctttccctctcttcctttctctttcttttccttgtccccttcctccttccctctctcccttcatctttgagttcctctgttctcaaagcaaaaggaaggggaaacgtgtgtggggacaaggagcccttaaaagaagaaagctaaatttgaaatagcttgaaaacaacccagatcaatctatcagtttaattttattatcatcttaaagaatccttaaagcagcttggttattatcatcaggatttcttcactggtttgaaaggtgaattgttaatgactcatttacagaggtatgcagttttcttttatttttcacttacaattatcttcacttgttttaaaatgcaatctggcctccaaaatgtattgtagtcattcattatttctgtcaattatagtttctaaatcacagagttaaaatgaatcataaataagcattaattgatttcagtcactgaatgcccacttcccaaagaaatgaaaggggcagaatttacttttgaaaatctgctttccttggcagctggagcactggggctcagcagatgttagtttctaaaagctggtattcacttcaggaactgactctggatgttggtgttgcttctccccaaggaataaaatgttgacagagtggtgtcaacgctaatggatttttgactgcagtaatggtaacttcatagagcattggtgctctccaagcattgcagcgtgatgccttgggccccctgatatctcacggagaagccacttacttgtataaacaacaaaccctacacttccttccaggtttcaaacgtagatctaattttagatgggtaatacaaaaccaagtatccttaaatttagtgtaaaaaatacaatgctcttatcaaggaaaatgaatgtttataaatgtagaaaaccccacttacagtcattgtggcaacatttgcattgtttgtgaaattagaatcaacaatttctttgatataaagatgaaaattctattgtgaaccaggctctattacaattgacatctttctaacacttagaatccaggttactattccaggaggggtgttctaatgaggttgttgccatagaaactttccaatcattgatgtactttttactatgggtaatttaaatgctatgggaaatttagaattttaaaattatttagaaacagaactaattctgaggggtactatattattcttttatctaaaataaggcacttgagcaaactaattattttgaagattgaagaaaggggtttattattaccacttgatgtctaagcctaagaatgaaggccaagagaagaatttggtctggcaaatgcaatttgtcaatagagatgcagtgttagaaaatctaaatgaccattagttcgatttgggattgcgaatacttaaaatagcatgaacgatttttatataacatgggataaataagcttctgaaggaaatatagagaaggtgcctttcttatcataaattatcaattaattttatcaaattggtttgaaatttaagtggaaaatattttatcctccaactcatgttaatattgtaatgataatatctgtctgcaatgttacgtaaaggactttgtataaaataggtttgtagccttttgaaaatttattgcctcctggtcatcattttaaactactgttgcaattagattataaactctttgaaggtaaagcccactgggacagtggccaccaagggaagaatgtatattgaaatatctcagtaagatcaaggaatcacgtttaatttggttttacacatgcattgctgttgaataatgagttttcccagcattacagatgtgaaatatgacagaagattagatgaagtgtacattatgtactggatatcaacttgtgccattctcatttttattctatatgaataatgttttcaggcagaaatgcaccaagttattgcctgagagttagttgcctgtccatttattgaagaatcattgatactgtcaagagtcaatgctgtatgtgcagaggagaaaattgagttctaatttaggaacaactcctcaaattaacaaaagtgaattatctaattttgaaattgtgtcttttgaaaatgatcagtagtgttgcttagaaaacatttctgctttgatttctcatttatccatggcttagtccattgagatttctcagaataacgtgaggcatcaagtcaattaaggttaactttaagtttaagattgaatttacattttatctcaatatgttatgcatctatttattctggctctactgttctgaatgataataatgtaaagagcaatttcatttattttattacctttgtttctgttacatacaatgaaatcagacttcttaaaatgtagaattcagattttatttattctatattttgttttgcaatgaagtcctaaaattgaaaatgggtacacatttgggtatttttatggatagtaaaacatgttctctaattcgaaaacgaattaaagagccatttaaaaaatctccaaagcagacagtttccagtaatatctacttctaagtaatttctgaaactacagcacagacttagcaattcaaatatatatttttaatgcaacattacactttgaagtattgtaaacatttttgaatatttataaatgaatttattttatttaaaagcatcaacaaagatttaagattcagtaatgtctaaatgtatttggcactcttgataatgtcccccaaagcactggaaatttttgttgaaaacatattttctggatccaatctccagcaaatttctttcttccttcaccttttagcaggtaactgttagtgtggtgctgtgtggtagaggaatatgggctgaaaaataaccacacactcttcatttcctggcattattagaggtctgtaaaagacagctggattttctctagcttattcttgttcttcaaaacattaaaaagtgagagcatttatacaagaaagaatattagactttgatgcttcattttcagaggagacttgtaagaagcaaaagtgacatcatgtgatttattctcatgacacgattgtaaagggagccaagacctataaaaactcaatctgttgtcgatacattatttacatgtgtacaccatgtcttacttattctgaatgccatatttaaaaaaatgagtgcttcagaattggaatatagactctttatatcgagctagattcaactttaaacaagtaacttctaacttcttagtttgatggcaattacatggttttaaaatgtactttcttatttttgtggtagcatattttttcagtagatagctctgtgtatgctgacattaaatcattttgctgtccttcaaaatacatactagctcacttaagttttaaaatgtggagatctatttagctgtacatttcatgtctttcaattgaaaagcaccatatatgattttctaaataattttaaagtcaagtaatctaccttaaaattttaattgctaaaaaatttaattgctattccaaatagtacacaaaagtaaactgttgcttcttttttttgcacatgtattatatcataaaattaaatgcaatgctttctttataaatacaaatacatgtaatttcctttctcatatttgaaataggtcaagagcatttgactaaagaatcatggacctatattattttaaaagtaagaaagaaaggctttacaaggaaatccagttttcaacgattattgttttcaccatatatgtgtgaaggttttcttatgaaataggtaatttttgatgttatgcataaagaatcatccctcaaagtgcttacattctaatagaggagttgcaagtattaggaatcccagttgtgtaccaggcaaaataaatacagcaggactgttggtaaaccggggttttttttttgcaatgataattacagcaaactgtagactgtgatagtccagtggactgtctaaatatacaaatagacacttataaggatcagcgattataaagtcactccatcagattttggaactaaacattaagtactcatggtcatgaagatgtcaacaatagaaactggggacttctagaggggagaaagggagaggagaaagggttaaaaaactattaggtactatgctcagtacctgggtgatggggtcatgcataccccaaacttcatcattatgcaatataccaggtaacaaatgcacacatgcaccttctgaatttaaaatacaagtttaataaataaataaaatagaagtttacatctgctatcttccatgactttgtaaggcctctgtggaataggtaatgtagagctgacaaacttatgtgtaaatgagataatataaacatttagtttcatagccaataattagattgaattttgtattcaagatctttttgtctccatcatagtaggaggcctatggatcatttagtggaacaaatagattcaccataaaggtaaatgcctatagttataattaatatcacattggaagaatagaatttgtaaaaaaaaaaaaatacaatttattttcgtggtcatgtgaataatgaaagtgacagctttaccttgctccctggattaacatgaatgtactcaggacattctacttctgctttggtttactttaaactccttttctgccttcatctgtaaaaatgaagagattgttatctgggtaaacactgttaccgagtcttagtgtgactgagaacaaggaggctggattctttgattggcccatcaatatcccacaaaactgataaatttctcccttaatatcatttatatatcctctgcataaaactaaataaaagaagtctgtagaactctgtgaacttctgcaaaagaggatgtcagtataatacaaatgttatttatttgggtttagaaggaataagtctggaacacaaaaaatagttaagtggactaagacctggcacccacactgaattccagttaatgtcaccttggttttcacaattgttgacatataggactattcaccaggaattgaatggaactacaaactaatttcatatcggatcctgagcgatcttgacatagtaatgtcttttgttttttggggttggattttaatccaaaaatgctatcctcagcaatttagcaataaacctaggggttttctaatctccttgtaaaaataatcacattatacatggttgaagatgtagcattgcatatattaaacattaaatgttagcattaactaaactcctttccagttcaaaaaaatacatgttgaaaaaggtattttcttacttcaaaaagggaaaatttgggacctgaataaacttagaagccactggagtacagtttaaggccagaggtagtaattaactcaggcctatataaccctatgggtactctcagaatatttaagtcattggttaaatatgacccatctgtatggtcattttagatattgatttcttcttaaatataatgaaaaaaattaaaggatacacacatgcacacacttaggttaaatggttgtttatgtaaactataccagatattttaagtacttaatgattattagggaactataaactatggagtctactgaactacttactcccttgaaatcaatttacttacagtaatagcatatcacaggttcttattaagggactttttaaaaactagaaggtgctaaagagtataccgtagtataatacacatttggtaacttatactcttgtgcattgcttcacatcttgctaaaaacatatacacatcccattgtggatatgttctaaaatataggggtccatctgctgatttaaaaaaaaaaaagcttttttatatgtgcatatcgcacctattttttgttgctctctgtgaacagaaaactatttttttattttgctatttgaaatttacatattctaactaaccacagtacctaaagtttggctaacttggttaattcacatagatgctacaaatattcattgtactttagcagcattttggtatacataagatggaagatacatggcatctgagagaatatttttactcttgaactattttctcctattttcagttatcgattcacttatccaattataaaattgtagccctgaaaggaaactgactttaagtgctaacgaaatttattactaaatatttattactaaatatttgaatatatttggtttcatttattatatttagttatatttaatatataagttaagatgaagagactgaaacctagagaagtgaattattttctagaacacagggttgtgtcaaaatcaggacagaaagtcatttttaagcttcattgaatcttttattaattcaatttaacaatcattttagtttttacagcatttaactaataatattataccctaaaataagcatgatgtgcttatttctttctatgtttatagaactgattctttttgcaagcagtgctgtcacttaacaaatttgtaacaagaacccttcgctatagctatacatcagttgaagtattttacaactgcatgaggccaagtggcccctcaaaatgctgaccttgcataatccattaccgtcttatactttatctttgtggattccaaataaagctgggttgaacattaaagccagcttcacacattaagtcataatcaaaaaaacaccagccttacagccaaaagttattgaaaaggaatttaaatcattacctcagtgctataacctgaatatttgtgatacccagaatccatacatttaaatctagtctcctatatgatagtgttaaaaggtgggcctttggcaggtgattaagtcacggcagtggagctgtcatgaatgagattagtgcccttataaaagggacacagaaagctaaatgaccctttccaacatgtgaggacatagaagatgacatctatgaattggaagatgtctctcagcagacaacatctgctggcaccttgatcttggaattcccagcctctaggttgtgagaaataagtttctgttgcttataagccacccattttatggcatttttgttatagcagttcaaataaactaaggcagctaagtctcttgaaaaattataaaaggagaagtgtattgcctgcaccatatcttcttgaaagccacttttaaattcttcccacactctaagtagaaattgatcacttgcatctatgactgctctataaccttatctttttttcttttgctaaactcctcaagatctttatctttaatgcagctgtcacacaggtttactcttttacacacacctctgtgcatctaaaacccacgcacatgcacactttcttggaaatccggtttactccctctgatggcttcttctgtgtccactgccttgcctttctggttttctagtactaggtcacacattcaatggatatgtgatgtggactataaggagagggggacattttcactactgtattttatcttgcctatcacgtttattccctttgccttttcaagagaacgtggtgatcttaaaatagaaaggagctaactctccattccttgcaccccaagtgttaaatcaaagtaagataaaggttaattttttgtgatagcttatataaaacattatttcacacattttgtggtcagtaaaagtgatgctgccctcaaggaacataaaaaacagcgaactaggaattgggggaaggcgagaaggaaaaattggccttgttctcaggaaactcatagttcgctaggaaagttaaaatggataatataattctacacaatgttagttttaattactgtagaaaaatgtagacatgatgacaagatggagaaagacttcaaagcaatcgtcactttgggtgatgaaaaaaattgaattatgccttatagaatgtgaaagtaccagacaggagactttggaggtactgaaaaaagtggagcatggatttgtagatgggagatcacgcagggtctatgtacctgggctttactcttctatgtgattttggtgttcttaggctgtagatggtatatttcaggatctttattttgttacacatattttgaagaaaaacgtggaaaacttatgatggtgattttgcagaaaaataatttaaatccagaaattcacaaggaaaactgaaaatagaattactcagattagaaattgttgttaatatctattttagtggaaaacttaatcagattttaccatctcatataaacagaactctggatacacagagtttttttcactgaactattattttcctaccattaaaacctatataatatgtagtaagagtcccatacaaaaacacacacacacacacacacaaatctccttacaaatttaccccaactctcaaatggatcagatcgcaatacttttaatccactcctatgttgttcccactgctgtacctagaaagcattggatttcttgtatttgtttctaccatatctattaattttaaaaagcaatttccttatgagctatttttccacaaagttatggaccttgagggcaatgttcagaaatgttcttgaggaattatcatgaagtagtcacatcaacaaataaccactgtacataatacaaatgaaaatactaatatgccaaaaaaatccaaaaactagcaatttttttaaaatgtaggcttagttacctggcagaaagtacatatttttaaacaaacaatttataagaatttattaaattacaaccaattcactaggtacttcctctgaactaagaaacccaaatattagatacatgtaacagaaacccctattcaccatgccataagcaaagaaaaaatattaagttatcatagaaaacaagatacctggatgaaatcagcgtggagatggcacaggggttctgtggtgacccacaatcattctgtttgcttgctctgccattgtcagtgagtgttcgtcctcttgtttttcacccgctggcagcaagatggttgtcataggtttagatagcttctctactcaaagtagaaaaaaggaaagaagggatgccagaaggaaattgtctagggtagctctctccttttatgtggaaggaaaaatttctagaaatctttcatcgattttctgctaatattccattgatcaaaattgggtcacatgctcatccgtagctgcaagagaggctaaaaagagaatttctggaaagggtgagtatgctagtcatgactttcttagaccaattatgatacgtcttttgggcttaacacattgtctacctgaacaaaaacagagttttactttgaagaaagaagtgtctatggtgagtattagtggcatgctgtaggggcaaggaattaactaataggggttttcacatatagaaagaaatctagccatcttcttatagttaacaattgcatatttggatcctgatttcactcacatctttaaactcaaatccaaatgttctttccataatacctgagcagttttgaaggagagcttggaagtttttcttcaggttttagctatacttctaagaagtataattttcagcccttagttaccttccaaatttaaaaaaataaaagccaattttattttttattatatgagacatacagagaagtccagattcaaaggagtcactaacagcacctatcacatcacaaaatgatgatggagtattttccaatctcaatctcattgttttctttaaacacttcagctgcagcatgtaaatacttttgccaaagtctaaaaaatgagttcgtctctgaaaatagaagttgtagataaatatgaaatatttatacttcattttaaagatgagcagtcttcttattcagttttttgcttaaagaacaggtaattacagaagtttctctaattcaggcagattttatctacttagtgattaatcaaaaaatcattagtctctctcataaccaatgagagaaattttcaaagaaatccatatggaatttttggccttctgtacaaagttattgcaatcatatattttctttaaggaagaccagttgcagtagaacaaattattattttaaattaaaaattgtatttttaatgaattaacatttagcatatcctgatatttagcttctcatattagtgcattttgcacataactgaactgtaataatagcctggaaactatatatccacttaaaattctggaaaggtaaaatttttagaagatgaaatttcccctagaggctaagagtaagttaggaacaggaattccaggtggatagtactttgtattgctagttcatttttcattctgtcaacttgcatattcttgtttcatagtttcatatgattcatataaataattcacacacttagttcaaaatgtggaaataattggtgagagattatttggagtatttttgtttccagcgttgtatacatctgtaaattgaagtcttgaatattttttaaaacattgggttctcattatctttcctgtgtataattattttcatctctgtacccacaatgtttgtatgatttacagctgcaatataattgtgatagagaagagagagtattgcggttgagatggagaagactttttcatctgtaaaatggcagtgcaaatagctaaattacaaggttgttatgagagatataacataggtgaagagtatgtatctgatcctcatataaacttgaaatttggttattatcattattgtttactggtgataaaaccaagcctcataattatgtttataaatattacatatgaataataaccttttaaaggcatttgaaattatattttcaactttgctccatttcttataaagactaatatttttaatgagtgagtggctgataaaatcatgctgtaatgtttttaatataatatgaaaagagaaattgttaaaatgtacatattttatcattatccacatagatgccaaacacatctgacactttactttttttctgacagcaactcaaaataaacatttttggatatatgatgaagctactcatgtgatatgcaatcaaagcatacctgcctatgagagataaaaccaaaactggataatatcaaaagccaagtaatacaagaaagccctcttctcatcaagaatatatcaaaatatattcttaaacatgttatgagctcttaactaggcttaaactttgcaattttcattattccagttaaatttaaatttatggtttcttaatcagattaacatgtcacaatccttcttgagtatcttcattgcctccctactttctaaagagtgacaactaatctcctgctattgcatttaagatgcatgataactatccctcaacctaccattctttgtccagtcttggaccacacttgtccatgaatgggatgcgtctttgacaggatgcccttcttctttccctcaaagtgttttaaatgtaagacctggcctgtttgtgtttgttctgtgcctgaagcatgggatacttttattcccacatgctaatttttcaaaatccatcggaacattgtgatattttccaagaagacttttccaacccttctaaatttaataatcttttgcttctcttcagttgcaagacgttttggtctatgcaccttactcttctttatatcttatagttatgtttgtcttatgcataagtttacaaatactttgagggtagcccgtgttttataattttctgtatgttctacagtatctatcaaaggatattgtagattcttaaatagttgcagaaaaaaactaaaattaatattgattgaataactatcatttaggtcttcctggctccatatgtcccttcaaaagaatgtaagctccatgaatttaatagcttttatctgctttgcttattaatgtatttccagtgcctagaagggtgtctggaacatagaaggcacacaaaatttgttgacaaaaataatgcgtttatgtatataagtcagtaactttttctttttcttttttttttttttttttttttgagacggagccttgctctgtcacccaggctggagtgcagtggcgcgatctcggctcactgcaagctccgcctgccaggttcatgccattctcctgcctcagcctcccgagtagctgggactacaggcacccaccaccaagcccggctaattttttgtgtttttagtagagacggggtttcactgtgttagccaggatggtctcgatctcctgacctcgtgttcctccctcctcagcctcccaaagtgctgggattacaggtgtgagccactgcgcccggccataagtcagtaactattgaacaaatatgctacttggactgtttcattaaacattgatattttaataatgttaacaaagcattattattgaaaggctagtttgatcacccatgactagcttttttgtaggcgaaggtatcctgatatggaagaatattagaataactgatggctaaggtattgtctaaatctaagcatgaatgagtattatccaattatatttcacattaactagtagagttttcactcactatggcttatattaatcatataattattctaatttctcatgtactatttacaatgcaaaattcaacactagttacgcaatatactaaaaccaactaatagtgttcagattaaatgtagctgggaaaatttatgtaggactgattgctgagaaagaaataactatttaatgtaattatgttttcatgaatcatagttaatggagggaccctatccttatcttctaaatatcaagtagtataactgatatcctttatgcaaaatttaaaaatgaacatgagtgaatcttgctctatgaagcagttatttttcaatggaaacagatatatagatataaaatattttcaattatattaaaaaattaagtgtcaaattcaaagaaaacctgtagtgaatcctttggtgattcacttttgacacataaataattgcttacctaatttgcatgctctgtacattttgatgtttgtgtatttaaatatatttatacacatgtattctttagataggataaaaaatatattaatgtcagtgtatttaattttgaaactactttcgtttgtaaaaggtcatcttaagcaggaagagatagtgttcttttaaagtacagcttgctatctatgtgcaaattgagcttatctcttgcctgaaacagaattatctgttcttaggcttaaggaaagctgctatattcagtacagtggtatttacaaaagatctagcttggtagacactttatctttctctgtggttccttgtctttgttaggcaaaaatgaattacatggtattattcccaatttgctgaaaaggggcgatattttatatttgtattcattgtaatattcaatataatatttatattcattatatttatataatgaaatgaaaatgattgctggaatatgcttacatattaataagtggcagagactcagagggagaaaactccctctgagttttgttcttataatttctctttggaggtccatactgaaatagcttgcctttttgttgtaattcatgtaaataatcctgaatattctatttacatcccctttgaaaattactgccaaagtaagacatgtcaagcctgcaaaatccttgatatatatgaagctcagatcaaataaagggtagtttactgaaaacaacataggaagattatttgaatactcttctccctcctagcctgacatttctttttctccaccccaaatccatgagaagacagtgtctgggataatgggaaaattattatacactctcataatcactgggggataacattccgaaaagtagaaacctaaaatagaaaactacaggggcttcatattactctctcattctttactatatttattgaaatgagatagttgttattagccaacaagggaactgacctttatcatcagctaacgagagatcaacactctcctgcaatgtgaaaaatcacagaaggacaaattaatcagattaggcaaaagggaagggcagagattggaaaaaaaaatacttcacagaggcagaaaagaaaatataaagtggagttaaggaatattgctttcgtgatgacaatgagatttttaattttcttacctaactctgatacagtattcagtcttttcaactactatctaggaagtaggattgacagataatatgtaggacactcagttaactttgaattttaaataaactacaaatacttttttaaaaatataaaattcaaatttatcggagagcctcgtattttcacttctcaagtccagcaaagctgctggagacaagttgtgttttttttttgtttgtttgtttgtttgtttgtttgtttttgagatggagtcttgctctgtcgccaggctggagagcagtggtgcgacttaggcccactgagacctctgcctcccgcctcccgggttcaaacgtttctcctgcctcagcctccacagtagctgggactacaggcgcccgccaccacgcccagataatttttgcatttgtacagaggaggtttcaccatgttggccaggatggtctctatctctggacctcgtgatccgtccacctcggcctcccaagtgctgggattacaggcgtgagccgttttttaagagactaactgctagaaatgttttcctgtccaacaccacagccacaggaaaaatgcccatagaggatccatttctaaggatgctaagtaggttcatttctaaggactaacttgcctctttttgagatatgttatgtgaaaaggttgactaatagcaacacattttcgcacttggaaaatgacacattttcactcttgttgagacagttctagatacaccaagtaccctgttagttatataaggaatcctactttaatgcaactttttatttctttagagctgaaaccactagtagtaggttaaagactaattaatagtatcaccctgtagtaggttaaagagtaattaaccctatagacagtaagggagaatgagcaggatacactgagaggtggatcaaacaagtggctttagatatatatgcccagagctccagaggagagtgggatagttcagtgacttcagttctgtcctggataagcgttcaatcacaattcacctttcatatatgcatagtattatatttacatagtcaaaccacactcagatacaacttgggggattgaagatatgagttaaatgagttatgaaagttcagttaaactgggcattgcatagcccacatataatctcaaagcatataggcaaactgtttctctcatacacatacacacacacgaagatggacatttctattggatacctttttaaataagaaaatgtataaataataagatataataatggaaatatgtaaattcatagtataagacagagaaaatggaatatactcaatttgtgccttaagtttgtatataataatcttcatgtatgggaaaaatacttagttaacatttttctttagtatttaactcaggtactcagcaaatgattattgattgaatgaatagatagattttctaccttcaatgagttcagagtccggtagagatgacggatatagaaagttatacaaatagtacaatattacatggtgccatgacagagattgttatctcacatgttaatatgggagatgttagaagatgcagataatccacctatttgaggagccaggaagacatcctgagaaggttaaactttgacttaagtggatttttccaagaaaaactaggtgaagagatggggaggatgtagagagagagtttataggcacaggctggatgtgagaagaaatcctctgaatactgggagcttcaatgaagtaaataagaatttctgagttgtaaattttaacgtggagtggacaaaaatagaagctgaaaagtttcagggcctcattttacaacagattaaagagcttggactttattctataaacctctaggaaccattgacagattgtaagcagggactaaaaaggtcagatatgcactctaggcggaacattttggcaatatatttatacacatgtattctttagataggataaaaaatatattaatgtcagtgtatttaattttgaaactactttcgtttgtaaaaggtcatcttaagcaggaagagatagtgttcttttaaagtacagcttttggcaattatatggagaatggttcagagaggggcaaaattggcgaagggaccaattaggtaactattacagtaatcctaggataaatgataaggacggagatgttattggtaaaagtagttggataagagggtttggggagtgaggagttcaggtcgaaggaatattgcagatgtaaaattaataggacttggtgattggttagactcaggaatgagaaatgcagaaatgcctggcagcaagttggagaggtgggtgtgaaaatttgagaagtctaaattggaacaaatgaactaagattcatcaactcagaggtgaaatcttgagagtttatgagatcttcttgaagagcgtgattaagagtggagacctagcaagaaaatgaaagtctaaagaatgtcaaaatcgaaggttcagattggagaggaagaggaggaagtattgatcagagaggatagaggggaaacagggcagcgtgaatcatgaaaaagaagagtgaggctgggcacaggggctcatgcctttaagcccaacactttgggaggccaaggtgggcggatcacctgaggtcaggagttcaaaaccagcctggccaacatggtgaaacccagtctctactaaaaatacaaaaacttagccaggcatggtggcaacacacctgtagtcccagttacttgggaggctgaggcacaagaatcgcttgaatccaggaggcggaggttgcagcgagccaagatcgcaccactgcactccagcctgggagacagaatgagactccatctcaaaaaaaaaaaaaaggcatagagaaaatagagatgagaataatagtggaaaatataaaatatagcacagaagttcagaagattcatccaaatagttttcacaatgtctttataatacatagctcaacatagtttcattgaatttgcttgtttgtgtttgcagaacagatttaaattggaaaggtgattactacagacccgtcatgatatttgataaagattttttgctccatttaatgtacagtctagcaaaacttcctaatgaaatgattagaatttaaaagacacctgctttaaaacatttttcatactgcatatatttgtaggatagttcattcaagttccttgctctatcaggaaattaattacagtttagaagaactaaatatatactatagctccatctgaattcctcaagagagaaattatattctatcaagcataaaatacatatctaaatattatctgtttacacatacttacatgataaactctaagagccttttcagaggcattatgggatgtttattaagcacaataaaacattctgcattcctccaaaagaagatacctctttctgattcctgactttaacaactgcattatggaggctgcacattgaaggaccgataagtgagaagaagggaaattaattggaaataagctgaggaaaaatcaggaaagctggatatgaggaagggccaggaaaaccaatggactagtgccacaatgatcatagggttggaagtagtgagatgaagagagaagatggaactcaatgtttttctttagacacataaactccttggtcatttgtgcccccagaaacttcttgctggacatcttgttccttcgggctgtgtttaccattatgccgcatgggcctatgaacctctaccttgagccagttttctttacctcttgtagtttctctatcatttactgtcacctcatcaccccaaaatcttttctctgagaatctgtagattcttgttatttatctctacatagaaatttagaattccttgttaaaacactcttcttatcttgcagagataacaatcgtggggaagaacaagacatctcatgtcctcatcctggccacaaaaaaaagcccatccaaaagttttaaaagatggaatagtgtcttctcccatacatattagataagacaccctaaatatttttattttgggcatagatgatataattcccattattgcatattttaattttttaacaaaaccatgattttgattctttgcattttgtatttttcacaacctgactattctgtttaatataaggaaaagctgagagagaagtgattgagcttgtctggtgtcacaggcctgatgctcaggctcctgtgttcctcagcagctgctcttaacaactatactccaaggatacaattgttccggctgcgccacctgggacacgagtcagcagcactggccttctttcccagcaagaaatcagccagtgtggctgctcactgtcatcttagggctggacttggatccccagggtttgcatttggtgaatcatgccactaaatgcctattacttcttaaaaatcagaattctctccccaatgataatacttggtataatatttggtggtcttttctaatagttaccttccaaatgagaaaaaaaagccaaagtaattttttttaagtttgattcatcttgcctgtgtttgttagggtggagttgagtccaaatgtgagaaaatgtatcacatattggcatatgggaagtaattcaggcattcttgatgtagtagagaaattttagtactaataatctcatttattttcttcaatatttcttgaaaagtgcttattgactgtgggccatatgaaaacctaaactttcagactttatacttccaaattataatattatttcaagtggtggaaaaaaagtttatttaaaccagatgagcatcagcatttgatgacttatggacaaaatgatgtaactctgtagccaaatctgcttaagtctgaaatctagttctaccacttagtagctgcaccatcttgggcaagttacttaaccttttccaggtcccactttttaccctctgtaaaatagggctgataatattaccaactcacaaaatagttataaggattaagtgggttgagagtttcaaaaaccccatgcttacaagaaactctatacaaatatgccaaatcaaataaaaatagctgggcatggtggtgtatacctatagtcctacctactcaggatgctgaagcaggaggatcgcttgagcccaggaatttgagaccagcctggacagcatagcgagaaccagtccctaaaataataaatacataaataaataaaataggtcatagtctgttattgttaacctcaaattcaaattgaactaatatctgagtgttccccaattctccttctcagggtagagtttattgttctctcctttgtgtttcatccacgcctcttttctacctcctttctggttgctgtctcacagtgaatggcttaatgtgtatatatgattgattctcgaagtgtgctataaaatctttgagagcacaaggtatgttgtgatcacattttatctccaagaagtggaagcatcctggtaaaatgtgggtcaataaagttttatattgattagaaaaaaaaactccctcatttctaaattattatttatattacattactggtttattcctcaagtatttcacaaaatattttttcctccatcttgaggttttcttgttcttatttcttcttatatactcatttctcaggccttattgaatacctctctaaaaataaagctttgtaactcattttatttccattcaactttatttattacttctctttaactccatacttcatgaatctgggcaatattggaagtcaggaaattgaaggaaggaaagagtgcataggtttattattttcccagttagagggaaagccatgttttcaaactttggatccagcattctctcatcaatccttctttcttccattctcttctgaaatccctactggaagtagccacttgagaactatttctacagaactctaagctaggaaaggcactagcagtaagctcaaaaatgataaaattttaagtataatatacattaggtttgaacaaggaaagcctccttgttttacctgtggtaagtgtagtatccaggagtttcaggtgggtaaagtcagacccagaaggagcaggagaggaggtggagtcaatctcccaccaaaaatatagaattctgaacaatgcattatcagggcatgtttttcatgaatctgatcattccaaggtagaaaggaaattgctattgcagaggaaacacttgaagcattagaggtgagtgattgcttttattacattgggctgaattatttcaacacctttaatttaacttcaaaaactgatttatttatttatttattttttttacaaactcaacccttgtgctacttccatttcttaatgctgaatggtaacaaagtgattatttaaagacaaagaccgaaatgtgaataaaaatccctttaaaaaccccacagtttccactaagtttccatagaaacacagaaaaccatgaccctaagactcagccatcttttcttttctattggatcatttattgtgaacttgtgtgttcccaaacacactttaacacactcagaagaggctattcacttaatagcaccttttatttccaaaaatgagaggacagatttaatactgtagttaaaaccataactataatctggaagacatgtagcagcagttttcccagaacaagtctttatttgacacatgtggggatgcagttgtgaattttatgtcttgatgttctttgtggggtttttttttttaaccactcataataaagttaagcccaacatggctgtgtacaaaatgttaacaataacccaaaatcttttcaatgtttgtaagcaaatcaaaattaatatgggaaggaaaggaatcaaattgaaactgatttcttaatgccctgatactccttaattctgattatcctttatagacaggatggctgattatttcatgtgcttgttgaaaacctgttagttcagagctatgttgtgtaaaatgcaaattaaaacataagatatctgcttataacatatattttaagaaagaggctgggcgcagtggctcatgcttgtaatcctagcactttgggaggccaaggtgagtggattacctgaggtcaggacttcgagatcagcctgggcaacatggtgaaaccacgtctcttctaaaaatacaaaaattagctgggcatgttggtgcatgcctgtaatctcagctactcaggatgctgaggcaggagaatcatgtgaacacctgggaggcggaggttgcagtgagccaagatagcaccactgcactccaacctgggcgacacagtgagacttcacctcagaaaaaataaaaaaataaaaaaaaagagaaagaaagaaagaaaatattggatgtatgaaaaatcacattttgaatacttggttaagatttccaaacctgagcacttagttgaaatttgagatttcaagataaagagattgttccttattagtaaattatgtttccaacatatatttaagtatttagatatttccattacataaggctattgagaaaaatctcaaagtggcaaaataactcaacacacaaacaaataattattatatccataaagtgcttatatctgtgaaaaaattatgttcctatatggttcatgtaacagttgtctgtctcaaatagcatcaatagtgtgctgaagtctaataatttactccattttcagggctatatcatctagcatccagtggtaatttctattttgcaaaaattaattaaatggacattaaatgtaatggcatttcaactttgaatcatgttaaaatatttccattaatggaatttgtgaattaaattggaattagatcaatcagtagctataaggtatttttgaaaaacattacaactgatttaaggctagaactatttactaaatagattataagccatatagaatattttctctactatatgtgagactacagcatctagattacaactacatagatattgctttttaggcactatacatgtatactacttattatatgtgctatctagattaccaaaaaaaccctattattacattcctattatgtgttacacatggtgctatagttatacaaaacagtggattcctaaagaaacttctagaaaactgaaagtaaataatattttttaaagggtaataggaatagagcttagactctactatttgttaatattactctaaaggctttctccatgtaagcaatagccctgtctcatagattgttttacccgctgtacagggcaggaaactgaggaagagagaggatacattaattcaatagcattaaatagttattaagtgccaagcccaaatcttaaactcgaattttctgacctcaaatctaatacagatgatagtatcaacagcatactgtacaattgatcaatgaaaagaaaaattattgtggtcgccaactgttaggaaagactaaattgaatatatttgacatgaaatgaggtttgaagaatagctaggctctctgaagcaagggaaggaggatatcttgggtaagaagtatagcataagcaaaggcaagaaaatgtctaaccatgaaatgatggataagactttttggttatcatgcagttttcccaaacagaggaggttgagaaaatgtacatttcaatcagtttgtagagagccccaagcaccagactaaaactgtaatgaatctgatgtatgcatatcgtgtggcagataagcacagcaagcgatagggaacaaagtgcagggtatgttttgattacatgttgtgaaaataaagaatgtttagcaggtgggaactctagcagaggagaaaaagtggtgtttcaggccacagtgaacattgtgtgcatttctgggtgattttccattcaaagtgttagtcaaagcagtagataattatgttatttaaatattcgagtaatacggttctgtaaaggggctttgggcaaacatattttagtttcaccattaaactaattcactttttctagaatctatgacctaccatcagcaacaaagcatttctgaggccttctgggcagatgtaatagactagagatcattgaagacaaattcctcgcagagaaagatttgtgaaatcctgcagcgaaccaaggaaactgtactcccaaactctctcccctgcagagaaggctttatcattgactgtctcttagcacttcaaaaaaactttgaatttgtgaataataacactgttaccttatatataaatccaaacagaaacttatgaaaatattgatggtggtcccatactatgaatggaggctctattcttactaatagacatttttgttcataaatataacttttttctctgcatatacaagtgaaatatgtagttgcaagtgaagataaattttaaaaattattatattcatttgcagaacacacatcctgcctccaagttgtgctagattacagggatataaatttaaataagacatagtcccttcctaaagaatgctcagcaatgcaaagaatgaatgaatgatttgttcagctcctctcttactttcagaaaatatttgaattctaactctttataagaatatgttaaagttgccataaatcactcctaggtcaagttaatttcaaataatccctcccgtgattactccaggccaaaatttttagcagactctcatgttttaggtaaagatgaagagattatgtaacttattattatcattattgttacaacttgcctttatgcttaacctcatgtgactctgaagcagaaatggaaatgatgccattcatatattatcttagagttaataaatgttttggtgttagtgtagggtagacggttatcagaatcctctaacatttaattctgtgacacactgtatcttcttatgtgtttctgttcataaggtgacacctcaaatgatgtcatatgaacatgctcaaaaactatttacatatatatacattttaggaaaattccaatcataaatattgcatttcatggtctgacaatttttatttttgtctttagaaatgcatttggagagtatgattataaatattaagagaaaaagtattacagagacctccaaagactcctcttcggagatttctaagcccctttgatcagcatttatgtgatgaaatccaacaaaaatccttactactgaatgttcccttgttccactttaaagaagaagcagctatttaaaaactagttttatacagttttccaggactccttcttatcctcttttgatgtggaactttgtgtcctgtgattttaatgtacacttgaacgacccatgaaacatgagatggatgaattaaagcaacagtgtaaaagtagattctactttaaggcactttctctttgttgctttttcctcaaagtacccttagcaaggagtattaagatttgagcactcgaaattcatggatgtttctacaggcatacagaaattctttctaaatggataagcctaatgttccttttgaggatgctgttggtgtgaatagttattttcctccagaaagtatgatctattgttatttgtaaaatgtagataggtatcaaagcaaatgtccctcatttggaacatattgtggtccacatcttcaacaaaattaaattgtttacagtattttaatgtatcaactgaatatatatcttcctattaagaaaatggtttgtcagatgtcataaaacattttttaacagtaaaggtcacattttattgcaaaaacctgtcagtgctttatgtccgagctgggaaatgttattgcttcagggtgataacgtgggagggggctgtggttaagaatgcttttctgagaccagctatgatttacagcagtgaatggagaattaaacccttaattgaagcctacagagcagtacctagaggctagattcagactgaaatttgattcagacaattttcttagtcaagcccctatgggcttaccagttgattctcatgagttttgattgtgattgaaaagacaagctgttttctgctttgccctgaacttccctaaggtaaatcaccagttttagtaagcttcttgattaacgtggagggagagttatcagggagagaggaatagaggcggagggaaacagaaagagagagagattgagagcacaggagtttaacactttcctgaattcccaaaaagaaagtatctgtctgtgtcagatatctctaaaggagactctcatttaaactgataaacgcccttcctgaagttatgatggaactatggctgtggcctcatgtacgtgaccctgtgcttctttaaaagagtggtgtgggtcattggttataagcaccttatatgaagttgagccacatcaggtatcacattagatgtgacagaaatgtcagtccagaggtcataggatcttgaatcaaattctccattcctttctatttataagtaatactcttgtttgttccctcaaattttctctatcatatatttatttggcatgtcttacagtttaataaattacttactctattaatacaccctattctgcctttgtctcatgtattagtttgttgattactatggttaacatatcctatgagatttgcctatatttcttaagcctatacctttcctattatctatgctcaatacaattttcaaccacccttttgtgttttttatctatagcagaactgactattttcaaataatgcagcagatccacattaagtgttgaataagatatgcaaggtaatgtgctggctgttaatgaagattgaaagataaaatataatctccaatttaagcttttggaatggtgaaagagctatgttatttacctaaaggtataatcgcagggagctagaagtttttgtggaatggacaccgacaagacaagaattgtgatttagaaaaatgaatctgaaagtagtgtataacacagtatgtgggaggaaagattagatgaagaaggtcatttccatggtctaggaaagtaataatatcctaaaccactgtagtggttatgggacaggtgagagagggtcagatacaaatcatattttggaagtagaattaacattgtttggtaacttactgaatatatagatagttcaggagcagggaagaggaaaccctaaggccttgagctggggtgagtaggagatgactggctatcaacaaataaaaagaggaatgtaagaggcagagccagtagaggcaaaagggtggttttccagctggaaacatattgaatgtgatattcccacaggagttctacagagaagtataaggcaaacagaaaatggctcatagaaggcatggccagaaatgaagattcaggaatcatctccataaaagagactattcagccaaaatatttgtttctatcttccagaagaagaaaatggacataatgtggggaaaatgatggaaccttgagaattagcatcatcttggggtcagtggaaatgaggaagttagtggagagaagccagaagaggcagaggattggcagaagtagatggaaaccccaaagcaaggagctaggcaaagcctactgggaaaggcagaattggaggacccaggaaaggtaataaaacttgccagtattaatttcctgagggctttggggagagagacttcagcgaattggtagggcaacaaattgcatttcaaggtatttatgagtgaggggtgataaattacaagcagtgaagagaaatctccctggttgaaagtttgcgagtaaaggaaaggtacaggagagtggcaagaatgaagaaaagagatggtatattagtccattctcgcactgctgtaaagaaatacctgagactggaaaattaaaaataaaagagatttaattggctcacgattccttccacaagctgtacaggaagcatggcagcatctgcttgacttctggggaggcttcaggaaattttcaatcatggcccaaagtgaaggggaagccagcagtgcacgtggctggagcaggaggaagagagagaggaaggaggtggcacacactcttaaacaaccagatctcatgagaactctatcaggagaaaagcaccaaatgggaaaatctgcccatgacccaatcacctcccaccaggcctcatctccaacaatggggattacaattgaacatgagatttgggtggggacacatttccaaaccataacatttgggttactttgtttataacaaatttgctccagaatgatttacataaaaacagactgctgtggtcagagatgaatatgagtatggaagggtaaggcacaatcccaaataaagaagcagctacttttcatataggcaagtaaatttggtagtaggatgtgaagaaaatattagaaatttagttattgaagtatctggttttgaactaataaatgtgaacaattaatgatgtaattttatattttgttgaaggacctttactgtatgaaaggtagtattaggtctttagaaaaattattttgttattccacattttacatttggtctctatagtttttaagacttgttaccaggagtatacctttattcaaacagaacatgtacattttacataatcattgtaaagaggagattatacctcatattccaaagacctaggctgatgctctttaatactcaatactttatatatagaaatatagtcctactaatgtttattttatggaaaaatgatagtgtattagactaataatagaaatagtaaattaattgtaattagtgcagagagtgaagatgtctctcatttacagatgaattcctatggaaataatgacactttctgactgtgattaacattatccttatctgcattgctgaataacattgcagagaatttcacaggatgcaagagcaaaataactttaccctaacttttcttcctgaaggaaataattacaggcatagagattttgtttggtttttaaagatttgttttgactacaattattttggcagatgcatcaaacttctattcaattatattcaatacatattcatttaatacatacccactatgccagacctcataggatcatatattccagtgaggtagattacaaaagagaataataaacacttggagcgcatagtgtaatcatttaagtcaggggtgttcaatcttttggcttccctgggccacactgaaagaattgtcttgggccacatacaaaatacactaacactaataatgcctgatgagctaaacaaaaaaaatcacaaaaatctcataattttgtaagaaagtttatgaaattgtattgggctgcattcaaatctctcctgggccacatgtgccctgtgggccgggggttggacaaacttggtctaagatttgaggggttagggagcatgtgtttggtgtctggtttggcaattgactagacttagtccttgagaaaataagttttaagagagcatagctcattcaaaaccctgagtgtaaattaaggagttgagatatatgaaattgttagcagggtatggaatttacccaaagggcaataaggaatccctggagcattatgagcaaaggtaagaaaaacttacctagtactaccttaggtgacatgatcaaaagcttttcaagatcatctgatcagtaggggaataaagtggatgagacaagcctgaattcaggaagcttcattaggcaaccgctgaactaacataggcattagcttaggtagtgctgatctgtgcagttacagatcagagtagatctgcagcatacttagggtgtggagtttgtgttgtcagtacttattcgggcatggggaatgagagagggagaggaaagaatcaaagatgtccagatatctggttgggtgattgagcagactatggtgcttttctttgaacttggaatcacaggaagaagatctagtttaaggctgaagttagtaatctccattttgggcatactggatttaaacagtctcttgagccatcctcatggaggcattctgtgggcctgaggttttggagagagaaggggagcagctatgtacccagtgatcatagccctggtggaagtggttattctctgatcatgtagagaaagaagagaagggagcctagaacagagttgcctaactttatgtgtgaggaaccagagagaaaatattttagggtttacaggtcgtacagtctctgtcacaaatactcaactttgcctctgttgggacactaaagcagccacagataacacacaagggaatgagtgtgactgtgatatgttcaaatgtacttataaatgaggatatttaaatttcatgtaatttccacatattactatatattattcttcctttgatttctaatttttttcaacatttccaactgtacaggtctattcttagctgatgggctagataaaaagcagtagatcagatatggcacaaatgtcacaatttgctgaccactggcctatgacatcaccctctggttatgagaatccaaagaggaaatgacaagcattggttcagaaaggtaggagagaaatccagaacagaactaaaaaatatatatggcatataattttgagttaattagccctgacttttgtagtagctgcctaccaaccagttaaaatttgcaacaatgattgaggtttaggatgtttttagaaagtatatttcatttacgaatataaaagtaatacaggtacttgaagaaaagaagtcatcccttcccatcctctatttcccctcctacccaccattcccaacccccacaacatgagttcagatggcaaaaacctgagttatcttcttggagctctcttaatatccagttcattaacttcgcctttctcaatttacttttctgtaaaataaagataatttggtgaatgaaagaggatgcatgacaagacatgagtgtatgtgctaaggcatgagttgagagtttggggaagattagagcagatatcatatatgaaagcatctggtacaatgtatgtaatatatttaaatgctgttcaagcattttctttcctttccaaactacatgcaatatgatgtcctgtgtgaattctaatccttcataaggaaatgattagtttgcctggtttcagataagaatagatggaagtggtttaatcaatatcaatatcaatatcaatatcagtatctgttgataaagggattaaatgttcccttttataatgtgagcacctgtgcatgagctgtaaaagacagttgaatgcaatggcttcttaacagttgcaaatttcctgtttgggaatactgttggcaattatagaattgagtccaggtgctggttggatttgtgcatttgtgcacatcagatatcattaatgtaagaaaaagtgtgaagcagttggagagaaggaaagacatgatttgtgttagaacccaagtttgccatttactggacaaagacaagcaaccttaggacaagttatttaacctcctcactaagcctcagtttcattatctataaaatgtggataaactgcctctttgtgggttatggtgtgacttaaatgagaggatataagatatccagcagactggctgacgtgcagtaggtgcccaataaatattagttcctcccttttccttctctcttataagaaaatcaattttgccctttatttctacttgctctggaccgtttgccttaaagaacaaacctaaatgaaaaagaagagttttattgatgtgtttgcaaacgggttgttgggaatgtggaatgtgttacatttaaagtaaataaattccattgtgatatgagcctcgtacaaggctaagaagaggtctataatttgtttcatttaaaacattaaattatgatggctcacttaataactccagactactaggctaaactacgtttgtgttcagcaaacagtcataaaaatccttgttagacatttaattactgcacaaattgttttataaagctctgtaaagcaaacatgttgattagcaaaaaatgtagtcatgattgcaaaaatactaatcttttaaaatatataaatttaactataagcaagtattttatcatatagaattatttacctcttacaggcttgttatccttttgtaaccctactccttgttaaagaaaaaagttcgcatgcaaaaccttttcgcatgtacaaattgagatttattgtgtccttatgaaaacatgctttgtcgtatttaatggagacatatattaacgtttatgaacatgaatttgcaaaatcagatttgtaaagacaagccacagtcaatccttgagtaaaagattaagtgaatgaatgtcagtttcagtaagtggcaatgattactatggttcagaggtgggggagatgaagttgttgttggtcaggtctctttggacaaaccaattctgaagtcatcattcaaaggtcttcctgtataaggcagaggaactgtcttcccaagagtattaatgtgattttcatcacattaattatcagtgatttatttatgaagatcctagttctaaactaatattaggagagctaccctatgacttgagctctaccagagggaagaatttatagtggtaaaattctcttcaaacttctttgacttaatattcttttaaattacagcacattttggctagattagatagagttataactggtagccatatttcagtcatactcctgtgtgcatacaaacacaaatttcacttaagtgaaccacattaagcactgtcttaagatactgacctaataattaaaaatacagagaagggagaagggtggagggagaaaagatgggaaggagagacagagagagggagagcgacatagagagagagacagagagagatggaaccattttctcaacatattcattcaacaaacatttcttcagctacattctattattcatgcattgcaaggatgaattagaacttctacacataaacttacagttttgatgaaataacaatttaaataaattattatcacagaaaaatattaccattagccgaccactaactcaatttggaaaaggaaagacaggcttttagaaagagatgaaatcattcaatgtattttattacttctgagggcctaacacagtaatggaaacagctctgttctgggctgtgttataacagagaatagtggagtgtgatccttgtccttcaggatattgcaaataaaacatattgagaaacctgttcactgatggcaaagaagggagttaaattaaggaaaattgtgaaaaaaaatatcatcaatacaagggaatggacaagacaatgttggaaaatacagatgaggagctgacccctacgcagcctatcactatctatataacccagtggaaatttatggaatcctggcctataacaaagattctatttaaagctgatagaagaagcttctctttcaagttctcctgctgtattccagattcaataatcctcctatttgttactttatgctggcaaaattactgaccactaatggaacattaaatcctccttagtccataaaattcacaattagacaaaatatatgaagtaaatgtaaaagcacctatggtattttcagtgtaagtggcagttaactccattttgaaatgagttatatcttaaagtaaaaccagattttactgcatttcataaaataacacttacatggggaccaaattttggagattctgttttattaattctagggaaaggactagaagcagaatgtttaaaaatcttcccacgagaagctactggtcaagagtgggaacaattatcctgaagggtctttaaggaaccagctcctagactgctaggaagattgtttccatgtccatgtatttcatgtctttcctcttccttgtaggaggtaccatattaggagcaaagattatgctaatacctatcaaagtgtacatttatttccaaatagtttaattatttttctgtttttagaactagtgggaaaataacatatggctcacttgatctgtgttatgtttaaagtagccacagcaacatttttgctctatatgctcataagaggtgctatggtctgtagattttcacttgtgaatcagtttggatgccaatattgtacaggaggaaaaaagttataagtcagagataccctgttcttttcatatttgggattatttcagtctaaataatgtaaatgcaggccaaaaaagagcaaaggaaatgatactcaaatctcaataagaaaaaactgtgctttacagtgtgttagtgcttttgtgaaattatggacagtgaataagggatgacttccactttgggttttcagatttgaattgaatcacagcatattttttagtccacactttactctttttttcaaagaacatgctgctctcaaagacagataagtacatgaaatagaaaaaattttggatttggataatttagtttctgattaaatcctagcctgtacaacatggaatatattacattttttaaactttttttttatctgtctatgctcatggtaggcagaataaatgcccctcaaagatatctgggtcctagggtcagaaaactataaatatattaccttacataggaagaaggactttgcagatattattaagttaaggattttgagatagagagacttatcctggattatctgggtgtgttcaatataataaaaaatgtcctttaaagtgtaagtgaaaggtagaagaagagaaccagatttgatgtcagaagcagagtttggaatgatgagatgtgagaaggaatcaacccaccattgctggctttgaagacaggagagatctatgagccaagagatgtgagaagcctttagaagctaggaaagacaagaaaatgcattgtcctctagagcttccagaagggaccataaccctgcagacagcttgattttagctaagtgaaacccatggtaccaaagtagttcagaagtttgtgttgttttaaaccactgatttgtggtactttgttaacagcagaaatagggaacaaatacaaattttagtacctcgaagtggtataccactgtaacaaagcactgagaaatgtggaagtagatttgaaattgggcaaaaaacagaggctggaaaacttttgaagagcatgataaaaaatactagattgtgctgaacagactattagtagaaatacggaagtcaatggctctgatagtgagaactcagaggagatgaagagtgtggtagggaaaacataccacattagagaatacctaagtccttgtaagtagactgttagaagaaatgcacacattaaagatgttgctaatgaagaatcataaggaattaagaacatgttatttgagagggggagagagtacccttgttatgtaatggcagaaacttagaggaattgtgtgctgcaattatgaggagagcagaacttataagcgatgaacttggatatgtacatggggagatttctatgtaaactgttgaatgtgtggcctggtttcctatgtgctgcttatagcaaaatgtgagaggagagacatagagtaagcaaagaactgttaaacaaaaaactggacttaatgattttactaattcttggcttactttaatggcacataatgcaaaagttgagattcactggaaggaaagcatggtctagagaaaaaccacagtgcatctggacagtctttcactggtatatcagaaatatcaaaaggtcagaatactcagtcatacaaaaagtttctttgaagagatttagaaattgcataggactggtgattctttttttccctttcatttcacactttttggaaccagaatatctataattgttatcctgtgtctgtaccaccattatactttgggagcaaattgttttttgagggatttcatgaacccacagatggagagaaatttgatccaggatgagtcataccgagactctcacttgtactaatttagatgatttcaatgagacttttcaatgatttcaaagggatctgggacttttgagttgatgagatttaaataagtttttggattttgagtcgatgctgtaataggttaaaaatttggaaaattttggaatggggtgaaggtgtttttcatttgtggcaaatgtaaacagtttgaggccaaacgagtaacatgtagtaggcagaataatgccctccctgctgccacaaagatctccacatcctaattcttggaaactttaaatattttgctacatgacaaaggggaattaaggtggaagatggaattatgtttgctaattagctgatcttaaaataaagaaatttcctgaattgtcagggtaagcccaaaataattacaaatgtccttaaaagtgaagataggggcagaacaagagagtcagagggagatgtggcaatctatgaaaaagatcagaatgaggccaagcaggaaggcatcaattagccattcctggatttgaagagagagaaagtgggccaggaacaaaggaaaggggggatcttctaaaactgaaaaaggcaaagaaacatattgttccttagagcctttagaaaggaacactgttgataccttaatctgagccctctgagatccatgtcagatttctgaaatgtaagataataattttgtgttttaagtcactaagtctgtagtaatttgatacagcagtggtaagaaactaattcgataccattatacaatgaccggcttaaagggatagttatataatgaaagtcaaatttgtaatgaaactctaccacagacatggctttcaacaaacatcctattgtttagatatttcaggattactctttctgctgctagtgccgtgacatgaattattattttgtttaatttttcactctcctctatattaagacaaagcccaaaactctgctattgcttctgtcattgttacatggaggtacatggagatagatatgtatatatgcatattacaataactgaacaataaagcaatgatgcccttatgccaacctttcttatctttcagaaatatttttaaataaatacttcttttttattttatcatctgaagtcaattcttgatctgaaaacaaaaaatgatagatacagatagttttagtgtatattcatgagtgtgtacatgtactcagtgtatgcttttttgcagatgttaaaaaatacacatgtaatttgtaatattgagtctcaactcaagaagtaagacattgcacagagtagttgcagaatatcataccatttaaggaaagacaggaagaagtgtgcattttactcatggttctcagaatcatgatattactacaatccccttttcctggcagtgctggatattaaaattagagagtcaaaacatagattcactgttatgccttccaattaaacagctaatgagctagaataatgaccctttctcctaactggttgtaagaataattagatttaaaaatatttcacacatgaatgcaaccacagtgttgccagtcagagaaagtgaagatagagcaccatacttgaattttctaactctgataaaagccattttggtggttgggtggtaaacaggagagttgcaatattaatcattgtccaatgtaactaagatcttgaaaaatagagtacagataggtgggccactaataggattatatgaatgtaaaaaataattcaaaatattacaaagagctctctgtttagaataaaattccaatgaatcaaattgttcaaaatttcagtttataataatttggatttactagacatagaaagaaaacatttttcttcaaagcattcttgtcaaaatctttcagaaacatactagaaggatattattcaataaaaatggaaaagccttgagtgcctcaaaaagcatcattgtatgtgtgaatcttattcgtaccctaaggtccatagtcatttatacggtattgatgtatatgtgtactgataccaggaaatacttatagggtggagacatgattcaaccttacatcttgtgttttattccaaatgtctttactttcgtatgacgatttctactttgtattatgatgaactgaaatccttgaaattttaacagtatttctctaattttagagtattggaatgttaatattcattttatgttatctagaaatgctggtttccttcaaagttaagtttaaaatttctaggtattaaacagtgtttaaaagagattaaaagtagcggaaatgaatttttgttgcaagctttattttattttagttcataataatttgtggaattagaaaagatctgttataacttagaagtctctggtataattatttttaaagccagtagaggcagacatgttgctgattgaatagaacttttgtttgttctttttaaaagaaattcaaagtttgatactgattgttcacatcagtttcagtgctactcattagcagtcccaaatgttaagaatttaactttctaagagtatcttcgatgcaaaagctattatataattttttgatagtccctgccttttagttttattggctttcataccacttccatctgtctagaaaacaattaagatgaggaacacgactccatcaattgcaaattcatggtgattaattactctaaattagttttatattgaaaaatggggggaaataattgtacatttaatttcatgatctgttatcatccaggaagtgaagataataataatacaaataaactctcaataaatggattttttagaggaatatctggtactgttagtgtttttaaactcagcttttttttttttttggtcaggtaatgcttccatcttttagatagagctaatactttctaatatttattgaatttgtttttaaactcagctttttttcaggtaatgcttccatcttttagatagagctaatactttccaatacttattgaacataatgactttaggtttggaaaaagactgacaaaacttgatttgaatatattgagcagttcccataattgcttaagaataaaagttcatgttgaaagtatctgggcatatgatacttctaaaccatatttgtttttgataccttgtaaatagtgtcaaggcacaaaaataatattgataaataatgtcttactctctttaaaggccctgattgtctgattttataaatcaagaaacttgttttattcattaagttccttagtttgcttcaaatttagttgtcaaaattttgttatagtaattgttatcacttagttcataaggacccaaatgctgtgtcatccctgataaatcatgctgccgaaaagcaacattaattatttctgctccatctagtagacatcaacatcaaaattttgcctcagctttcatcttatagttgaagtaagcccattcatcatctttttagaaatgaatgggattggatcatgaaatatttttgattggcaggcttcatggtagatgtgaataggcagtggtcagcaaagaccttgcagatttatttccttggtcatgctcctgcctccaataactcactacaactttgtgctgcaacttttagaggtcagagaggtgacagtatgtgagtagcagctaggctgatttctaaatcatctttttaataacccttttagtttcttgttttctaagcatgtggaagggacccagaaatataaaaacaatagcaactattttaccatgctagttggctgggggcattgaagtgtgcccaaggtcatagctggtgtataaaggagctagttaaaagtttacatgtgaaaggatagcttctggagtggacattatgcatttatgggaagagctccagcagattcttaactaacctctaatgagcaactcctgagcaatagcagcagcccactcattaaggattcctcattgacagtcactgttggagagacattcaccagggtacaagttgatcaagatagggaggaatttcataattttcaaagaaatgtcctccacaaatttattaacctaaaatttcctgtccttacactggaagaatggaatgtttttaagaggtgaaaatatcagacgaaatgaaatgagttttgtaagtttttatgttctgaagtctaccattaaatgcatatgactaaacactaaagaagatatattatcaatgccaaacttttgaattgattaaattttgattcctatcctactagtcgtttttaactgaattatgttaatgcaaaatatatcacacagggaaccctgagacattctgcatacattgaataatgtttctcatgaattagtttaatatttcatagatgtagtcttgtccatgttctttgccctgtttgctgcactaccttgtgttatattctttagtgaacattaaatggaacaaatgctttaatgtaggcataatactttattgtattccctagaaagaagtgttcactgcagttataataaattctttgtaagagcagtgtgtttcggaacagacttgaaaggtctcctatttaatgtacacattttataggtatgattgaaaccaagtgtgttgtgttcaattcctcatctgatggacttctttcattccaaaaactaaatattgtcttcacaaggtttccagatatttttgttatccgtttacccacacaagcactctgagcattgctttactctttattctgaactattcattttttccaaagtcatatctaaaaattaaagtactctgaaaagtacattgaatctgtaagaggaattaataatgataattcctggaaagaaatgaatttctttccatatctgtttcatgctgttactcccctttgatagtagccctgctttcattcacctaaatcctcttatatctcaagttctaacttcactcctgtttccttaaaagcttactctaggacagcacctccctggtcatctatgaactctaattgtcagtgcattaggacatacacggttatgctttcatgcctcatatctctcaaagagcatccaacttggtgctcaataactatttattgacaaattaattgctctattaacctattatcttattttaagctgattttacaaattggaagtggttgtacattttattttgcaattgtttactgccagagggacaatgattgtcttttcatatgtattctcttaaaacatagagactttttcgtggagtaaccacatgaattcacattttccaaacactgccattcattgcggtgtattatctagccctcaaagatatataagacaacgatgttgccatttttcctgtgttaaacaatgaaaataagccagaataatccagaaataaatccaacctataccaggtcttaaacatctttgacatacccatccacctcttatggattttcaaactttcaaagtaagagggtggatcagcagaggcagactctcctgagctgggagatatagtgtccctgacaatagattttctcctttttgaaagcctttgaggttcttgcatttaaccttttcagaggcaacacaaccctaatggagcacctttgacacccagtaactcacaaaagcatgcaggtttaaaaactctcagatctaacagtgtgggccacagcttatgatatggaatggaatctcctatcacaaagaggaagaaacaccattcatttcaaatatatgcatccaaaaccatcatttctcctttcctaatccctttgtagaaaatgtcttcttcaagcatttgaatttagatattgaatataaaatattagaaggacttttaaatgcatcctgaaattctattctagcaagagctcccgagttttcatcttctgcttacattacctttttctttaatttatctaaggaaaggtaaaatgtttccaaacacatgatataaaaaggttaatacatttttataaatgtggttaaggcattcaacactctaaataaactttattcaactatgtacttaacacataagtaaatattttgatgatttcaagaaaaaggtaaaattatcccaatacttttatttcaatccctgctagtttgtaagggatttgttcttctgaaatgctgtccatgcattatgaagagaaatgatctctaacaactaatatcagcctctctgtctcagaaataaaaataaggcagtcatgtggaaggagagaaagaagcagtcatttcttagcaaggtaagataaatgtatttcttacctacgtataatttgataatatcttttctttacccataggcagaagatgactattaaatcaaattatccctaaaaactttttaaaagatcgcctactatatttaaaaaaacaataaaaactggttcttttgcaggattaggtaagggttgcaacttcatagattccctccgtaccatctatactaagttcttccccaaaaaccattttgtcaattagtatggtcacttaaacataaactcatttttataggatgtggatataaggaacaaacaatattgacattgaactgatagacctgatttgaattctggtattattatttccttttaaatttgcatatttaagtataatttccataccaaaaaattcactcatttcagattgtcattatgacttttagtatatttacagagtggtgtaaccattcccacaatctactttcagaacatttccatcatccccaaaagaaaccttgtgcccattcacaatcacttcctattcccaccccaatcttaggcaagcaggaatctactttatgtccctgtgaatcctagtattaataacccaatttcaaaaatgtgcatattgtcattcagagaagtgaagcagtagtccaaagaataaatagctggtaattccatattttacatgtaaataatgcttatggcaaaccctataaatcatgccctactatttctcctattttacaaatgtggaacttgtggtagaaaaagatgaaataactttctcgaagttacacactcagaaaataatgagagagtgaaatttgtagatagaggattgatattcttactaattctgctgtgtgttaaaactaattagggtaggggagaggggagagaattaaaggtttgaggtatttatcttcagtttgtttatatttaaataaaaatgtgctgaacaccaagtacgtgcaaagcatgtgccaagcattggagagaaatagaaggagtaaagtgctctaaagcaggggtgtccaatcatttggcttccctgggtcatattgggagaaaaattgtcttgggccacacatagaatacattcacactaacgatagcagataagctaaaaaaattgcaaaaaaaacctcataacgttttgagaaggtttttgaatttgtttcaggccacattcaaagccatcctggcccacatgcagcccttgggtcatgggttgcacaagcttgcgctaaagtatttctcaacagagttgggaagaacagcaggatacccgctagatcagtggagtggtcgaaggtggaggcaagaacagggcagatgacctgttgaatgtgggattagtgtagaggcagtgagactcagaacccaaagaggaagttatatcatggtatataccactttaagtgcaaatcccagcaggacacatcattaacaaatcttgtcttcatcagtggggcagaacagctggcctgttggggttgctgagggtggagaaggtagttccaaatattttcaacatcttaacaaaataatggaggtattatttctatacgttaataacagtgggacgtagtagtgcagtgtgaaagcaaaagtacatattcatacctatttctgcatgtgagacaccttgtgttgtcttattggtcgatagagcaaacatcctttccttcagcaaatgtacattaaatcctgactttgaatataaagtggtcaagatgccctgtagaaagggttcaagagtaagtactggtacattcactgcaggaagttgaagagacacaagggtgtccaaggaaagctccattatttgtacaggaacgaatagctaaaaattttcagagaaggagctctttgagctgaatcttaaaggactgagaaaacaaaaatttaggcaaaaggtttaaggcgagagacacacacttaatctacgtaataacttcataatccatttcttaatttcacatttatgagataatctcctacaatctgaaaaatattatactcttgccaagtattatttttatggaaaagcattggaaaaaaatagtgtgtgagcgtactaggggtgaaacacagatagattgttaaagcacaagatcttggttgtgttcatttagttaaagccaatcaacagttttccagatcatcactgttctctattttttccccagcggcattctgtatcactagactttgatacagatgtaagcatttggaagagatatttgacaacctcaccctgacccccatcttcttgcacataagagagtttgcatttccattgccatagaacttggattttttaggtcactgagatacactctgctgatttcatggccctgatctctgatcgtttaggcacaggtactgccttcttacataaatgaaacaagaaatggttatttccattcaggctttctatatcatacctagagatagggattggggtaattaaggtgcaatgttcccagtagagaagtatatgaggcaataaatagtggttgaggttggttaaacgccaaaatgaagcggtgatgtttgataactgctaaagctatttatggtaaatatactcctaaaccatgaacattagtcccattagatgacagaatttaaaaagcaataagaaaccataaaaagtaaaacatgcaatttgctttgtttgtcagagatacgaaagtgctgagttgtctgttttttccattgagaatacatttagcatgtaatttaggtgaaaaggtaacagagtataaacaaaaatatttattgcaataaaggatattaaatataaaatagattgcctgggctgaaattatcatagttggggaagaaagatatgggagaaggaggaaggaaaatacacaaaagaaagatctacatttctctcatattaatttttattaaattaaacaacagctgattataataatctcatgcattttgcccactgaatgggccctaagactatggcaaggacaaaataacaatttgtaaatttgattctatcagagttgtctgatatttatagaaaggatgtttagggagggtttcatttatctctttgtgtttgtgtttgttttctactgtactacttccctgtccagaataaagcttatatgtctttgtattacatccagccagcctcagaggctggcccaccccttcctaatagactcctctcccttcctattatgccatccatgctctttccaaattttaatgataaaaagtcttatccataagtagtgatgggtgtgttttgtgactccccatataattaggacagaattgttttctctggcatcattagaacctagagaaattttagtttgccctttaaacttctgcacactatatcttttttccagtcctattacatataccagaggaaagagagttggtttttataatatttgcaacaaaaacagcaagtccaaatgatgttttcttgttggagataaaaccacaaaatctatttgcctttactgtgaacactttttattttttattttttctgagacagagtctcactctgtcagtcaggctggagtgcagtggcgcagtctcggctcactgcaacctccacctcctgggttcatgtgattcttgtgcctcaacctccctagtagctgggattacaggcatgcgataccacgcccagctaatttttgtatttttagtagagacagggtttcaccatgttggccaggcttgtcttgaactcctgacctcaggtgatacactcacctccgcctcccaaagtaccaggattacaggcgtgagccactgtgcccggcgtattgtgaacacttctgaaaaatagagaaatagtctaccagaagagacactcatatacaaatttttagtaaagccttgcagtattaggagccatcatttccagcaaaccacaggcaggtattgaaatgtgagatgagcagattcagtgcttcaaggacatgtggatgacattgtgagtaatatatcactaaggtcaacagttggagaatggtaacaaattttcttaggttatgaggtaatggtacaaacatgggaagttcttgaaggccctatgataaggtatataataaggtgaaggagctagaagaatgtttataaatgggttgtatgtaaggctcaaatgtctatacgggtgaattaaacaattatgcttcaattacaactcaaagggctcctgtacattctgttaattttatttcttcccattacatttttcttttctcttaatctttacctcttctctgcaaatagtcttctgaagttagtaaataatatgttggactattcaatatgccattagattaccctgttatcctcaaattacaaaattgttcaggtccctgtttaagtggtcccaccatggagggatgttttcttacctttatccaaagttttctctgtctgttcttctctatatccacactctattcctttttttcatattacgtatagctatttatgaatatgtctgtttattcctcctcctctgtttgcctctagacccttagctccataatgggagaaaaacattctgtcttgtccactattatatccctatcacttagaatggttaccgacatacgcaagcagcataatgtatatttggtgaggcaaagacggaatgaatgatgttttctctcacacagtgagcttttctctatggctcactaactctaaagacaagatttgagttacttgtaaaattcactgatgtgaaacatagtgtttcttaaaagagattatgtaaaatgttccaaattttaaagagaagttgagcttaaaattcatactataactttttgcttaagtggtttcagagaaaaaaaaatggccacaatatctgaaatttgaattagagtgaggggctgcatactaattcagttcaacttaattgaatcaattttgattcaaaatattaaataaggtgcagtctatggtatacagtagatgaataagacagagttcactcactgtaggagcttccactctactgaaggaatccaacaattacttatatagaataatgtaatacaagccgaatttgactatgtgtcatcgtaaacatgtatatagagaaatgtggtcatctggctttgggtatgagaaaaagtaactaatgagatagaccttgtggagtacgaaatgcaggaaggaaggaagaacatagcatatatgaagatgaaagagtcagagaggatcaggggtagtacgtaacataatttgcctagaatttatggcattttagggagctattgaaaaataagactagtagtggggatgggacaacatgtaggggaatcttaaattctcaatactctaaggttcctctgcagatttaaatcttgtactctatccactctaagcaatacccactattatagtttttattttgtttttcattttccttgaaggagaaatacaaattaaacatttgtgttaaaatggattttaaattaccatcctccaatatgtcatattcttgtgaaaataatattgttgtgtaataatgacttagatttcaatgttttctcccgtgttaaaagacatatttgcccttataaaaatatgcatgatggaatagaattgagagtacctagtgctccaacgattagcttaaagtgtgatcgagggtttcttccctgaactcttggccatccttcaactattagctcaaatattgtttccttgggtttcccttccctgacacacttactgtccaacagagctcccaattatgtatactcttgtccctggtcttctaggataattgcagcatttgtaattgcacttacaaattctgacttactcacttaactcttagtgtcaagagactggacccctcttgatcgatggagtatatccagcagctcacataagatgtgttgccaaagataagtcagtaattatttttggaattaattagtggccaatggtctttttgtaacaattccagaaatactacttatcataattatgaattttccatgtataaatccaactgcctttcatgcatgaaaacaatcttagaatgaggatctgcagtcctacacgttcagtgttccagcttgaactggtgaagtaaatgttgtgcttacaaatctttaattttctattacatatctatagatttatatctataatctttacatgtgtgtatatatatatatgtatataacctttgtttatccattaacataaaaatgatagaaaagttctcctttctaatgttggagtctaagagttgtattttatagctgtgaacatttgaattaatttctgctatgctcttttattcctaatgactgtctacaagaaatagctatgtgtgctctggaatgctgagccaaacaaaatgaacacatttttaaagtaaaatagctaaattgctatagtaacgttgaatttaactattttctatattattttggcccagtttagctaaataaatatcaaagtcatgcttgaaaataattccatgtattagtttctgtgttctctgctttcagagattgcaaccaacataacactttttgcactgtttctcattgagaaaaacaaaggatcttatttatttttgtttgtctttttcctgcagactagggcactttttattttgccttatgatggatctaagcaactatctaggcagttggatttaagatttaagtaagctctaaatttgattccttttgtgtattcattaacttcatgccgacaaagcagatggtcacttgtataattacttatgtgtttataaagaaaatcaattagcactacccctgtggagttcttacctttttcctctttaaattctcatcaacaaatgtattgatagagtcagcttttggcacatgcaaattcccatacttgtgtgtaagccagagatcttcacacatgttaaagaagcttgaaaacaatgaagaaaaacccaggggagaccgttagagagagggaaagacagagatgagagtggtagggaaaaacagtgagggatcagagcagcaccctgagagcgcacctggacatcagccattacacgtgagggggaggaacttttctgagtttccctaaaaggcttaaagtaaggggttgttgggtggaccacacatgacatattaagtaagatacaaaagtaatgcacacaattaactgaaactctgaggataatctgggatgcacgcagagaatcattattcatagaagttagtgactcatcaggttgtcaagagtcatggataatgaaagcaggtaccatataggttttctccctagcttttcctatacttcattctggacctaagccaacctgccctagagtttgtataaagggcccaggaggctctttcaaatgtgccatatctctagggatttgaggaaaatgtttataggggttttaaagtttgttttctaaactcgtttattatttcagttagacttaatactcaggtagacgtttttgagttttttttttaacttgccataatcatgagaagttaggattttcagaaaactggttctctgaaagacgttttgactatttttagttgtttgatttttcaaaattttctgcaaatatttttaaatgaaggaaaggattactcacataaactaaggttccaaaattccataggtccaatatttaaataccgtaagggaggcaatgagaagtttatcacaattggtggttcttttcaatgcaagaatgtaaagaacacatatactgattttcacagttctattatggttgaactgtcttccagtatgtttgtgatatactcatgattttaacaagcacttttattttcataattttaaagtcctaaatccagaaatccagcgtgcatttttgagaactatatggtggggaattccaaagtataacacggtggctcatgcctgtgatcccagcactttgggaggccgagggggatggatcacaaggtcaagagttcgagaccagcctggccaatgtggtgaaaccccctctctactaaaaatacaaaaaattagctggcatggaggtgggtgcctatagtcccagctactagggaggctgaggcaggagaattgcttgaaccaggaggcagaggttgcaatgagccaagatcgcgccactgtactccagcctgggtgacagagcgagactccatctcaaaaacaaaaaaaaaacaaaaaaacaaaaaaacacacctttaattatgcccctattagttacttttttccaccattattctccatttttaagctgattgtggtgaacatcctacaaaggtatatggatatacctttgattgtgtatttttgtactctatattcctaaaactaaaattactaggttacagagattccacatttaaaatgtactaagtcttaccaaatagctctctaaatattgtctcagtttataattccagcaacctcctacgtgaatgtcctttccccaccccctcaccaacaatgtgcctgttagaaaggcactacttggactctttggaagttactgcctcacactcctctactttactggccatactctcttcaaatgttcatatcctctttcatggtcttattcttagaagctgaacttaacgtcttctctcaatcttacatttttctgcctctttcccacccccattatgtgtttgctgatactttcttcacattatatttctcaggactgtaactttaatattaatattgctctttttcctggtgatattttcttgtcacatatttatttgtctggtagactcacacatgatggagaaaaaatatttaatatgaatgaggtagaatgtttggaggtatcctaatttcctatatataaatttagttgggaaaggagtttatggggagatggctacctcaaagcaaaaggtgaagaatctttgtggtagtatcctcaatatatattggttgtgttgggcataggtgggagttttacttcatataagctactcgttcaatagattttctgccagttgataaaaattggtatcaagtaattcagctaaatgaatcattttaaatattctctttaaggtaagttactaagagaaataaaataaccaatcattttatattggcacagagggattttttaataacaaaaattgaattgtaggatatgtgatgtcttgatatttcaccctaacacttattcagaatggcaattgtaatctattgtacaaaaatagaagaacatttattgtataatggcacctgtcaaaacaatgttttcctattgttttcagtaacttttatggcttacacacaagctagaaggtaagattgtataactagattagaattattaaggtttcaaatgataatatacttgttatagctttaagatttattttgttacttgaaactggcgagaagtgccacatttattacaattttaaaggcaattgccatataaaatatgtatattatatgcatatgactatatatgaaatttctctctgtgtgtgtatacctatgtattacatatatgcacatagaaagagaatacttaattatgtaattcaacaggaaaaaattaacaggacattgataagcataagcatgctattcaagcaactaatttgaaagcttagtgtccaaattgaaaagcagagtacctactcctcacagactatgtaagtttttacctttagagcttctgatttcctcggtcataaagcttagcattggtggccatgcgatagaagtgcttatttacttttactctgtaaagtaatttatccacaagaggaagaatccaacaatcctctatctctgtattttcatctttgtactcataaagaataaggaaaagttgccattacttatacctgatggaagatagaatgggttttagaccatcttaaatggaatcagtgtttcaataaatggctgttgcctgtgcatctgccactctttcaaatacttgctgtaaattgaatgggtaggcagagagcttcttcagagcagtggatgaaaccttttaaagacaattgggcagtcatgggaatcgtgaggcattataattaaaagaaggaagaaagactatgtcagcagaagggctaccacagacatagccaaacactgtaatacctcaaggagaacgcagtattggcacatactttcatgttaatgtaatctgataccatatagttcatatagtatttgacactcttattgccattgtcttttgtcttaactctgaatatgtccttatgtgatgtatatcaagctttcttcatacctttataaaagttgcaataaagctatattaggctgagtggatgtaagcaagatataagagtagtggaaagaaaagaaaaattcagacaaatatgatgtgtgcttttattttttaatctctgtgctagcagaaaacttcatgcattgcatataacaacatatggaaagtacaaggttttctgtgaaatgctttgttgaccatctgtcttctctggattgattgttcatgcacttagtactaacactttttgttagaaaaaaaggggcctttttttagtaatcaactttctttctggagttcttgaatatagtagcttcatacatttaatgaaaatgatctttaatcaaataacagttaaaatgcagttaaaattgtccaatgctttgagacatttagaaactattgatttaaacaaattattcccatcctaaagtatttctacattttagtagaaggggaattagtcagttaaattaaacattttatttttaaacaagtacttttcaggcctgataatttatgcttctaagtttttaataaagacatgaatcttctctttattagtccattgtaaatacactcatcttttaagtatgcaattttcattgcccaatagttattcaacttagaccataaggttctctttcattgatgtcagtgtcacattatttgccttggaaatgaagaatgttataaaagactttccacgatagcaatatttgctataaaatgcaatttttacatacactacaagtagcaatgacataagctttagactagtagcaagtgtaaataaacacttcaaatttctattctgtatctttgtgacaaaatattttacaaatggacaaaaaagcctatttgctaaatacttagggtgtttgaaattcatgtccatagtagaaagagtttcactctttcttttaagaagaatgttcagaaaataacttttgatggcagttgctgaaactgcaaaagtaggctaagtaaagatcagtccattatgtgcaagtcaaaacttatgaggggaatccctactgtgccaattattagctgtgatgttggccatgttagttaacctccaaaagctttactttttccaccagaaaagtaagtatgtacaagatggcatacctgcaatgcctagaaataaatggacatttataattccatttccaaatccctttcctcaacaaggcagaaaaaaactaaaagacaaaactttgcagatgctgcctacttttgtaagacgaatgcagaggtgcttcagcaaatctggaaaaccttagaaaatttaagcaacaacagaaaaaatggtcacttatgatatagtagaatagtggcacagtggaaagtctggattttgaccactatgttagtaatagacggtaatacgctcatacttatgcataggccttagattattcagagtagaaaaactactggaacacaaaatcccagaatttcagtagtttggcataaaaaaggtttatttatttattgtccagtcataatccagtgctggtcctggaggtctcagagttccaggagcttctattggttctacctttccctatgaccttggcattgtcctggatcctctgaagcagaccagggaagaagcaaaacagagcatctcccaggatgtgtttaagggccttttttagaggtgttatgcatcacgtccactcacaatccataggccagaagtcattcacatggccacacctaccaataggaaaagctgcgagatgcagtggagctttctgcccagaaagacataggaaatagtttgtgaacatctaaccagtctctgtcacatttctttatattttagagtttatttctgacattaaatctttaaaaaaaaaacataaaatatcccaaagtggttattttacttcaaggaattgatacaagttaaacacactaacaaaattatcaataagcaaacctataaacgactacagaccttctgaatgagctttttttctgttgaaaaacctagcatattttttttccattgaagtgtgtggactgctaccttctatagtagaattttgatttcatattatgtgactacacatgggaacaagcaaagacagtttgtttaaacagtggtaatcctaaatgtcaagcctccatgtacgtgtgtgttggctgtaccatgagcagctctaggagaccatttccatatactaccatgtaaatggcaccctcaagtatggccaggcccctgcattgtctccacaactgtgtgacctaagtacaacaatttccacgattaagatttacaccaaaaaggatccatctccatacaaagcttgatatttgaagtactgcagacagtggaaagagcctttgcctcagtgtaaaacacttggttttgaaccctactgtgccaattattagctgtgatattggccaagttagttaacctacaaaagctttactttttccaccagaaaagtgagtatgtacaagatggcatacctacaatgcctagaaataaatggacatttataattccatttccaaatccctttcctcaacaaggcagaaaaaaactaaaagacaaaactttgcagatgctgcctacttctgtaagatgaatacagaggagcgtttatatgaattttgctaggacatcaggaattctcttaagttaatagaaactgacaaccatggtatatagacaaaaagatactatattatactgatcagtctttcacttcaatggccaacacatttttagtgcctataatgtgccaggcatttctagggtacttttacacacgttctatttttgtttactcagaaaattgtatatacagaaattactactgctgtttattcctctcttaccccaaacttagtttcatttactgtggagaaagagtgttgattaccaagctgcagcctaatttgttggcctgatgcccctgacaaaaaaaagctcagtggattctgttagctgccagtgcataccacttttactggtggtgtaccatagttcttgcactataatgttttctttacagttgcagaagtcaactgtcatgctccaaatgctggaactggaatgagccagcatccagaaagtcctttcactcttctctttgtcattacttggacattcatggccacatgctatacttaatttgactgtcttatagaaactgccccccaaccctgaaaaagagtaagaaattcaatgagtgtctaacatcctaactcttcttggcagtgaacaaagagacaaggagacacaggagaaactgggttaagaagtcatttagtactttttttggtctctccttttattcatatcaattagcgctctggtttacaccttgtttgcttaagaattaatttgtgaaattcatgcaaatcattctatcattaccccaaatagtggccttctgttttatccatgtttcaccttggatattttcaaagcagaagcatattctattagcattcacataatgaatgccaacatgtgttccatacttttaatttcctgtcctcaagagtgtggactttgttgccaaagagacggaggctcaaatcccaggcttaacatttacagacaatgtggcactgggcaagttactgaacttctcggaaaacctgttaactcttttgcaaaatgagaacaattagatcatatttgcatggttctttaaaagatagagagaatgtatagcaaacaaagtatgtattacgcatgaccgattaaatatattagatattatgtcagaaattgattattataatagttgcaaaataagtaatatgtaaaattgttccttatgttgaccaaatattgagcaaacaaaatgcagaactcagttggtcgtcaattgcatacatcacctaattcctatataacaatgtctataaagtgaaagagatactctgactataagtgctaatttaagaagaaaatttacatccaaactgtcaaaaacaaataagatgtgtcatcgtaatatttgcaatcggtatgagaacgttccttgaaaagcaagcacggtgacgatgaaggaggtgaatttttttaaatgaggaaattgcgattcaaattttcacccacttttatgaactgtgataggaatagaagtgatttaaaagtagaaatctaaaagacaatcctgaagcactgtgggaatggtacaatactgggactgttctattcctgcttactcctacacagtcatttccttttttgttgttgttttttttttttttcccccttgggtaatattgtaatgtagaaaatgcgtatttgcatttacagaaggtcagtattcatgaaaattaaaatgcatagtcttatatgcatattttcaaaaaggaagttacatttaaaaagaacttgtttagttttctcttactttttatatgacaatgcatatagagatggagaaactaacaggctgtctatacaaaattgggctccatccagctactctcaggtatttttatatttagcaaggtatggatattagcatgtatctgtatgcccaagaaagaagtaaaatgggtcaaggctaaaaggtattttatcctctgtaactttccttttttgttaaccgttaattttcatgttaattgcgtgtttctgtatcagagtgcttctgtatcagaatgccccttgatgtatttttgacaatttaggataaagaaggaaatagtcataaagagaaaagaatagaattgatgaatatccttggggcttttcgattgtgtaatccacaaaaaaaaatttgctttttaaaaaagtactctgtcaaagctgagtttatgttacataaaatagttgaaagtgccagcaggtatgtgtttatagtgtcttagtacagataagtgttttatcattctcagacctttttcagatgcctactgtgcgctcatctttctgctctgcaggaggagcatgcaaagatcagctcaacctctgaaacagatcactgtactgatttatatcggtggattggttgccaaaacaagcaggagctagccagtttacttttggactatactgcataggtcaactcacatttggtatgtgactaatcatatcacctaattccctaatcagtgattcagaattagaaattccaagtagaaattcacccacggatagaagaatctaattcctttttcctttaatgcacaaataaagcaaggggttgttgtgtcttgtagtaccagcaaaaaaggattactcatttgtcaagttctagacaatggacccaagtatacatttgtgataagaattaagtctaaagtttttttctctaatagcaaaaataattgtgatagacataaataaaatatgttattgaagatatatgttattgaagattaaaagtatagttcagataattgtacatgtttgaggttgtattttagggctactagtgaggtagttaattcacaaattgtccaggctatggaaaagtttgtaattattaatttattcaaaatatgtctcacctattgtattctatggccttttggtctaaatcacatctgtttcttttctatatggttgaagggtaaaatatgaccctagaaaattactcactctgttcagtcgaatgtcaatattgttgagaatttgaaagaatgaaaaagctaattatttgaataaaactatctcagctagtggacaactgtgcacctgtaagacattgagctgttgaaaaacggactgacagctgattttcacagcacaggaaaaataaagttgatcaatgaaacagttaataattttttgttgacatcataccaaatacactgatgatatatactttccctcccacttacctggtgtctactaactgttcagctgacatccaaaatataaacactatttttttctcttctaaattctttagacctatcctactatcctaaaaaaaagggatgctttattgctgctttctgtgtaaaatgaaatgtcacctttgaatagaggttcaacttgtcatttagttataaaaggtaaccagtgacaatctagtcattgctatcataccataaggagtctaatttaataatggtggacttgagaaagtgggaattattctatgcactaggaatttgaacacagtacaaccattataacaatgcaaagtttatatggattgtgtttcagaatatgatgtatctggatattgaaaaatcatttttccatcagttttattcactgtgtagctaaggaatttcaattacatccagttaacccagaatagtgggcatcaaggaaaattcaagatatagtttttgacagattatgattaggtagaggtaaagaaaacaatatcacgaggttagtgtttcacaaattgggttacataaaacaatggtgtccctggagatactaaaaatgataagtaataaaattagttgatataaatgtatcaatttaaatcaaatccctcttgaagcatcacaattcatagagaaatcaatgagaaatcctggaatgaaggtatttttcaatttggttaatgtatctcatctgataaaagcaataaaagacataacaactcctttctttgtgtgtctgtaaaaaggaaaagaaattagattcttctatccctggataaattcccacttgactaattccaaatcatggtgggtttggatagaattcaggtggttagaccaacacatttcaacatttttaaccaggcaatatgtttttacagctatagattgagaaaggctttttgaacctagtatatatagctaaggcaagccttgccaggattgctgaagaaacattgtcccttttttattgctgtgaataacaaacagttaaatcaaaaaaagtcataattcagaactacctgggacagtagagatcaaatggtatacagttgtaaatacagaattattgagtgcattattgttttaagaggataaaacttctgaatttgctttacttattccagtcattctgcttgaaacattcagaaaataaatagtttttcaactttccgtcctaattagctcagccttcaccaacgaacacaaacattttagaggttatcattattcttacctacatttttacagcacactgacctatgtgctatttaaattctggggttttaatttcatcatcattattgcagttttccaaatgccactgaatgtagattactgccaagtaaggcttattatcagcaggccagggttataatgtaccgcagacagtagcattcagttaaggccaaagtcgtttatttcgtatggctagcttacagcacacattatgcaggagaaactaactattgacaaaactacagaaaaaaacgcataaatacaaaatcctctgtggcatttgccttgaagtcatatccaaaatttaaaacttatttaattttacccataataaaaaataatcatcttttcccctacaacaaggcacagtgtaattgtgtagactacttttaattcaggttcatgatctgaagtttaagacatgtgtaataagcttattttaaatttaaaaactgtgctgagaagttctgagaaatacataatatgaaatccacataatacctttgcaaaagtaaccttttggattttatgtcttcttaatcactaaatttcaggttgtgtctctcctacttcccagtgaactgtgttaatgaaaattaaaatccttaaaatacaagccagtacaacaaaagttcatcctagtaattcttaaagctcttcaattcctatagagtttagcctttgtcaatagccaaaatatgtgcttgaaaaataacttctttgagtttcaaagcaaatgaaaacataaaacaagcaaaaaaggcttttttgttgttgtttttctctgcatatctagggtttgtttcttcattcataaatacggttttcaaaaagcattgcctcagccaaaattattgccctttttaaaaatgtttttcatgtatacactttctacataactgcttttctttacacctcttttctacattaattctaatgaaaggtcatcttgcttacctaaattcagtgccagcttccacatgactaactagtcagctatggttgtggcttggaatgaccatgtgctccttgaagcttttgtataatgataatggcttccttgtcactaacaggtctctacaacctactaccaaaggcaagttacaaatcttcttctcaaacttggagccttaattaaaagtatgagaattcaactatgaaaatacatgagtccagggaggaaataaatcagaaaagaaaaaaaaaggcactggttccataatatttacaattatgtttttccaggctaaggaaatacctcagtagaagtgataatcgaattgctgaaacattcaagtttttagaaacgtttcactggactcaacataaatgatagtgccagagagaatagccaaagtgctgaggttgatagctactccctaaaatctttggacttaagtcttagcagttacacaactaaaaattgcattacttctgtcctatatgtcttggctgtcaattagctacaatgcaagtcaatccattttgaaaagaaaaaaaaaataggtttacctcatttggactgccaggctaaatagttcagtcttccatttcctttgaaaatgtgattggcattttaatagacatgaatcactcatagacaaaggctatttaataaaaacattatttgtggactttttttgtcttgctttcagaccaaactgaactagctattaaaaaaaaaaaaaacctcagtactgtttttagcatgcattttctagactgcatttaaaaccgtgtacttttcattccatgggataacccataccttattttttcctattttgttttcatctttatcaagaagaataagtctccaaatgatagaggcagaattaaaactgatgaggaaattgaactaaaaaagagataagggattgtatgagagctcagagttcctctaaatgattgtatgcctcctctctaggataaatttgcctcccggaatgtgcaaatattatttcagaatcatttttctcttttaaaaatgatagcaaacagatgctatagaagactggaaacatggacattttttgatttttcaaaaatggaaagtattttaagcatagtattaggcaaacattttgattattaagtggatagcagcaagcattaaaaaaaattaagtcaatcattagaaaccagattatgttcaccaaacatatagacaagttaaaaatatattctaatccaatctcatttcattctttatggtactagtgtactctggggaagagaggaaatgttgggaagacacactatatcaattcattatcttcatatcagcaattaatgtaatggattataatagcctgaaaggaggaactatggtaaacaatacaattagttggggtttatgacttattgaacagtgtatttcttaaaatggtgctgcttaattgattgatgaaaatctacaccatcctctcgatctatgtcctgaaatgctccaatttggtcaagcattttcaacactttagcaatgacttcaatacaaaatatgttttgacaaatttctagataatacaaagcaatgagaaatagtgaatatgatgaatgacagaagcaaagtcaaatgtaaaggaactaaacactgattcataaaagcacgtgtttatattgttgcttctacttttccctgacccactagtcatccccacatccaactgctctaataaatgcaatgagacaatccccatcacacaaacacactattcccatctaccccaggaattctgtttagtttgtgtttgggtaggggctgtatttactgccttattttaatttaagcattataaagtgaccatcatttcttaggatctattctgtttttttctgttttcggaccagaacattctaaatactgtttccagtatcagtgatctgtcacacagagacacatccatacatcacagtattttctataaggtcccgagataatatggagatggcagaaattaatgtggctcctaggatcacaggatttgatgagttattttacacttacgttataatgttaatatgcaatggggaggagccatctgtggctatctccagcctggctcactgaggtatattttgaccaaggcaatttatcatgaaaaaaatttcaattattacacatttcataattattcccagttaaattttcctctgccataataaaaactcacttttcatgatgagctgtggggatagtgccaagaaagggggagaaaatgtggctgtgtcagaaatgttggtgcatggaagtcttcaggtgtgaatcatttcttttcatgggctcttggtgtattgtgacttaaaacttgagcaaggaaaacatgagcaagaagaacatgagctcaaggaaaacttgagcaagaaaaacatgagcaaggaaaatacaatgattggcctagatttcatttaatgttttagcaacaaggccactacgctccagtcttttctactattcaatataaaatgattagatgaacaccaaaactgataaaaatgctgtatcttgcttaagtgaaagatggagaggaaatacatacaaataagaagtatagaatatcacttggtggttttgcctaatagaaaaagttacaaaggataatagatggttgtgataaaatcagccctggagatcgtagaggaataaacgctgtccaaaggaaattaaactgcagatctgcctacattcagtaaaagggcttcccctaagaaccacccctcccatgtcaagtgaaacttacctgttttatcaaattgtcagtttctgttaagtgacataaataataaaaaacacttagaacagtgcctgaccctctagttgttcactattgctattactgtttttgtataatcagtcagttcttgagaactaaatgtaccaaatatcagcaattttatgtagctccacctcattattaatactttgagtttgttagcagctgagcttagaagctaaagtttcttgttgcatctttagtcctaattcatacagaattatttaaaatttaaggctccaattacatcggggaccaaacccactgtatcattgcattcaaggcatcaccatttaaaaccgatgccaacaacctgaacgtgcttagaagtctgcagtccttatgctctcaagttcagacatcatgtaaatgagcaatagctgaaagagacaaggatatttatagcctcaataagatgaaacttaagatcaaaagtgttgctttaaataattgaagagggaatttatttttttaatattattttgagaatagaactggatctagtagaaactactagaagatgaatatcccttaaacataagagcactccagatatggaatagctgcctcgttaggtggcgccttctatcactgatttggaacaatccaggagctcacaccaagcttcagaggagctaacaggaaatccctgaggccactctacatttctgctacaagcctgcagctattatcttatacatgttctgatttgtttctctgcacagctcttaaaaaaaatgtttagggtaataatgtataaacgtttagacctgtaaaaaatacatcattgaagcctctagtctaccattttcattttaaggatgagacctaaagagaataagcaactttcttaaagtcacaaacaatgcagcgactgggcaggaactggaaatcagatgtttgcactcagagagtacatttcccctgaaccagattgtcccatcttttaattgtaaggaatagcttatggatcctgctatttccagattgggaattttaaagtagaatttaagtattatgtttcttttactcttccaggctttgttgtcactccaggctctcacctcaggttccaaattttttctctccctataaacttattatcctgcttcttttcattatcccttaagtgattctctacctgctgtgtgtctgcagctgtgtccctctaaagttctaaaccagacttaaaaacggcagaatgtgcatggtgttctgtctttgtgactcatttctcagcattccctagaggctatgacagtggctgaaaccactacaccagatgaactcagaacgctaggctttctcagagagaatgcagcatggaagtgaatccaaactaaatctcttttctgttgtttttcctcaggaattcagaattcacaatagccttggggtttttgtctgtctttgttttgaccatttctgcacttcaggcatttatgaacgtgaataaagaaaaggtctgatgcccatcagcagtaacgagcctttttgtcattcaggtcataattacacatagtcctctgtgtgacccaacatcaatgccaaattagcaaacccagttcctgggtatcaatgcatccttataattttttaaaaatctgtggagttgtatagtgcccatttgtattgcagaatatacaataaaggtattacaatgggttaggaatctttatttttgccttttattaggaaaacgtgatgctttgtaataattagtgaattcaacatttttgaatctgagtgattacaatagctatgtcaaaggctttgctgaggtagttggatatgcataattgtttctgtgaagatttagaagctctatatttaactcaggaaagcagctatgccaattttaaatttaattgttattatttttgtcaaaaaaatgcaatgtataaaatatggaacaggttttaatttataagattgtagagaaaatattacttaactaaatttttcttagataatgttggtttttaaaaatttaagaatatacaagtatttttcatattttagacttgatactatcctgctgtccattataataataccaataattaggaattcaaaatggtgagaatggagagatcaataaatctaatattaagagatcaagtattcatagatgaagagaaaacagatatataattcttcaaaaatgtcttttgataaaattgggtctctgaaccagacctcttcttattatttgagaattatcttttcaaatgtcaatgatttacatgactttctcattcttaaaatggctatgaaatgcctgggcttctgtctgatgacaggtctcctgaagtagttcctgaggaggaaaataacaaatgatgaagtcttgtatgttcctaaagtaggaaagggaatactagcaagagatggcctggggtggtgttcttggggtgtattagtctgtttttatgctgctgattaagacatacctaagactgggaagagaaaggtttaattggatttacatttccatgtggctggggaggcctcagaatcacggcgggaggtaaaaagcacttcttacatggtggcaacaagagaaaatgaggaaaaagcaaagtggaaacccgtaataaacccatcagatctcatgagacttattcactatcacgagaatagcatggaaaagactggctcccgtgattcaattacctcccactgggttcctcccatcacacgtgggaattctgggagatacaattcacgttgagatttcggtgaggacacagcgaaaccatatcgtggtgtaacattctgttatctgggaggaactgatttgggcaaagttgagattggtttgtgggtttcagagtaaggagtgaaaggaaatttgaaagacaaaatccagaaaaaaagttgttgttaaactagaccttcccgtgaattacaccaaaaggaatggacggaaacaaaactcataagcagcggtgcttattctgactatataagaaagaaagtaacttataaaggaaggccatgctgtagtgggtgttacagtggttctctaatcaagctacacattagaaccgtctgtgaatattaaaaaaaaaaatacaaataagtgtgctccactaccctggaatactggaattaacttccctggataattagggcccaggcacctgtatttctttaaagccccactggtgattttgataagcatccaagtttgagaaccacctgtgctaggaaaatttcttcaaatagctggagtatcgccatagtgtttcttaatatagcatctgcaccatcagttacaagtgggaggaagttcttaagggtgtcctgtcatgctgtagagaagctgttttcaactcagcatcagcatctttgcgactaatatgtattgggacttttttctttggaaaacacaccaaaccaaagaaaatagttaaaaaaaagaaatgttgaatatttgtccactttttaatggcttatgatattaattatatcactaaaaaggaatagtacagtataccctacccattttaaattagtaaatgaatgaaataagatctttattcatacatgattatttaattgcatagaaatatcaaatattcatattaattccaccaatacatttttatagttttataactttacaaacgtgttgtattttaaatagaaatctgataaatttaattcagtaaaaattattgaagagctactatttgccagatgctgctaggtttatggttactatgagatcatgataaccacagtgtggtggctagccattatgcatattaatgattaatgtgatatgttcacttatggtttcttagctttctgaatgtaaagatttattcaatcacattttgtttgaacaatggagattctgggatctattcaggagttaacagcaaaacttcaagacaattcaaaaagcaataatcacttgagtactaaaaatgcaaatgatacataatacactttcagtaagaagtaaatactactctccaaaagaatagtacttccaattgaatggggtgggtcccaaagctctttacagaggtaccactgaacatggatgttatcagtttagtaagaaaaaaaaggcattatgtgcagagggaacagtgcaagcaaacacatgtatgttcccacagcatatttagggaatgatcagtacacaactatagctagaatacatgtgaatatgtgtagaggtaaagcaaaaatggaaggctcataaagaaattagatattaaaatattaatagtttattcgaaaatgcaccataaaatatatctgatcatattatactctttataaacatttttaagagttgtcagtgtgttggaagcataactgtgaaaatgatacatagaactgattagataagcaacaattaggtggcaagggaacaaaaatattacaggtagagtggagagggcagatttgagtgatgttttgcatgttgaatcaacaggacttagtggtcacgtgggaaatgcaatgtaaatgaggtggagatgactccaagtttctggcaatgtgggaacattatagactacaattttaatgcaaacacaatgagcttcatgtgatgcctctggatcaaactgaaaatgagtacttgaaaatatgggtctggaactcaggtgaaggcagcctattgaacagtagcttttggctactagtaatgatacaacagagaacattgttttcacaataaagagaattattattatagaacacaatgtcctaaggtggagtacctaccttaattcagtaccatatctttctataactccactttgcaatttgactttattagtgggaaatcttcttgagtgtcctcaaagagtcagtgtcatctcattggaatgcctaggatacatacccctacctaaacccatttatagaaggagaatgaaacaactatgaccagtctgctttatgctgcatcagtgaggttggaatgaagtccacttttctcaccatttagcttcttgggtgagtgccaacaccctaatcaatctttgctttgatagcaaagaggaagtgtgggagggtggggggatagtcaggaatagattccaggaggcaaacgatgtattttactaaaggtataggcatgtaagtaatagtagatgtctgcaattaggtgaaaatgtccatcgagaaaattaagagcaacaggaaattcaagagtagaattaaaaggactgacaacatttaaagatagacgtctagaatgggaaagtcaggaaaatattcattttctggggtaatgtaatttaaacaatcctataaatattgtattgcgttatatttcaaaataaaaaattatcttaatacaaaattgtcctaaaaattcaattcctaattataggaattaaattgagcaacatcttagcagctggagatgctagtgattctcaatgggctgatgacggtaacaaaatctcatcgtggggagtctgagagattcttatactcccttaagaaagatttagaaatgttcatgacagatgaggcgtagaaaaaaactaaagtggcgtagccattagaagagagaacctgggcaagtggtattgtgggagctaggtcaaaagattttcctcaaggaaggagaatgatagattcacatgctgatagtgttaaaatgtaacggacacatcatcagtcagctagcaactgagagaatgggaagggaaggggatagaatgatatctttggtcttcggtctgcctcctatgtctctgaagcctgtgtcttacccatgtttagctgaaaacagagacagcccaagatggtccctaaattttgaaactgaacagcctcgatattctctacaaagggaagccctaggcagtatggctcaaagccctgtatgtctaaagataattttagtaaaaatacataataacaaatgagagacagagagaggctcctaaagatctatttggggccaaaaattaaactaaaaataatgatgatggttaaaattggtttgtactagctaatgtttggggtaataagttccgtaggtaagaaggatgaaaaccagatttaagtgcaaagaaagaggaagcagcaagtattcgtcactctctccagcttctaaatatggaaaaacttgagcatggttaggagccgagggatgtggtttaacacaggttaagaaattgatgatatataattcaaagaattatataacaggcagggaatagaaatgatggcaaagatgggatcaagagcattggtggacaggtttgcatgggatagagggattaacacatacactcaaacaggaagaaaaaacaggtgaagctatagatgtttttatagccaggaaaaggggaagtagatgagttggtttctacctgttgacttctgtaggaatcttggttacatgctctattcctttgctagggccactgtaaccaagtatcactaactgagtggcttcagaaactttaatgtctcatggttctggaggctagaagttgagatcaaggcgttggcagggccatgctccctcagaaggggctagggaaggatatgttcaaagtctcctcctggtttctggtagttccttgtcttgtagtagcatgactccagtctgtgtggggcattctccctatgcatgtgtctgtttcttttcctcacattcttttatgaagacaccagacatatgggattaggggcccattctactccactatgacctcatcctaactacttcttcagtaactctagttccaaataagatcagattctgagagactggggattagcatttcaacacataaaatcaggggcacaattcaaactgaatcagatgttgaacaatggacgtagagagtttggaaaggcagctgcgggaaatgggaagaggagttgacaatatgtcattttttttttagaaatgacaatatgtcattttttttttagttgacaatatgtcatttttttctcttcaatacattaagagaatcttatcaataaataagtaaaatcacacatggacacaggaaggggaatatcacactctggggactgtggtggggtcgggggaggggggagggatagcattgggagatatacctaatgctagatgacacattagtgggtgcagcgcaccagcatggcacatgtatacatatgtaactaacctgcacaatgtgcacatgtaccctaaaacttagagtataataaaaaaaaaaaaaaaaaataagtataatcaacctttctctaaatatatctgtttttaccagatatattgagttcagcaataacatgagaatccaaactattccaatgatttgattgtttatctctgtctctttcacatgcacatttatctcattacacacacacaagaagaaagaaagctatatcatattatataatgaggaaagttaacacagaaacataataaacagaagacttgtgtgaagatttgtaaaaatcacacatatgacaaacacttaaaagtatataattcagagtaaaaatatgtaagggtataagaaataacatgaagaacttgaaagtatgctacaaccttaaaaaatgtctttgacaggtctataagaacaaaattgcgacatcagctgagataaaaataggttgcaacgggactgaggaacatttggatttcaaatatctaataaattgtggctgggaaaagctaaagtacttcagtgacactgcttggtactaaacagttagaacaaccagccccaatttcaaaataactaacataaccaagggctgcccttggcatcaagactgatttctttctaggtcatgagtcccaggcatatcatctctaataaaaatcttacacagacaactttattttacttgccttgcaccccattccatccccaacacaaatctatctcctgccattactagctgggcccctggttttaatatgtgctctgaagtttaaattcagtaattcaggtaaagcttatactggtaaagctaatttttctttttaaattattccttcataattccttcacccccagatatcagctatctcattttcatcattttctcagtatcaacttaattgtgaaagtattctagggccatttatcatttaaagttttatataatgagccaaggatgaaaatcattactaaatatataagccctccaatagtctagtccataaatttacttaaattacaaccatcaatatgtttagcagtggttattcaatttatatttcttgccttaatgaacataagaagtaaatattgactgatttttaatgactcatccttttatagccttcttcataactttgatgagaagcataattgcaactggttttatgtgaaataccttaaggagctgcattatgcatgccattcactgccctctaggagcttaccatgtaagaaatatacacatgtagaatacacgcatatatgatcaccatatagatgcattaaaatgcaaatattaaccacaaatatacaagcaacttgcagagtttttttttttttcctaaaaaggacacaatatgagtatttttcaaaggttgtgggagagagtgaaaaatggatagaaaaaaagttaaggtcagtgttcagcaagtttgagtaatgatgagatatttattgcaagctctaatgcattaaacctctttaatcttgtcacaatagaaattaattgcatcaggtagttttgagatcaggtaaagagaaaaaaaagtgaagaaagatctccagaaaccatgaagaatttagggtgagagaagtatggattagggttttaacaaaacaatactgtgcgggtaaaacattgaagataaatatgatgggctttctacaggcacaaacaagcttgaaagaagttgagggatgagagttttaaaaatgagagacatttacaggataaatcatgaacagctctggaataagagacagatgtttgttgttgtcccacttttttagtaaattgtttgtgtcttggaactttctccccttcacctttctaaatacaagcatgtgtgtttgtttgtatatagaaataatttgagagtaaatgtattatatgttttctatttctattgttctgggactagataactctagtaataggatataacagaagtcatcagtaagttctgagatacataaaatcagtaagagttagacatgtatgtattgatgcttggccaactttcagtaaagctgctccacattctcaccagaattaagtattgtcattattttttaaattattcttttaactgttctaacaaatgggcagtgatatctcattgtggtcttaatttgtaactccatatagagagatatttttaggttctaggtcttaccctcttaagattctgatttagaaactctgggttatagggcctggaaactgtttaacaagttctctaggtgattttgaggattggtcaagggtagggacagaagagggagagtcattcaagaacttaggcattatcagtgatgagaatgatgagtaagggaatgaaaaagtggatctgtcaacaataagaaagcaatccagtaaaaaacaggcaaagatttgaacatcacttcactgaagaaggcaaaaggatagaaaaataagcatatgaatgaaaagctccaacattgttagtcattaaaaaactgcaaattaaaaccacagtgaaataccactacactttttattataatggctagggggaaaatgttgacatcaagtgtttgtgagagcatgaagaaattataactcatatgttgctgaggagagtgcaaaatgttacagccactttggaaaatagttgacactttcttatataaagtcaaaattatgctttccactgaacccgacttctaggcatttacctaagagaaattaaacttgtgttaccacaatatctgtatgtgaatgtttatatcaactttatttgtaataccctcaaactggaaatgtcccaaatgtccatcaactgatcaacagataaatgaactatggtacatccatagtttggaatattactcagcaaagaaaggagtagtctactgatacacacagcaaatataaaatgcattaagctaagtgaaagaagccagaatcaaaatgctgctatactgtataattctatttgtatgacattctagaaaaggcaaaactggaagaatgaataggtcagtgtttgcaagggttggaggtagtagaatggttgatggcaaagggacagcacaagataattgttgggagtaatggaactgttacacgacctaattatcttgatagtaacacaactctgtgcatttgtcagactcacagacttttgcaccaaaaagggagcgtttattctatgtaaattgtttttaaagtaaaccaaacaaaatatcccctctctccagctccttaagacaagagcaatctctatttttgttcatggactagaactgatccttagagatgataaagacttagtaaataattatgtagtaaatgaatgagtgattaaataaatgttaaatgtcaatatgtatttgtaatctgttaacttctgtcttgtaagtagtgataaaacaagacattaaccactcaatcaacattcaccaagagtggaataataagtcaaaatactgaaacaagtaccagtatggataatctaactgagacttctaaaacagacagctaccttcagccaatgggcaatgctacagattttgaatgaaagaaatgcctctcttggtatctatttcaaagtcactaggagagtattacatagctactaagatgaaaactctgaagtttttatcttggacatcactttcaagctatgtagtcttgggcacgttactttatctctgtgtgtgtgtgtgtgtgtgtgtgttttaatcttttaatgtaacaaatgttaatgatattacttctctcagtggattattgtgagaaataaatggataaatgtatgtgaggaagttagaacagggcctggcacataaatacttgataaaattcagctaatgttagcctgtttgacagtgtagaatatatgtcattcacgttttatcccattctcttgatagagaaaggtaaaaatatgtcttcctcattttatttactgtccaattaccatatttatagactataaatatatattattgaatatatagtggaaagatttttaaagaaattagaaatgctgggctttgctactcacttcttaacctaattctaatatagtatttggaaaaaaaaaacaacctctaaaaatcagaatttctttatttaaaaaaatgaaaggattagactagacagtctgttggtttttgtttttttaatttggggatcctcattcatgcatcagcaatggatgaatacagcagtctgaccactctccatgggaagcagtattcacatggccagatatatgcgacttacaatgcacccacaaagcgcatgcagattcccctcatctatttcatctgagtaagggtgacctttcacaatctggttgaattacaaaatcttttctagctgctacaagtgaatagatcatattctggtagcacccataaaagtcatacttgctgtcaacttgagaaattttggctgagtgctcatgtttctctttccttgtcataggagaaaggcaattcttcttatgaggaggacaaaatgtaccatgagaagatatgaaaaataacccattcctggtcccaacagcactggaagttacatacttgaaaacaaaaatatgtttatatttttatgtaattggccaaagtataggttttaatctcccctataataccattatttaagataagtctgggcaatacacattcatagatagcgaagttcccccagttcccaccaaaacatcatctttactgcctcacagactttttatttgtttggccgtagcataaatgccaactggcatcactgtctagaaaaagattttaagttagcctttcagtaaacttacctaattggatatggtttatttattaaatttagtcactagaggtttgttgagatagaaaaaaagtatacctatatctcaaatatatttcataagaaatgacgatttggaaaagctctaaggtgttatttatcacatagattcactcatggaatatgaccattatgacatgggaggctggtcgcaggaatgatccttcaaaacaatggaagtgtcacctggcgtgtcttttcagctgtctccatatcgttatgcatataagctgagagagaaaaatggtgcaacttgattgaagcacaggcataagactcatatcttaacagatgtgttctttaagttaaaaatgagagtaaaaatgtgaatcaaactctatcaaagttggcacagctgttgccatgttttaaaggtggcagtgccttgacagtttccaaaaagcaggcaaaaataaagtatggggttttttttagacaggattttaaaatgttgattcctttattctttaaagcatttcataggccaaataactgtcaggcccagctcatgtctgctttgactttctctttggctcttcttaccattgtaatagctaggcttacctgttcactctctgtgagcttacaggcaatggagagtgaaaatttatggaagatgctgggtagtaggtcaaatctattcatccttgttatcattgtaattcgaaacctgctctaaccttctcttaaaatgcatggagcgcattcctcaccatagtacataaagctttatcctatttagatattcttgaaactaaattaatcaatcaactctttaataaattatcacacacacagtgtgaaatttatgctctagaaggattaaaatatatacaggaagagagttgcccttatggactttttaatgtaaaggtatgctcaaactgcaggtgacaccatacccacccggggtgacccatcttggataaagctttttgagatcctctgggcagagttaattgttctgttatttgctgacatagcacttgatatctccttctttcaatcacagttaataccacactatcattctattgtcaaaagctcaggttctggactctggatacctagattcaaatttctggctttgtaaaataccttagtctccttatttctaaatgggaataataaaagtgcttccctcactgagtaaatgtgttgttggattagtaccatggtctgacttgaaagtgttttcggtaagtgtgtcttacagaaagttgtggtattaaagttagatattaaactgttcctggtaaaatattttttaaaagctgacctaaaatgattgtaatacaactacagattgaaatagttttgtggaattcaaagttacctgctgactgattgagtgtgggaaatgtttgggatgggaagaaagttgtgagggaaagaggagagttagatgacaagataatcatggtacccagtaatgcaaataagaaaaattcatttggaaaaaaataaaatgtatgattatatgcatatcaaaaaacatcaatttcctctgctttggttttctttcccacacatacctaatgttatattaaactactaattttttagactttgtcctcaaatagaacgcaaacccctttatgacagcaacactatttatttgtattctctttatctccattgggtaggtgctcaaaaaatagtttttgaataatcaaatggaagaatgaactatctaaatgtgtattcaggagccagatatatatttatggagggatatcagaagaagaatgacaggtagtcaaataggaaagcaaagagggaaatcagattatagagcagctgtaaaagcctagagaactcaattaacctaagattttaaagggctatgtcacacagattttagtttttttaaataaaattctgtagcatgaaagcaaaaacaaatacaaaaaaaaaaaaaaacatttcagctgattattgacatgacaagctaccagaaaattgaaggaagttgctagaaagaagttctagcaagaatcaagaaactaggtcttaagtttaattcttactgcttatttcttaagtgtaatccctggaccaacagcctcagcatcacctgggaaaggataggaaccatcattttttagggaactcaccctagagctactgaatgagaaactccaaggcaagggccagaactgtattttaacaagtcctccaggtgactctgatgcaggtcaaagttaggaacaatgccctaaactgttaaaataactgaaacgtgaagctttgctgaaaaaggagttaggataactgccagaatagagaggacagttggatcagatgtacagacatcttaatggttataacaaatgataatctgattttataattaattacttcctcgtacactgagatgagacccaagctcttcatacagctgccttgcctagtaggcaaactcctttcattcacagctgcaataggaggctacaaacatgcatgcacaatttttctttttattgaacagctgcctgatagggtggaccaaaatagaattaatattcaactaattgtgtgggcatattctactttgttaaaagactgaaaatgtatctcaaaatacatacataaaagtcatgagagagaaaataagtagtagtattatataaattaaaagcaaaactagagggaaaagtgggtaaatatatctgatagccacatgaaatgcttcatagaggcagggctggactggcacaaaacagtaggaggcaaacacatacctatacttatataagatgtgacaattatccagtacctctccatcccagtctcaaactacctttccatcagcttcacattgtgcctggaatttcacttttagaaattcattaattggctcaaggcattttgtgtctagaaatcttatattaaaatgtgaaggattctggaagaagtaatatcttctctttattctcaaccattggcctcttcagcatgagttagtttattttaactttaggtattgaccttgtgtgagtattgacctcgaagaatggaccaaagaacacatttaccgtgttttgctttgtgtgtgctcttggtaaccttatgactttactggggtcttcagccttgacataaagtagaaatcaacttatttaaaaagaaaaaatatatgaacttgaaccctccaaattcatgccagacagctgggttatcctcactccaaggcattgaaatgaatacgcggataccaataaatgagaaaatatgtggaaagtagtcatagaccaaggtggggcattgaaaatgggctggagagaaggcaacaatatatttattgcatcagctcattagaataagaaaatttgggcaagggtaggcacacacatcagaagctatagaaaattctccttcaaagctggcactgggggtaagggtaaggttgttgatagaaaggtatagaacaagagtcaattcccaactgattcagatataattcttcagataagatgtgctagctgtttgagcctttgcagtacctggtctccattgatctttagctgtggtcttctagacacagcattataaaattagtgagatttggccaggcatgttggctcacgcctgtaatcccagcactttggaaggccgaggtgggcagatcatgaggaaaggacattaagaccatcctggccaacagggtgaaaccccgactctactaaaaaaaaatttaaaaaaattagccgggcgtgatggcacgcacctgtaacctcagctactcaggaagctgaggcaggagaatcgcttgaaactgggaggtggaggttgcagtgagccgagatggtgccacggcactccagcctgggcaacagagcaagactccatctcaaaaaataaataaataaataaaataaaataaaagcagtgagatttgtttattaaaataaaagtaatgagatttgttcattaagcccctttcacatggcttaatgagaaaacactgtacagaatgagctatagcctgcagtgacagaaatctccaagtaaggagtatacactgaatgtcatgcccttcaataagtttaggcctgtagtttaagttcttttcagtatgtgccatgaacaacaataaacaatgtacctcttatataaactacttaccttttaaaacaaaacaaataataataataataataaagtgtttcaaatttatacaattaacttttcaagcataaacactttggagattatactatctattcttaattaaacagtatttcactgttgtttttttttacaacattatgttttaagagctcattttaaagtctgtttttccattatttttttcttgctcatgtctgaagaacaaagcaagatgattttaattggtctaggattggccagatattcttaaatatatgaactgcctagtgaactctcattatattcctataaaaataataatcaaaatatacacttctgatctgacattcacaagtcatactttaataagaaaaatctagtttcatgctcgttgtgttctaagagtataaatcactttatgcaaatttacgtttttatgaagtagaaattctgaatattttagccttgaaatggctttaaaatgcaataatcttttggcaccagagcttaacaaggacaaatatcatgcagtgaaacaaaaggtcacctgattgagaatatttaaatatgttcttcattcctatgcaaaaatattatattttttgttctatcttccacaaagtgaaatttatgaggctgtgttaattttttattattattttaaaggtagaatacttttgttgttattaaaatattctacttttcctgtttaatatcattgcaacattccatagggctgctaatttttatgggtaaattatatcactagaggttttctatgggaagttatactctgattagggttaacaccaatcataagtatcaaataaatatataaaagctttccttgaagtaggatattaaacttgaatttattttccttatggagatcatttttcttctgtgatattcacaaaataacaaatacacagtttattagcatcaatatttaaaatactaaaacaagtgtgaaaaataggtaccttctagtacttttgtgctcatctgttaaatcctcattagccctatgaattttaacataatgacttacaaagtcaagtaatattgttgtgggcctttttcctttccactctgacacacacacacacacgcacatacacacacagaggaagattttttaaaatctcaaaaatctattcaacataatttgtatgcagtaaataacttgagagaatttggtagtgtcaccagtaatattgcatccttcatttataattttcattgcttatgaatcattatatctctggaatgcaaggtgcatatgggaatgccaagtattagaggtttgtaagggagaacatatgttttcttctctgcattgtcagaagtttgttttacttaatatgaggctagcattataatattatcattcaatgactttttgtagaaattcaaagagaaggttctattttgtgaggccagatgtacttactgtcattcatggaagtagatcttgcaactttgcaattagtgtctagaatgaacatttactagctgctttgcttttctagcaagaatcaagagagcaagaaagtaaaattgacctgaacttgcagaagagttcaaatgctaaatcctgaaattaattagaagatgtatgaccacccttgatcttgattctaatccaattctaattaaacttacaccatgaaccaagaattcacacactgggaaggcttttttttatttatttatttagtcttttttagttactctatttcatacacaagctggaaataagttctaattagctgagccactcactgaacattctctgtggttagaagtacaaaattaaagtttaaccagtaagtggacacaaaacagaaaacatgatgaatgattcaggagatggtagaatcagacagaaattcctttcgtggtcactgttttattctgaactgtattaatagcttagtggcctgtacatgttagtatactgtctcagattatcacaagggaacaaacataaaacaaggaatgcatgagaaatataagctcctcagtgttcaaggtcctacatcaaatgctctgaatacatgtttgtcctcttccaaaactcttctctgtgtactccggggtctgagggacctagacattccaaagcatgctttgggcctccccaacatctggaccttcatatcatcctttagggtccatgtgaaatgtcacctaatttctgacacatttcctataccactcatgaacgacttggtcctgtgaaccaccagagcatcttgattgattatatctacccgttccttgattgcctgtactctaagcccttttgcaattttgatggggatacttcagtgagccataccaacacaaatattttctttcttggagattacattctaatgtgatgagacaggtactaaatataataaataaatggcattatattttagacagagttcatggcaatggaaaaaataaaacagggggaagtaattagaaattgtagccatgagggaaattgtaattttaaattcagtggtcaaataatacctcactgaaaaggtgacatctgagcaaggatttgaaaagcttgctcaagatttggagaagcacattccagggagagggagtgacttgggaagaggtcctgagatgggaatgtggctggggcagagtaatccagaagaggatcaggtggaagtcaatggtcatcctgggtcagatgttggaaagcgttctttgcaaatacaaggaccctgtttttactctggtaagtttgaagtcattggagagttttgagcaggagggcaccaaaatctgagttgtgtttctacagcatcactctggatgctggattgagatagactgcaatggggaaggatagaagtgggaagcaatagagtgtggtggactctagttggagtctcctacagtaagcaaggagtgacaatagtgacatggagtgagtaatagcattgaaggtgataagaagtggtcagtttctgagcagaaacggcagataaggcccacacaattttctgagattagatgtatggtgtgaaagaaaaggaggagtcaaagaacatcccaaggttatcgtgtatcataattaggaaactcactttattttcccttccaacactaaactactgaactaacgtaggctcacacaccatagacttgcattcctcttcaataatttagactaactgatagtccacacaatatggttaatttctctgtggattgtgaaaattaaaaatgaaatgaaggttagcaccagttaaaagatttgaaaggactaaaatcttttattccaattctgaattagatgtaattttgcttcaggctagctaaaaaagttctgcaagtgacaatttaaacttaaattaatctcactttagagcctttttaataaagcttttctatgaaacagtgaaaaccagtgatatgagagctataacattcccaagaatatgtaacctaaaaccataacttaatttgaattttactgtgcgttttaattaaattcaagatctttacagacaattaatatacatgtataagacatatctatccagaaagtgatgtgaaatggagaatttaggcatttatcttgctagtgaaagctccaaatctggcttctggggaaaaaaaaaaagcgtaagtcaggattggaatttcattagatataaatactaattcagcaattattcagttctatatttgacttaatctatatggacatgggcacatttttgagatggataaaagtctaactcatgtagactttgcaaataaaattttttatgtcaggattatgtattgttttcaatgaaaattaaataaaattaggcaaaaacagaaagctatggtaaatatggcttggattttattattgtaaatacaatataaaatatacaataaaagcaaagtaaattttataaaattaaaagaaccaccaaaaaatcctagtaaaataaactcttttctattattttgaatagcattatattctgtaaaggaagttattacaagtaggttgactgccattcacacttctatcatatgttataaagtttagagttgaggtgtttatatattaatatggctgacttttggttattcatttccacctgaagggagatatttatttacaaaatggcatggccattccaggaaaaggagacagcatgatttaaatatcaactgcaacttaagaagaatgatgacaataatgttattatgggcacatttaatcagagaaagtgacaaacaatttgttgtaaaacacataaatactagttgataactcattctagccacataaaggacattaactatttcacatcaacacagagaaaatcttacctatagcacgtaattatttatactacaaatgacagacaattgaaatgcatgagcctgctatcatgtgttcatggtttgtaggtaaaatgagattattatggaaacaccaaaaaaaaaaaaaagagcgtgtcagtagatagatgagcacaaatagaaacattactgcttcacactgaacaatttacaaaaacttttttgagacaaggtctcgctctgttgcccaggctggagtgcagtaggagaacatggctcactgtgcccttgaccttctgggttcaagcaatcttcctgccttggcctcctggtggaaccataggcacgtgccaccacgcccggctaagtttttaaaacttttatagagacagggtcccactgtgttgatctcaaactcttgggctggtctcaaaactcttgggcacaagtgatccttctcccttgtggcctcccaaagtgctgggattaccagtgtgaatctccgtgaccgaatgacaactcacaaatatttttctataattcaacacaatatttactgaacaccttctatgtgccaggctgctcacaagatgtgggaacttgaaagattaagcaaagacaaacatagctaggaattaccacatttaaaatcaggtaatcctagaatgcaacatatatcattgggagataatagtttatcaccacatcattaattatcactataattaaaatatattacgtaaatacattcataacaaaaggtttatttctcactaacacattcacaattcatgtttcaatatatctgcctgcatataaagtaaagggaaaataccttgcagaaggacaaggacatatactcaattatggcatcaatttcatcaatttcctgcctcagatgattgagtgccaatgtttctaagactaatatttcaattttttgtctttatattactccttcttacctctttaaatatctatcaagtatcagtatttttctctgcttattttttctatttcacaatcctagcataacaaagccatctcactcagatgcagctttcttgctttcccttcacatccacacgtactctttcatatatatatacacacacacatacatatatgtatatacacacacatacaattatgtatatacacatatatacatatatacatacatatacatatatacatatatgtgtgtgtatatacatataaacacatatatacatatatgtgtgtgtatatatatacatatatacatataaatatatatatatactttaagttctgggataaatgtgcagaacgtgcaggtttgttacataggtatacacgtgccatggtggtttgctgcacccatcactacgtcatctacattaggtatttctactaatgctatccatcccctagcccctaccccccaacaggccccagtgtatgatgttcccctccctgtgtccatgtgttctcattgttcaactcccacttatgagtgagaacatgtggtgtttggttttctgttcctgtgttaatttattgagaatgatggtttccagcttcatccatgtccctgcaaaggtcatgaactcatccttttttatggctgcatagtattctattgtgtatatgtgccacattttctttatgcagtctattattgatgggcatttgggttggttccaagtctttgctattgtgaatagtgctggaataaacatacgtgtgcatatgcctttatagtagaatgatttataatcctttagtttcatacccagtaatgggatggctgggtcaaatggtatttctatttctagatccttgaggaattgccacactgtcttccacaacggttgaactaatttacgctcctaccaacagtgtaaaagcgttcctatttctccacatcctctccagcatctgtttcctgactatttaatgatcgccattctaattggcatgagatggtatctcattgtggttttcatttgcatttctctaatgaccagtgatgatgagctttttttcatgtttgttagccacataaatgtcttcttttgagaagtgtctgttcatctccttcacccactttttttttttttttttttttgagatggagtctcgcgctgttgcccaggctggagtgcagtggcacgatctcggctcactgcaagctccgactcccgggctatcgccattcttctgcctcagcctcccgagtagctgggactacaggcgcccgccaccacgcccggctaattttttgtattttagtagagacggggtttcaccgtgttagccaggatggtctcgatcgcctgacctcgtgatccgcccgcctcggcctcccaaagtgctgggattacagacgtgagccactgtgcctggccccttcacccactttttgatggggttgattttttcttgtaaatttgtttaagttccttgtagattctggatattagccctttgtcagatgagtagattgcaaaaattttctctcattctgtaggggttgcctgttcactctgatgatggtttcttttgttgtgcagaagctctttcgtttaattagatcccatttgtcaactttggcttttgttgccattgcttttggtgttttagacatgaagtctttgcccatgcctatgtcctgaatggtattgcctaggttttcttctagggtttttatggttttaggtcttatgtttaagtctttaatccatctggagttaatttttgtgtaagatgtaagaaaggggtccagtttcagttttctgcatatcgctagccaatttcccaaccccatttattaaatagggaatcctttctccattgattatttttgtcaggtttgtcaaaggtcagctgcttgtagatgtgtggtgttacaatgggacatacttactctttcttaaagatcatgttttccttgagttcgtatatctttggaattctgttgactagtaatatttataaaagtaacttcaggtcaacttatggttgttaactttttcattttaccataaggaaacaatttaaatgtaattcccagttactctgattactatcattttatttaaaaaaggatttaaatcccccaacagaggaaatacatattaatagaatcttttgatttttatttagttttcaatttttatgtttgtatttatctttagtttagttttgttttgttttcagatttcaccaggggtcagtgaatatatcatcctcagattaatggaaggtctgagaataggttttggggactgctgatttacctcttgttcctgcctcaccatgtattttctctgccatccctgctttctgccctcccttgtctctgtggcacttgcaatgtaactatgaccacacagtagcaaagtccaataactctgtcagttattttaatgtacgtgcttccaatacttgacagtcaactatccacttctttaaaaggtttttgtgacattgctctaacctggttttactgctttgtgacagctctttttttggttcctcttctttcttttcacataaaattgggcatttactgtttctgacaacagtttctaggttgacatacttcctccctcagtgcagtactcactctcaaagtttcaactactctttttatgaaattgactctaaagcttgtattttcaatcataatctttcctctcatgattcatgattcagtagtccatttcttcaaataaaagctactaaatggatgttaattagaattccagactaaagccataaaaaatgcaaacagatttcatcaacatgtcttttttagctctcttctctgttacaggaaaggggtcccaattcagaccccaagagagggttcttcgatctcgtgcaagaaaggattcagggcgagtccacagtgcaaagtgaaaacaagtttattaagaaagcgaagtggtgaaagtacagctactccacagacggagtagggaattcctgaaagtaagaggaggaatgcgtccactctaggtacaatgcttgtatatatggggagatatgctctgctgcaagggtttgtgataaaggattaattttcttaattactatatattgcaagaatcaacattattatctttaaggcaaaaataggaattcctttgttctgcagatatcaggatatctgggcactcccaagtttagatctgtttagtaaacattaattcattccattaaacatctagaggccaggaatgcctgactttctgggaatgcagcccagcaagtcccaggctcattttcttatccctcactcaagatggagttactttggttttaatgcctctgacatctctaatcactgtacaatccaaatattcctacttttttaaaattataattaatattagtacaataatatatttacatgaaaaataatttctgaaatagttccattcaccaagttttatttatcatccttcttcaaaacttctcataactctttaatcttcttcacttcatagctacatgttgttatactgggcaagtgacttattttttttttctgtagaatagatatattacatgtgtaagaaggattctgtaaatattttattctgtgcatacttaatacttatatagttcttgttgattgatacctttagttatcactttatcctgactctacactagtctgttacaaaactttattatttttcatctgtcagcagtaaagaaagtgccaacctgttctaggttagataccatcctccataatcaccttccgatactactctgctcctcattgctttagttttgcttatacagttttaagagtttaacattacttcctttaagagcctccacattacacccttcccatcccgctttccgtctttccagtcttattccagtcctatcttaattgaaaaaaaagtaataaggattatgagcgccatttttacccatataaattaaatgaactgaataagttattttagcattcaaagcctcagtattcttactctcaacacaagcacaatgattgacacatagaaggtaactaatcatgagctaaatctattcactctgtttcctaccatttaaatctcagtgctttcccacttctgtgccttttctaatcccttcctttccatgaatgtgctaatcacaatataaatgtcatattatataatactccccaaacttaggtctatttgacagatgagaggttaaagcctagaggaattagagacctgacagattaatgaccacatcgcatcttacacagaaactattagatctggtatagtagaaactctactgattttacttgtttttgtaaaacctgaacattctattttggtcatttaatttctaagagtagattacaaattctgtgaaccatgcagtaaggtaaataaataacagttttagtaaatataagcagtgtagtagaatgctaaaacaaacagctaagtagagctaagtaaattttactgttttgtcactaattttgtgatcttgaacatgctgcttggtgtcttggggcatcagttttcttttctgctaacttatggtgctgaaacaggcagcacttatggagtctccctaagatctaaatattgtgattgtcattaccatagttgacatggaataaattgcagttcaacttctttgtaaaaacctaaagaaaacacatctcacctatcagatcataatatggccctaagtgaagaataaatttctaagcacagattttgtaagataaagaatataatcttcttgacaaaatgagaatctaaactaaaaattaatttgatttaatagagtcagacatctggatatgtggttaaaattttcagtttccatatgaatgtttgactttgtgtgaacaatatcaactttataaaaaaatcaaaactaaaatgtgaaaataaataatcagtcctacctaatttggaaaaataaaggttttaaaaatttgattaatcttacctaagagatgaagacgataatgaatattttgggcatttttttcatcttttgcctgttattttatagtcaaatatcccttagcaaaacatgcaggtacttgcagaggaaaaacacagtaatcataagaagtgattcttcataaaatctattatcttctgattctttttttgggttccattaattctaaccaatttgctaaatcctagaccatttacctttttttgaattatgaccttctccactgacagactctcacctaaaaacaaaacaaatgtacttgagatctaaaaatttttaaatgtcacaaaatatcaagtgagtaaagaagacaagcaagtcaatacatatttatgtatttcttggttgactctcttacatttcatggatgaagacaaatagtaagccagagtttaatttcatttcagagattctagaatggtgggttcagtttcaggggcctggagtatcagtaggttaaaagtattgattacaatggaaattaattttaagaacacaacatcaggcctttaaactatttagcagaaagcatgcagtctcctatggtggaaagaggtataattaaaaagctatcaatagtctgggattgtcaaaactactttgtcacctgaagctcattccttataattatcttttaggctttaagctagatcaccattaacctcagaagaaaaggggttactacgctttctgatgtgagaaattgtatcatcatgtaaattaaaccccattccacagccaaattagacttgagaaatgattgagtattaaaactgctcatgtatattatcaagtgacacaaagtatgagggcactaagggagaagaggaagtttcccactttttcaaagatttttgagattccttatgtgcacagaatacgattttaagcatatatcagagatataaaattgaagcaatagaaggaaaactcagagatatttttagtctttccccaaagatttcttttcagctctcagacagtacaaaatgagtcaacacttaagtaagccagaaataatataacaagtctgcaaaattacagctacctacagctcagatcttcaatcaagtaattgttaaagcctcactagaaggaggaataaatatgttctctggtgaactcacttaataattttaaccttattgtcaaaagaaaggagtcgtaattaagatagcacaatacatgaagcagggagcagcataattgaaccttcctggtgattaatgtgtatccctgaggtggtctcttcagtcgtggagcaaccaaaatgatgtcgccttctttccctgcataagaagttggggcctaatgacaaattatcaaccattgtcattcctgggtgatgctgagctgatagtagttgtgaaaggttatgttggttaatgtaagtgattcttagtaggcagaatacagcctacaaccacatgtgcaccatcgtgctgatctaactgtgggtggctgggagacacgagagggtattctgttgtggctgttatacttgcaaagaaagaggtaaggcatgatttctttctttttttttttttttttttttttttgagacagaatcttgctctgtcgcccagcctggagtgcagtagcgtgatctcggctcactgcaagctccgcctcccgggttcacgccattctcctgcctcagcctctccgagtagctgagactacaggcacccgccaccacgcccggctaattttttgtatttttagtagagacggggtttcaccgtgttagccaggatggtctcgatctcctgacctcgtgatccaccctcctcagcctcccaaagtgctaggattacaggcatgaaccctgccaaggtatgatttcttaatctccaaatgattaacatttgtagtcagtgttttgtttttaggggtttcctgtgcagtgtggcatgatttgtagcatccctggcctgtactcagtacctgtcactagtaaaccctccccctcagttgtgacaaatatagatatctttgggcattgccaaaatgttccatgggaggcaaaattgctcccagttgagaactagttatgaaagagccttggaaatgctatacaacctatatgattatatctatatctatacctatatctatataaagagatatacacatacatgtatactcatatctctatacaacagtatatacatacatgtatacatctacatatgcatctatatatatttgtatataatgtacatatatgtatatatccatacacttgtgtacatacacattcacatgtatacatatatatccaattacatatacactattatttctatatacaatatatagagaagtatacatgtatataaacaatatatgtgtacaattcacataaaatacacatgcatgcatacacatatatatgaacttagacatatatgcagcataaaatcatatagcctgaaaatatagataatattttgtaatgtcttacagactgaagatgcccttgacaacattagatatatcggcgtgtgcttccagattttattatggacactctttttagaagtgaagttttgcagaaacaacagaattgagtgagaggatcccatacaacacgtgcaaaaatctgaaggcctagcaccttatagagaaatgctgtatgtcagtgtgtcaggagggcaggatgcatgtgaagtatcaatgcaagacggtgcttcagagataggcaagagtcaactactttatcagtaaacttcaacatgaggagagggtgaaaaaggacatctcggttgtatatagaaacaaaaaccaatcagaaaaaagggagttcttaatgtctggctcaaactctccagtttgacattatcatctcatttgctcttatttccatgtttctgccattatgataacttcttattcaatggctttatttgcaagtggaagagacagcttattgtgtgtcatgacttgagagatgctgaggaaaataccctttccaaacaaacaaaagcaattcctgcaacaatttccaaaatttctttttttgaatgtgtgctttttggagttcaagaagttagtgtccaggaatgctctttaaaatgggaatattccttggctcaatgtttcttaatccttcagtgcatggttttgctgatcttcagcaacctaacagggttctgggtggtggaatcactgaactgtgatgaagagcaagactaaagctacagatttagaatgtggaattctacctgctggtggatggaggacaaaaaagcatatataaataaaataatatatgaaataccaactatataccaggagctttacatataacatgtaaggcaggggtctattgagtaaaaattaagattcaggtaaatcaagaaggggacatatccaatttcctgcacctcctcacctttgagaggactcggaaaaaaaaaatcatgcagtaatcaagtcacccacagttagtcagaaacagccagtcagtaaagagttcagtaaaagaaactcaaaacttttcataattggagtttgtggttagggataatggaagccagatgacagaaaggaaaaaacaggcccctgaaagaaagttaaaaaaaaaaaaaaagtcaccatgtcttaatatgacctctgacagaatgggctagactctgcaccttgacccatgtatccagagaaatcaggaaaggatcccgtgtaaggctgcatttgaatccgtgctcacacagtgcattttctatacactaggaaggagaggtccaggccctgaggcaaagctgactgactgcatcactagggcctttctttcaaactattctgtgttatcaccggctagagcactctgtccaggaaaaacatttccctagaagttggagggagagcacagggagtcaagctatagaagacagaggatcttagcttagtggtgaaacaggatctcaaatccaaggttaaatctatgtgcccacttgggtagcctaacaaggacctttagtagtggcattaaagccctagttatgaatgaatccttcttctttttgcccttaaaacatttctatagagatgcaggaataggagagcaccatggtttggctaactggaccataaaggaaaatgatctattgaattgtcaggaaactataaaggtgaccttactagggtgtaggtgactctggattatacaaataccgtttaactctcctaacaattgaacgaagtagggatcattatctggaattggtagacttgatgcggaaatcaggcttagtaaagttaaataacttacacttacagagccagatggtgataaaattggggaatatacccttgtctgtttgatagcaaagctattgtattattccaacagagtcctaccgtctatttattgaataacaagctgccaaaattggacttcaagatagattaggaaaagaaagggtagcagttaattaaagacaattttatcttgatctgtccctagctggaaccatttccttcatgaaagtaaacatgccaaatttaagctgtcagctgtcagaggtagaaaaaataaatagattctttccttctggctggcttcaagtgttgataggtaatgtacactgagaacccattcgtattctgtaggtgagtccacttttgcttggaaaattctaatgactagataaggaagcccttttctctatgtcagtatacctatacaaatgctcattaacatagaatacttgttattttattatcaagtgaacatatctgaaactttgacactaaattttagctaaaggcacaatatcctttaatgttatattgctaatgatttgatccctagcaaaagaaacttttgcaagagggagttacagcattttgcttccaattataagatgaacagagaacaaattcgatatttgaaaacccaaaggaaagaaaattccatatcttttctccaaaagttaaaataatctgagtttaaaagaccataattatttagggtttgatttcttgagttaacatgttactatatttattttagagaaatgtgaaatctggaggcaaacttgttttgtcgggatggtctaaaccagtttttattctgatttttgtcattgtgtttgtttttgacaaggacaagctaattactgagaaaaaaaaatcaggtcttctaattcttaaactttaataaatatttctaaagcaaattttaatgacactttgtaaagtgattatccacctttatttgtttttggtaagagaaaacatgttaaaaatagtctaaaatcccatctttccaactttagaactcaatcaaaaacatcagcactgtgggaagaccagatgtctcccttggaaagcaaaccagtatataacaaggggtccagtctttctatgttttaaaacagaaatttttgaaaaaaaaagtagccctctataaaactttcaagcaatttcaaaaactgtatatttaaccaaacctttcagctttttgccaacttcctgcatgttgatggcagttggctgccagagaccagccttctgctttcaggttacagaatggataatcaaagttgtgaatgtgttaacggagaaggtgaattaactccaaataagcttctaaaatttttaaatgcaaaggaagtcacagtgatgtgaattgcatataaatgtaattaatttgtacatgaagagaagatttttagtgtgctattagcttcataacagcctaatatgtaagaagccaatcactagcaagcttgccagaagtatgacacactgcttgtcaggtttctttaaagatttaatggatgctgttttccagaatgttttgattaacccttctattgcatatttgtaattagtgtaaaaattaatgttaaattggaaaactttattgggttacaaataatatagcaggatgtgaataatcctggtttattgcaaccagaaacttaaaacatgcaaggatggttgattcgtttttctagcaatagaaatcatgttctcattcatttttttattgttgatgttagtatttagacaggaaaagagagaagggaaagaaaacaaatacttcaaacaattttcataatgaaaatttctcccctgctttcagaacataatgtcagcattgccaattttaggcattttttctgttctgttttttctattcagttatttgaggcaactcatttgttgaaatactgtaaatatgcagttttttttcttttttttttctttttttttttcatgagaggataaagagaaagaggaggagaccatttctccccaaagcctaaagtgtcttttctactttgatggtttgaatttgggatataccttgccaaaactagcctgagaaaggtgaataactagagaaataagattaggcttttcatattgaaatagctttgcaagtttgataaattatttttaacaacccttttaataaagaaaatgaatatagcattacagtcatcataacttagtggtgctgagattcacatttattaattcttttcttttattcatcattacatgaatacaataattaataatgaattctttctcaaagtaacttggcttgcattaaatattgtaaaatcagacaggcatttcattttaaaaacagggtgcttcctgccccattcaaaatgaattatgtatactgccaataaaagtagagtaagttgaaactatcaactggtaatagaacaggatccatagggcttcagagaaaactgtctgccatttaatcatcttatttttttcggtctgaaaatgcccggaatgttatgaagctgttgctagtgtcagttttccaagggcttgttagcttcctatataatttgaaaaacacaattttccgtgttaatccttattgaatgtgcctacatatagctaattgtacatttttgaaccgagtggtctgcactaaatatatataggcaccaaatatatataaatatatagtatgtagtattaaatatgcagtacatatatactatatagttatatatagtaaataactaataaatatatagtttacatagtactaaatatatagagtatatataattatagtactaaatatataatatctataatactaaatatataatatctataatactaaatatatagtatctataatactaaatatatagtatttgttgcagaccactgccataaattgcaggttgaaaaatgtacaattagctgtaggtaggcatattctacaagaaaacttaacatagacaactgtggggttttttgttttttttgagatggagtcttgctctgtcgcccagactggagtgcagtggcacgatcatggctcactacagccttcaccttctcttcccgggttccagtgattctcctgcctcagcctcctgagtagctgggattaccggcaccttctaccacgcccagctaattttcatatttttagtaaagacggggttttggcatgttggccaggctggtcttgaactcctgaccccgggtgatccacccccctcagcctcccaaagtgctaggattacaggtgtgagccactgtgcctggctgacaattgtgttttcaaataatatagaaatatatattttctataatagcaatttcaaaaatacatgaatatatatgttgtatatgttatatatattacatatgtagtatatattgtattttatattttatgtatatattatctcatttgtttcacatctaccttctctttctctactctagccttgttacctttgtcataacaatggtcattttacacctcaggtcattctctccttgtgttcccatctttggcaatgacattctaattttccttagcacccagaattaaaatcatagatctgtgtttgattagtagtttttctcagttcctcataattctgtggtcatttgcttctgtttcaccctatttcttccagttccatggcatttgtctcagttcttcattcctgtaaatttcttcctaaccttcttgtctccagcattgctgagggacaaaatttgaatcttccttctgcctcctactagccataggaccttggaacataatagctgttattaaatgagcccttattatatgccagagaagtgtgttattccctctgcatttactatttcatggagtctttgtagcaatctagcaattgttatgctatttcctttaccagcagaggaaactaagctccacaaaagtgaaggcagcataatatgtggcagggcaaggcctggaggccagccctttctacctccagagcagagcccatgttcataagaaaactcactgttttcattaagcctcaatattctcatctgcaaatggtaacttaaagactgtcaggggcctagcaaagtgccggattgtgggagtacacggtagccattcttagactgtatgtctgtttggggttagtttgtacatctaccctcgttcttccattccaccctgcctgcatttcattactctgccatggctatctattgttgccatcgcagccacattcccgaagttcagttttaatctactttaggtggtcctgctcattctgctgaaatctcactcagggtcattgcttctggttgtgcagagggggctggcagagggaatgaataacagctgcatcttaagtcacactccctgaaatagagctatgtccactgaaagggtggttggcttttctgtttggtaaaaaggcactgttctcttcccaatccccagcccaaaagactgtaggtcccttgtaggaagtgcatttttctaatttgcacaaaattacccattggcccagccagactcttgtctcacagtgaatgtatattgacaactattgtgcattaggcatttgatatattgcattaaacaattatatgctaacactttgcagaggaccttgcatatggtaagtgttcagtaaatttttatggaatcacgttgattcatattgcccatggccaaggcctagaacctttcaatgacatgttacatgtccatacagagagttataaaacctgtttgtagttttgttggcataaatatgcatgatagcctttgatatgctctctaatcatctgaatttttaataactaaaacgtttatcacttgctttcaacagaaaggtgttgtaaggacttgtgaattaaaatctataagcatgttcacatcctcattagagagtggaacaaaagtacaaagacatgatcatttctctaagtgtcaagataaattcaaagagagatcgcattgcctcctgacgaagaatgtactggaagaacatctgttccctgccacccactacatctctcttctttctgctcagcctggaaattgcaaagtggctacgttctctgaaagggccagatttggtgaaagttatatagcaaagcagaactcttcagccgcacaattgacgctcactttttataggactcttgattgaactcaggtagtttagggaggtttcagtgagtacctgtctgaaggttatttcatgttgtgacacttatacatggctatgcaaattttaaaaatctgacaggcctcaatgaattatgtgatatgtataaatctcccatactagatagattttaaattgatggtatcacaccaagcagtgaaataaaagggctagcagcacttatccttataggctaatagctgcaaatgattttatgaatcattagtttagagatgtgtccctacccatttttaaaacccagtgtagattaacatattttgtctgtgacaggatgttaattttagagaaaagaggccatctgatgaagtaaaactctcccaattttgtgccactggatttttgatattgcaattaacatgattatgactaattagaattcttgactgttaaagaaggaagattgatagtttaatagatcaatactggttacttaatgtcccgagatagactccttttggcacatgacacactcaatatataattaaattttaaaaaatctttttaaagtggttcctacttgtgatattttactaaagcataagaacgtagaaattaagcaaaactggaggccatccttttggctaaggttaagtaattattttccttttttagttgaattaatgttctcttccttttggcagacacagttgggtaagtgttcaaagtgttttgtactgatttcatggtgcaaatcccattaaaataaacataagctgcatgggtaaattagagcatgccgctttgaaaatgtaccccacaattttcagcatattaaactgtcagaagctgataaaatcaggcttacattcctaatttttgagtatgtttggaatgcatttacatacttttcatctgaagttggtatgaaatttaaatggtattaccattggattatggacacgcctgcagtataggaaaccaatgcatattttagatatattcctgaaaacatcaacatttaataaacggagacttgtaaataggttgcagtatgtctccaatgaactttgctgtatttcaagagaaagaatctgaattcatttcaccatttttgtctccattaatgtgcgtggcaggttatccttacctttctttgcgttttcaagtgtgtttttgcaatcagtccattgagtagcatgttcaacaattaacaaataattactaagcaggaactatgaagcaaagcaatgtgctggccttctttcctatacttcacgagactttattggatgctttaatgctcagtaaatatttactactttgcatttttcttttcaactagagaattgctaacaaccaggcaatagccccaatgcacaatgaagatatggagctgtgtttaagcagatgtatctaccagagacagtaggtagaataaaaaccatggcttttggaactgtattagtccattctcatgctgctgataaagacataccccagactgggtaatttataaagaaaaagaggtttaatggacttgcagttccacggggttggggaggcctcacaatcatggtggaaggcgaaaagcacatattacaggtaggcaggcaagagagaacaagagccaagcaaaaggggaaaccctttataaaaccatcagatttcatgaaacttactaactaccatgagaacagtatgggggaaaccacccctgtgattcacttatttttcactgggtccctcccacaacatatgggaattatgggagctacaattcaacatgagatttgggtggggacacagccaaaccatatcaggagctaaacaaaatttagcttcagttctcattttctctctcaatatttgggtgatctgggctcttgacactttttctgccttagttttctctatgtagaacaggcataatagtagaattatgacaaaatggtcttccaacaattaaatgaatacatatagagtgtagagattaaaactgtttctggcaaaaagtaagcattatgactgtgtttagatactattgttaacactatcaaagagctggtttgggacacagaccctaattttaattctcttctccctgtattagctttggcatattactctaacacactgagtctgatctgtagtcatcttattcttagtatgctgatttcatcatcctcatgatatttgtatagttctttgaaatttgcaaaatgtactcttctaaatgttaacagtaatcaccacttcactattgttgtaagaaatgattgtaattatgtataaattatttaggaccactttggcccagtgtggctcaattacatgagaccagataataggatttccccaggccactttagtaggtgcctcatatcatggcccagagtgtaactgaaattatgaaagcaaggaagtccattcaatggtgagccaacagagctagcagtgccttggcatcaacgctgccatgagtttgtgccttcattacacaaatgtcctcttcttggagccacgttattatacaatatgtgtccttaaggccttcaattaacatataaccttaagttcatagttttaagttcttaaatatgtttgtatgtttattgttatcatcttatactttgatttttataagtatatatcacatatattatatagtatatataataaatgtgtatatatatttctatatgtatatagtataaatatatgcatataaaatttgcaaacttttataaccttattctagaatttcacactggcataaaatggacacaaggtcgacggttttaattaccaaattagggagtttgtatcattgaccttaagcactaggtaattttaagtgaaattagaaaataaacaaatattacagttgatacaaatagtacatgtgtgcaaagcatagaattggttttcatatgatttctaatgataatcaactaagaattctacattaaatcaggagtttcttgctttaatttaatgagaaaaaaagtattcatattctacataaactttctcatcatatagttaaaaagaaaaaagtaatgaaattaaatagaaaggtatggcttaacctattaacaaactctacttttaattgtatgtggctttatccttaaagccacttttaaatctttatttctttaacaaaattcaataaaattaaacaagccattgcggtcttttgtaatatatttttcaaatcttcaaacttttatgtacttatttaatttacattgctcctaatatgggagaaataatgggttatttaataattacatattattataaggtatttatagaaataatttctgtaaactgtcaaccaaaattaaaattctaagccttccaagcaactgatggacccccactctcagccaagagcattccaaaatgaacccaaaaatctagttcaggccatgatggggaggggagggtcggacatgcctccttatactctcctcccattggaattcagccacagctgaccagaatttagattaaaacggagatctaaagactgatgaagcagattttttgttgcaataagacatcgaattccatcctgactctaggctaacatcacatgacagataggaggccctgaaagaaatcacagtattttctcccaaaatatatttctttgacatgttttgaaatggccgacaaagctgtctcttctggggaatatttacattctgtagaaaatttatgttcctttccaggccattctctgatccaggaaggaattaactaacagtttgtcaactttttaggtctgataagagctctgaagcctgctacctggaggcttcatctgtatgataaaacgttggtctccataaccccctatcttaacccagacatttctttctattgattccaggtcttcagtctttgaatctgcctatgacctggaaggtcctctcctacgaccttcaggttgtcccacctttcagaccgaatctatgtatattttatgtgtattgattgtcttatattcccctaaaatgtgtaaaaccaacctatagcctgaccactatggacacatgttgtcaggacctcctgaggctatgtcatagacacgtccattaccttggcaaaataaacctctaaattgattgagacttgtctaagatactttttggtttaaaaatatatattctttttaaaaataacctttttgcctcttttaagattcttaatcaaccggagaacttaaattgataatgattttagaaatatataatagattaaaataacattagaagtacggtatcactagagcacatgcctctaacccaaattttgtctggtaatagcatatggtcctcacagacattttttgtttgtttgtttgttttttctctttttttcaaagtagagagagagagaatctgggtgtgttagaggagtattaaaaatgaataccaagttaaacatacaattatagaaatctactaagattttataattcagatagttttaaatttagtctcttttaaccggacctctgagctctaggtgaagcccacactaaatcctgggtttccaaacagagatagatgtcatgagactaagccatgtagtgcttttacagtgcaccttgctgcagagatttctctatatgtttaaactgcaccctttttttactttaatacgtaacagtagcccctgtagtaataactattttattcaaaagaaatcaggtaatgcgatacaaaagcaagcagttgaagatctgagaggaacttgtctgtttacactcttgagtttccataaggaaaaacagagtttcctccaaaaaagggtctgtaactgtctctgttttctttaagaaatccctggcaattagaaattattttaggtcccttatgcagcacagggtggcaagagaaaggagagacaggcagaagtacgtggagaaaacagaactcagtcaactgagaagaataaagtactcttttcttaacaagatcctaagagagaaaaaaaaagcataaaggctatatatatatatatatatatgggctgggtgcagtggctcaagcctataatcccagcactttgggaggttgagatgggagaattgcttgagcccaggagttcgaggctgcagtgaaccaagattgagccaccacactccagtctgggcaacagagcaataccctgtgtcaagaaaataaaaataaaaatgtgttctacagtgtgtgtgtgtgtgtgtgtgtgtgtatatacacacacacacacacacacacacatatatacatttatatatatatatgtacacacacacacatcttggatattacattttaattaagctgattttaaccattgagctctttaacaaaatcctgttaaatctcttactaccatattttagcaggaacaaactgctgatatttgaaacgtaacacaaatatcaaaccagaaaggtcttgatttagaaattaaacccaggctgttgtggtgaaaaaagtgcaaaatcttagctactgaactagtgtcaggtgtctgccattgccctttcagtttggcctcgcgggcatttgaagtttcatttgatttcaacaagcactcatactcagttttctaagcccacttggttcttgaccctggtctgtgcactctcaggcagtgacagatctgcagagtgatgctctgggcatcactgtctcccacttctacaggtgataaactctaagaaacctatacaatttgatacattgaatacaagctggccactgccctcaagaaaaacaattatttatgagtcaagatagcaaagagctgaagggttggattcacttgtgatttacttttctctctctgacattttactaaatagtaatttatttttcaaatgcgtatataaaaaccccaaaggaattcactatttgagcgaatccttggagggactattttttcttactttgtgtcactagtttgtagggggggggaaagaaaaaatttaaatacaggaaatattttaaaattttaaataaaggtaaattccacatggtcgagctgagaattgagaactgctatgtcatagttcttccttgtttctttttagccagacaatccagcatcatatcctgtgcagatgggaataatgtaactgaaaataaaggctctcaatggctacagtttattgagcatttcttatgtccctattggttttcccacgttatctcatttaacctcagtactaccttgcaaagtaaaaactattaacatctttgactgatgtggtaactgagatctgtagaggttcaatgatattaggggaggtcaggatgacatgatgaaattatcacacaaactaagcaacaagtaagagtcagtgttgattcattcacacctatgtcattcggctacttttaggtcttagagatttgagataggtaataaagctattttaaagtaacaatcacttataacgttttttttttttttttttgagtctcgctctgttgccaggctggagtgcagtgtcattatctcagctcactgcaacatctgcctcccgggttcgggactgcaggcgcccgccaccatgccaagctaatttttgtattttgagtagagacagactttcatcatgttggccaggatggtcttgatctcttgacctcatgatctgcccgccttggccttcaaaagtgctgggattacaggcgtgagccaccgcttcctgcctacttataacttcttaatgggtataagatcattagtatcctttttcttccctcttttccacaaaactgaagcttttttaaaacccacattgtatgcatttttgtgaatttccccaacagaaaatttcaatgttttcttttaatttcacttaattatcttccacagaataaaagtcttaaacaattctaacattttatatttacgtttcttgaaagttttcaccaataaaagctaaaatcccataggatattatttcctctctcacaagatgaagctttctaatggatagggattttatgacaagtacatgaaactatgggagcatttatttgtattattgtttttcctgactagtgtaggcagagtaatggcctcctgaaaatgcccatgttctcatcactagagcctgtgagtatgtgaattaaaaggtaaaagggaattaagatagcagatggaattagtgtgccaatcagctgaccttaaaatagggagatgattatccaggtgggcccaatgtaatcacaggggccgctaaaagagggaggcggaagagtcagagtcagaagcagatgagctaaggcaggggtaagagtgatattcagtgagaaggactcaggtagccattctttgtgtcaaagatggaggaaggggccataagaaaacagaagttggcagctagtagaatttggaaaaggcaaggaaacattttcccgtaggaggaactagcactgcagacaccttgatttttggccaaccgagacttgtgtcagacttctgatctacctgtactgtaagtaaataaattcgtgttgcttgaatgcactaagtttatggcaatttttaaatagcagcaatagaaaactaatatgctattattattatataaattattattttcattatgttcctcccacttttaaaattctaaggattttcaaacataaggattcctagttttgtcctcactttgttacaaatgggatatgtgactctgacacaaggggttgcctcagtgctatatatgtgctaataccccttcagctttcataccgctcacaggtaggagcgtgaaaaaggcagctgtaggatattaggaaagcataatctcaatctttatgtctgggagctacttctttcagtactaggcataagatggtaaagataagaaggtctaaaatgtaaggtggacagaactatagaagagatagataaaagtaatattattttatatatgggcaattaattgtactagcttataatgtcctgctgtagggcaacagagacaagtgccaaggtttctttcatgatatccttacatttacctcccatttaaaatgttttcttcccggttttctttagtctcttgcactcaccattcctttccaatagagagatagagatagatatacatacatgtaaatacacaacatgcacacatgtatactcacacagtataaatacacatatatacgtatatatttaatataagatctagaaataatgcatgaaaatattttgtgtgattcactgattctctaagctcattttcatagtctacaaagcacgatcgactttcgtgaatttccaaaagaaaccatcattgtgttcataaagagaaaggatttatttccctctattatgaaataatttttattatgagatgaatcattcagaatgcacctaaggccattaacaaaatcagcctgttgttgccagctggccactattacattaacagctcaactacctggagggtacttagcaaacaactacaactctctggaaaatagaagaaaacggagaacagacaaaagtgatctctgaacaggcacattcaagcatgttgctcatgaagagaactctcaaagactgccactcagggttccatttagatttccttcttgtaaaataaagaaattttgggtgttttggatcttgacttataacaaatcagttgtcaaagtcaagagcagtaaggatactattaaatgggaaaacatgacaattagatgaagtaattgttgataaggtagaagatgaggacaaagaaaaaaaacataaaccttaaaagtatagcagtgtggatacaagagcatttggtcaagcttcgttctgtatctcaaaattatgaaaggcaatgtgaacattgccattttaaagttaaccttgagtcatcaaaaaaagttaaattatattcagttgcctttgttacagaaggcaaggaaatataaactgattttaggaagaccttcacctataggactgacatttagtgtgtaactttataatggtccagtcactgccaaagacactttgtagactttatctcaatgaatcaatggttagaaaaggaaataaagaaaataggataataaaataaatccattctgaatcctgtctattggctatcagctccatgtgatatcagcttcagactgatctgaacctggaaaaggcatttcccagatttcttttccgagtttcctgataggcattaccaatgggagccgatgctagaagattggaaggtggaggggaaaaatttcctgctcctagtggagcccccagcagcagcagatgattacaagcaatgggagatggtgataggcctcagtgaggtggtttgaatatcctcatagtgaatgaagactcctggattgtatccagaggtcaccattgtttccaggagtcttgaggcaagggggctcctataattagcagtttagcaacagatactggcttgtggtcctcgagcaatagcagattcctggtctttgggtaactgatcctttctaaacacttgctacccctgctctctccctttctcttcactctttcatcttttccaacagaaatgcaagcaatcccctgtaccagaactctttcagcttggttttttaccatggatttattttcctggcatgactccaatggattttttaaaactagaatgaaaatactattttgattaaaaaggcaaatttaatttgcctggaaaattcagccacccagcaatgcctgtcaagtaaaacatacggtttgatctcagtgttggtacttgctgaaattacagtgatttaggatatagtcagcaaaaattctgtttagcaattaaaacaactttatagtctttagagatctatggagccctgagcactgactccagtcatttcatagtgtgtcctggaggaaaatgaagagaaggtaggcatagctaaaatatcatgccagaatcctgacacagagtgaattaatagcttcaacccaactaggacaccatccacaatcaacattaatttcccacaccgggcagaatgcaggttttcaatgagaaaggtctatgaccaaatggcacaagttcatatgtgacacacacagatgtttcttaatcatggtgttttcttccagtctttatatgtatttttctgtaacaagttgagacactaaattacagaaatgcggagtaaaattttacttaagaagccactgtactcatttttcctaagtagacattttcctgtgtggtaaaaaagtcaggcctttgggaaaaccatctattccaattaatgggggcaatgtggggcattaatgcacagaattgatgcttatataattgctttcctcttcattaagttctcatctttcccatccactcagtccatggtcccattcaaaatattcccttaaaatcatccattatgagaggctaaatctattaaaagaaatgcgtagatatgctcccagttctctgtatctgtgggctccacacctgtggaatcaaccaactgtgattaaaaatatttggggaataaatgattaaaaaatacaaatgaaaacaatacagtataatgactatatacattacattgtatttggtattatactagagattaaagtatatagagggatgcgctgtgggctgtatgcaaatatatcagggataggttatataaaaatatacgagggacttgagcatccacagatttttgatatccaagggagtcctggagccagtcccacaggaataccagggatattgatgaatgactatagagtgtcactcttctattgcatgtgcaatagggagtttttcttcattttcctagaaatagtactcaaaatttgggatgagcagtgtaaaaaccaagtaatagggacaagtgtttgttgaatgactaacatgtacatagaagcaaggtaatgttgaaaactacaggctttgcagtcaatcagcctgagtttgaatcttccctgattcctcctccttatgtaagtttagtcatgtgaaataaaaactaagtctgtttcctctaaaagaggagcggaatatttattgagattgatttttaaggctgatgtatacaggctactgagcactgtgtccttaaataaggagtgcaattttatattacatgtaaaatagttacttatatatgtgcagttatgtgtgtgtgtgcgtatgaggttgaaatatctgaacttgcttacattgaactattttgacctataaaaatgttttcctccgttaaggaaattttaatttcttatgaaaggattggcacagggcacaatatttttgccaattattgataattacaaaacgtggaattttctatgttaagggtgatcacaatatgctggacataagtgtgaatgacataatagttgttggagaaatttagaagagattttccactgaaagaccaagtaagcatcaaaagaatgatggttgcttaggaaagtttagagaacaaatgtttgtgttacaaatacatttacataatgaccaaaagatctataaacataatatcacagtaaaagatttcatgtgtaactaagtgtttaaggaagatgaagttaacctcaccatattaattgaatacaaatgaacaaataatttgtagccttcagtatgatatgatgaaccatctagaatatttactctgaaaaagtgcaaaatgaaaaacgggtagggacctatgtaccagttacccgaagaaccactgaatcttcaagtgatgttggaaaggtagctttgggagatcttaattgactggcttagctttaagtacaattacactgattacagaaaattacagctatcttagtctaaaatgtgctattattaaaagaaattttggttaaatattatgtgagtctaacagaatgacagtcagcttagtataacagcaagtcagctacttaaaaatatcaaatatgtgtgtgcatatagatacacacatacaccactcttaaatattgtatgcattaaaaatcatggcttttttatttgttggtaattatagttgttgtcttaaccataaacatgtaactccagccacattgtttggaatagcctagctctacctgtgcatagacaagaatggtctaagagtaaagtttagcttggtgggtttaaacactaagacagctgctttctttatatgttgtaaaaaaacttgtcaattcctttgcactaaaaataaaaactttagagacaagtaataaactagcaaaggaaatttaattttcaatttgagcaagattactgctataaattaaaattttaaaaatggatagctgatttaattccaatgtagagatgcttcatatcataaatgattaatatttttaaattttaaagtatttaacattcatttttagagtattttagtttctggtcagtttattgtcttgaagtacttctttacaagtaggctatatgttgtttatctgattatagactttattcagccttctaattgctgaaatgtagctgggcaaatttgtttcacgtcagttggtaaaagattatcagatgctatctgtattttaggataaagcttgaaaacatgttgaaactgaaatctttagtgctttgagaaacactggatagtcacagtttttaaagaatcatagaatttcagtgtgtaagagaaattgtagacatctaatcaatagtgtgtattccatatgtaaagctaaagaagataaaatggcttatgaactataaattggttattagcatgagatgtctactaaaactaatgccgtatgaagaccgtattggtctgttctcatgctgctatgaagaaatacctgagactgggtaatttataaagaaaataggtttaattgactcatagttttaattgacttacacttccccatggctggggaggcctcaggaaacttaaaatcctagcaaagtcacctcttcacagggcagcaagagagaaagtgctgagtgaaaggggaagccattataaaaccatcagatctcgtgagaactcactaccacaagaacagaatggaggaaaccacgcccatgattcagttttctctacctggtcccactctcacacagggtgattattagaattcaaggtgtgatttgggtggccaaccataccaaaccataccaaacagtgccaaaccataccaaagatcaaatagcttaaaagaatataaaatagaaaaactgacatatatataaaaatgtaatattaaaaataaactttcttccagatctgtatcttagtgatttcaatattttatttttttgtttttctttgttttcttgtgaatgatgacccttgactttctttttttctctgatattgaattatgactaatttttaaagtcatcagaggaagaaatcatggagcttattaaaatgagaataacatacagttattgcttttctagaaaaaactttaaacaagtgtctttcatgcaaatcattaccatttctaaattactcattatatgacagtggtagaaaacagataataaaattaaaaagccaagttttctgtttttgttgttgttacatttttagccatatacaaaatgttcaagagggcgttcaaaaacaaaagagaatgcaagatgctttgatatactggagtggataaagaagtttcacaaatcataatgaaaatttatcattttaaagtaaattagtttggtattactgataggtgaaattcttaacacatctattttatacacatctctttaaggattctagtagaaatatgcatgcagtaggcacttatttatgttggataattacaaagctgttatattagtaatgatatgagaaaatgctctaaagtgggaaatgagagtctcagaatttaagagagctcatttgtgatggagttattttaagagattattttatgttaatatacctaggtaaaattatatgattataatcagagaaaactgagctgttttaaccatgcagcatcaactaaggagcaccactgcaaatatcttcagatctatggaagatgagtgttttcttgggagataagtgaaagtagttttgaaataaactcttaccaaaagatggaatgattcactgtgaacatgggaaaactctggcaaaatgggaacataacccataaccaattacatacatattttaaattagaactactttgaccatttctacaaacttcaatattgccactggataatgtacataaggatgattaagaaatgttactcataaatataaataagtgggctcacttttataatatgtatattttaacattttatgagccaacagtctctgctaaatataagttgccaactactgcttgaatctattctacaaccaaggacctcagtgatttaataaagagaataaagagaacacacaagaaaccagtaattcatttaaaagcagagcaaaacttcttagatatggtctgatttatttttttaattcaccttacattttaagacttcattgtccttcatttgtaacagcagggtttgaccagtattttcattatatatcatgcctgataccaagttcttaatagttttatttcagtgggagggtctgtgagttgattttcagaatgagttattgattctatacccttaagcattttttagacatagaaataattgatcaatgacattgatctgatttactctagggcagatgatcaacaaggaaatgaaagttaagggatcaaaactgataataatcctttgcatacgccacttatataaactgactatttgactatgaaatcattgctttacagacaaattgtttttctgtttactaagattagaagggtctaaaggaaaggcactatgtttattttgcctgaaaatactggtagtgctaatcatacattaacagtgaaataagaaataatatgcataaatcaaatgtcatgtagaaacaataaaaaatgtaaagtattatttttgaaaagctttataaaattgtagaaaaataaatctcatataaaaacatccatttgatttgtggtaggtatattaaaataaaaagaaatccctgctggctgaattcattccctcccaaaccctaagctctacagacacaaagagagaaaaagaaaaaagaaagaaaaaaaaaaaaaacagcttaaatcagcatcccaaccggttttctgtaaggttaattaattgttgctaattgcactgtgtcgcagccagagacagaagcactgtcagagataatgcagtgggaaggaacagggataaaggagaaacatttatgaaatttgcacttatagaaggtactctctacttcagtgagcttaagatgcaaaaaaggtaacaccacattaggagaacacagacatcctgaaactagatgtaattgagtatttttttaaactcctgaataattacatacatatcaattagccaagtgaaaacttggcaattctttgtttacttgatccgtgtaatagtcaaattctataattcagtctcccaaattcattttgaagataatagatacagtcaaaccaaaatgtattatctttcagctctaatagatgtttcatgctggagataaaggtaaagatgaaaaataacattgataaaagtgaattatgtgcctggtattgttctaaaggagctataactcatgaagtaattaatactgttatccgcatttttataggtaaagaaatagaaagacaaagggttaaatacttaccaaggtcatagataataagtggtacaacacaggcttgaagcactataccatgctgtaacggcaactttattttatgcctctcataaatagatattggaagagatgcttgtattgttgtgaagatcagctataattttgacaaactcatagtggatttccagtttgaccaatgtgatcattcaggagaattttgtagaactagatgcagaaagaactcacgtttccattccattcctatttacatcttcatcagttaagagattgtattggtctggaaagggtcaacatacgtcaccatttagaaatatctgttaactctaacaaggcagaggaaacaacttgatttttaaatttctgtgcataatctaagatcaaaatatatgttagaagtcaagagattcacaaatctatgatattttatgtaaatattcaaatagaggtaattataaactaaagaaaaatgagggtaaatataaagaaaaaaaatagcctggcagactggctaactgttcttgtctctgatactcagaaactcttgaaacccataccttagaatacatggcaagttgacagatgaaactgtatttacattggccattcagatatgagttataggtatttcttagtcatttgtatgtatgtataaaatgtaaataaaccaatatctacttttttaaagtttttattgtggtaaaatataacataaaatttaccatcttaactacttttagccgtacaattcagtgacgtaagtatattcatattgtacgaacacatcactatgcatttccagaaattttttataacatctacttttaaagatgaaaaaacataataagaatttagggcctcagatgtttagctcttaattttagatatgaacatttacttttccctgagaaagaagcccatattacttatgtctacataatctccatcattctctaatattcttaatatgtgatcatttattctttacacacaagaaatgaaatatctacttagtttttctgttttcataattgtaaaatattcctggaacttcatatcaaagctatattcctttcaattcagaaaaagcaattctaatttattagagttgcaaatcattttggggattcattgaggtgaaacatatttgctatacagaataatatgttctgtattttagacaatttcaaactgaagcttaattgcttcaatctgtagagctaaaaaatattggcagcatctaatgaattgaatgataatgacaaaatgttacacaggtaaatacatcaacatagaagaactcaaaattctcatcacatttttacctctctcatctaatttatcctaaagaaaaaaaaaatgaaagaattgtgctaaagggaaaatttgtgctttttatttcattatttataacatcacgtctaactgatgtgaatatggaaaagataccccccccaaaaaaataaaaattctcgtctgtttgaaaggaatttgacattttcattgtttccttgaaattgttctttataatttgaagacaaaagtgttgaaatcatattaccattgctaaaccgaaatataaaatagtgaccctctttgatggtaatgtgctggcacaaaattgcaaagttttcaagctcctttgcatccttgaagtgaaaataggttattttccaactttccactgcctaaattcaaactactgacctgatttgctactcctctaaatattaaccttagaatgctatttcaaattcatttaactatatgctatattggcatttttaaacaaagagcattttgtttctccatcgtgaccctcaacttctttccagagtttgtaataccgttatctcagacttgaattgtattctgggcctcagagtagatgggtattcattctggttctttgttaatgtatgagtcaaaatgagaatattaagtcacatttaactggtaatttgttaatagtaaattctattttaaaatactttcccaaagagaatctggcactgattctcaagaaaacatcgatatgtatccagaacaatcaagtaagatgctttagtaagtttttgtaccatatgagatgaagttaattgctgagacctcagcaggtagcctattttggaggattttatggctacattcccctgacaatgtacttataaacccataaattaaatactggattttaatttcttgggtaaagtgtattagagtggattataagaaaataagacgatgttttaaaaattacattctcttgagtttgtgctttaagacttgtatttttataactaagaaaaccttaatgaaagacttaaaatatcagtatagcaaggtaccccaggtaggcatagtatgaatgggaaaaatctaaatctaaaaatctaatagggacacaggaaagatatgattatcaggctattgtgttggggtggtccttaatgcttttttcctcaatcataccttctatatatatttattttgagcctgaattacaatactcatttgccaacatagtataattcacctttctatcttgagctggtctcttcaaaatcctgtttctgtcaaactcttaaacacatacctttcatcaattttcctggtactctcaaactttattctttttttttccccctttcccaaatttttattcatgtcattgttggttgtataactcctagtaatgctaaatgacgagtttatgggtgcagcataccaagatggcacatgtatacacatgtaacaaacctgcacgttgtgcacatgtaccctaaaacttaaagtataatttaaaaaaaactcagatattactctttcagcaagcctctctttgtcaatctgtcacctgccactccagcaggctggactaaatgggctttttatttatttatttatttttgagatggagttttgctcttgtcgcccagagtggagtgcaatggtacgatcttggttcactgcaacctccacctccagggttcaagcgattctcctgcctcagcttcctgagtagctgggattataggcacctgccactatgcccggctaatttttgtatttttagtagagacagggtttcatcatgttggccaggccggtgtcgaactcctgacctcaggtgatctgcccgtcttggtctggcaaagtgctgggattgcaggcgtgagccaccacgcccagcctaaatgggttttttcatcatcttttttattgccattgtcacattgtgtatattcaataggtttccccatccccacctgcccccaatatctgactatgaatttcaacaagcatgtttgaaacttttatagattttcactgttaaaaatgtactatttttgaaaagaaagatgcctggagaggatgacttattttatttatccattcattgtagtaactacttctactttatgccactaaggcaccaaactccaaaataggtagaataaattgtgttatgataggttcatcctttctcaataagagataggggctcagtaaaaaaaaatatagttttataatcaattgtgttgtctgccattggcataaaagagaggtgaaatgcatagggttttgccctgatggaacagtcaaattaaatcatgtattggggattaaaaatagtaacgacaacaggaataagacatcaatgcttgggagtgagagtctgtagcggggaccaatttgtgtgtgtgagtagcagagaaaggggaaagggtaatgacaaagtatctatagaaaaatacgtcccaaatttttttctgaagtgagatattttttctacttctgtccattatttttactataccatgcctcaagtattatctcaacccaaaacatctcctgtggttctcctgtgatttacaaaatgttctacattattttgctgcagaaaatcattgtcttttctctttcctgttctagaacactatttagtgtttttatattttttctcttcaaactggctacattttttcttaaatgtgaatgaaattagtcataacatcagctctctgaacatataatcttgttgaaatgtgacagaaatgcaaatgaaatgtaaagcttgtttagcataaaagaaaatggatgctccttttcaaatactacattgttctaaatataaactttattcatacaacttttcaggccacattttgaagtcacgctgtcttatacatagaaatgactttattttcaggcaaacaggatcctgttatgtgaataactaaggtgagacagtgcaagttcttatgattgttcaaacaatttaatgcaaattttaggttaaagtacaagtgttttccttttcttagattacaaatacataatacttcaatatttcccactgaattcattctgtaaaaagatcataatagccgagttgttcacagagatagagcaaaattagttgtggttttagcgttcaaatataattaagaatgaatatatttcacagtgggcagtggtatttgcactgtagggcttatatcatctgaagtcactctaaagtgtctcctaaagacttcctcctccaggaaaaaatctctaatgctttacttttatcatgaagccttcaagctctgtattgtgtttgttgtggctccatatagatctgcataatacatgttttaaactaatctttggcaactaaaaatactttcttgaatgcttgttctaaattagatttccaaagaatttggaccatgggtttagatatcagtcagccattagcccactagagccttaagacattgtctccacctacccacctacggagaactgtacggattgagttagctataatctacactacaggcataggttgtggagaggttctatgttaattagggaaatgcgagttattattaaacaaaaagcaatatttaaggatctgaatccccccaaaatttttacttggtcagtgatagtctaacatgggtatttctggtgattggaaaggtgaagggctctgctccattctgtctttcaggaatctaagaaaatggaggttctgccattttcaaagacatgactttcattgtctcctgggatgaaggtggagatacccagcaaacagaagggagagcagggaagtaggggaaagacacacctcctttttaattaccttgactagaaaagaaagacaagcatctcttttgcttatatcctctgtataaggactactcacatggccacacttaaatgcaaaggaaacctagaaatccagattttggccaagaagccacttctggcactaaatctgcatcaagaaaaaagagtaaacatctatgtgatctccatgcttccatacttgttctccctactactgcccattctctgtgcagcacctagaatgttatttgaaaaatacagatcagtttatttaaatcccctgcttataatctcgaacacagaataaaatgccaactcctaatcaagactgtaagggagtgattctctggacccctcttaactctgtgatctgatatgctgtccttctctctcttgtgcctcatattttagctacacttaacttctttcagacccatttccatcccaggaattatgcaattactgtgtcttttgccttagttgatcttcctgaagatcttcacgttagacttgttatcattgaggttgcaggtccaatgcctaatcctaagagaagtttatcctgaccaccctaactaaatgagcaagctcccaaccagccattctataccatggccttgtttgattctcttactagtatctgtcagtcctatgatacatagtaccataagattgtataactgatctgggcagtagatggtctcttctcatcactcattttacaaatgaggaaactaagccccaaatacatgctgacttgcttaaggtcacgcagttgttaatggcagagctgagacccataatagatatttccaacttttattttataaaatatttggagaatgtaagatataatcaccgaatatttgcctgcataaattggtattttttttttcagagagaaggaaacctgcttcttaacagacaataggtaggatgtagcttttaaataaataccaggttcagagacaagtgaaatgtcaaagtgaacatagtcttgagttgtgctgtccaatccagtagtgtctagctatatggggccatttaaaattcaggaaaattcacagttgattcttaattaacagttacactagcagattttggttcccagtagccacatgtggcaagtaacttccacattggacagtgcagggaaatatttcaatcctctagaaaattaaatctgatagtgctgtcctattgatttgtcttatactctcatctggtttgtgatccttggttttgaatttcataattcccatttgctttctaattatttttacaaccatctttccagtttctccactgaatgtcagatacaggctttcaacaaagcagatgaggtgagatggggagaggggtaaatctctagtaaaaatgttattcataatttgtatttgtgataatatatattttgatgaaaatctgtggttttcttatatcattgtataaaataggacaataataacttaaacccacgtaattgtgcaaagcctttctaggacattttattgtagcattggggaactgcatcataaggttggtggccctctatcaggcagtcgggaactgttcatgttattccttttcacctttgttctagttgcctagtgccaaggacagatttaccagtttactgatttccaaggtaatgagtgacattcctagatctctcaagggcattgctaataactcaagagtaagcagttcagcttctgtttcttaggctttataattggtgatgctcttgtttctctcactcatactagagaaagagtaatttaggatattcaatgatttggactattgtatcaattatacaaggtgacctcaaatataaagaggttctccgtttatcattcttgttgtgaaaaacatattaatgagtgagaacagacatgacagagtaaaaaccaattacaagaactggaaaatcatgtcaaaattaatattcttctgataatgggcatgatgatcactgtcattttctaggcttggatatgcatggtttgcacttcacctgcagtttttcctcatccaatttggtaagcagttctgaggcagtgtctgaactattgcattatcctaataactatactttgcccaggcctgaaaaaataatttaaatggaatattcctgactttgtcactgaaatacaaatcaacattgtatttctcagtatgtattttaaaggggaacattgactaatggaaaaggaaacacacaagacggcaagataactgaaaagaaggttgaatgtaaatatgaagacaagtagaagggaacaagggtgcttttcttgagggagaagaacctgaaaaaatataaaataagattcttaatatgttggtgagtctaccattaaaaagtggttctacctagcctgtgtaatttcaaacatccaaatgcgacaaaatgatgacaaatacatgtagatagactttacatcaatataagtgttaaatgtttggtagtgtcatcttactacactggtttttgttcaagcactaatgaaattcctgcctgttaggaaagtttgaagtattcatatttgggagatagttttctcataaacatttctatctctttgctttcttccaattgtgatatcctataattactaattgtgaggagttgtacaatttaggtccagatttaaagaaatataaatatttaggtagaattgattattgacatctaattttattcatccttattatttcatagcaagtagatttaagaatagctacttcatggaaataattgtctttataactttatatgactctcttaggccttttccatctttttttaattctcaaaaactatagaccattggtttgccagacttacctgtttaatttcattctgttaagtcataagatggtcagttttcttatcagaaaaaaaaatgtcttattctcttcatttttttctttcacccaatttcttctgtcagaatcatgttaaacatatacacaaaacgtacatatgcacatgtattcatatcccacatcaatgctagaagaacaaatgtaaaaacaaacctatagtaatggacagttctggatcaaataagctagcattaagaaaaaaatgatgatgtttttttaatcggtgacaggagagttttacaaccattatacctatttatattccacacagtctcatctcactgggtattttgagatatacattaaatctattgcctttattaatggctctggaagcttcaagaacacctatgattaacctgccctgtattttcataccttggataaaaattttcttttgaaagcccactagaagacaatataaaatttttaaattatcgatatctctttattatttgaagaaatataagcttatttttagacaccttgttaaactctataagttattaattctacaccatacctcctcatttggtactttgagaaaaatgtaaatttttcaatatatatattcttctaccccaaaatgctgttttaatgcaaatgaaattcacatactgcttgattctccttgtacattccaatataatttactgaaaattgatgagcaaaatcacattaggttttttagtaattggcaacagtccccaatgacccaattaagcatagacgttgtgtttttcagaaatgtaattttagaagagagataaggagataagttcattcactcactatccatattacaattgcaaaatttgttcttattaatactgaaaataatcaactgagatgagaataaattaatacaggataataatataccaaaaccgcatttaaaaaattatgtggtttgcgagttgttcatatgatattgtctgtatgcaaaatgtatgctgtatttctcacaatgttacaatatggaaaagtcatacttcgtaagtagttctcttacataatatagtttattgtagatgttgcaataagaataataggaataatggatattttaagttaggcttgtatgaaccacagagaatagaaacaatgcattctgatatggcattcaagttgagaaaagactatttttcacttcacactgtacagtattctatcattctatagtaaactattctttgtttttcttgtcagcattcaagttacagttactttttgaaacatattaggatattaaacccaagatgatatttcatggtgattgtttaactaatgtccaaacccatcatcaacaacaaagtatcagaagataaacagaacagcaacactctgtttttaaaagtaatttttgaaaggtaggaatcacttttttttgagatgaagtcttgctctgtcacccaggctggagtgcagaggcatgatctcggctcactgcaacctctgtctcctgggttcaagcaattctcctgcctcagcctcccaagtggctgggattacaagcattcctggataatttttgcatttttagtagagacagggattcaccatgctggccaggctggtcttgaactcctgatctcaggtgatccacccaccttggcctcccaaagtgctgggattatagtcgtgagccaccgtgcccagtggcctttcagtataatggtttagcgatctggattatagatgctagtaaacataaatgaatatcaaagcttactggataataagatagaaataggatttaaaattttcaaatgctgttaattcctctccaaaagatcaaaaaaaagtttaaagttgatttatttctgagtttattaattatattaaggaaataatagaacttttggaaactacgtgcaactttttaccaccaagtcattcggagactccatctagacttcatgcaacattaaaataatttgaaatattccaaggttcaaaattgtttttaaaaagtgtaattataagaagatttcattcataatgttcagcatatcttccttaaattgtcttccccattttattttctattcaataatttaaaagtataacagttcttttatcttcctattttatgaactccttaaaacatttatgctaactagtacccccaggtccttgagcttctcctacacatcctccttttcaatattaacactattcccttctcactgccaatcagttccacccacctagattgccctcaattcattgctgaattaggcctgcaggtcccagacacaggatgcatactctgtatctggttggagtacaggaggtagtggtaaatggtgaatacttgggaatcactatattcttaacctaacatacatttacaatatatgctctttgtattgaggggaattgattggtcctgctaagattatctttattgtccagacaagattcatagggctgtgaccccccactaaagcagagagatcctcctagattacttatctatcaggtggccaagaagagttcttaggtttgcaaaagttcgttaattgaaatttgagtaaatgaaaggatattgatagaattcttacaaactctccatttaaaaaaagcaaaactgcaataaagaaatttatgtaatttagcattctgcaagatttttaaccaacatttaattttttttctgacacctgctgacatcttgcaaaatttgatgttctttagttttgccaaaaggtgtctcagatgataaagttgacaatcaaaaaatattcctatatgttccacctttttcacttatctgaaccaaagacagtgtaggagaaacaagaactattgagcagaaaaaaaattgtaagtcatattttgcttcttatttgataaatgaaagattttagaattttaaaatcataggagtgaattaagaatttataaaatatgctataacttttatagtccattatattagtagttagaatttttgaaatttaacatagaaagcatttcagcattcaaaaaaagccctgtacataaataacagaacaatgaatgattttatatggaatattgattgcattatatcctgactcactgagaagggaataaaaatccttcaaaaacattgacctacagaaactttacggtttccctggactaaggacttagcagttgaatgcttcagagattgtttaatgccttcaagaggcctaatacatatggcttcattcccttcattgctgaatctgcttgggataatcctgactcaccacagtttaatgcctggtcacttgcaggcatcagacacaattggtgttgatgaatagaaaaagacaaattcagccacctactccacagctttgaaaatgggtcaactaactatgttaacacattacagctgaagggtccttaagccactaaaaggagagaaaggaataaaaagaattagagtgtgccacccagtgttttctcttccttcaatccatttatacggtctgttctgtggctttgcctgggatagcgcctgctgaaaattgagaccagctgcagagttttaaaaggtaatgtcttgtctttccatgaaggaggaggctaatttaccaacagataaggacaccctcagaattatcaactaagttcatgcaaacaaagaaaaaacatgaaagcacatacactcaaacaaaactgttattcctttagaaggcaaattacattttaacagtatattaaatgttaataccagcccaaagtgtcactttggtcaaaaatttcacagcaagttaccagtatcagacacaacagttcatgtattagtcaaattcaagcagtagggtaaaatatgactagatgtatgtcaaacttctctaatttaatttggataagtggaggagtatagcacctgagcattgcagagcacatgatgcaatgtcacaatacattcacttgtatcacattataatgagatatgatgaaatataatacattatttcaaaataaaataaaaaaatggatgtgcaatataactttcactagtgggcatgtataaagagggggaaaacaaattatgagaagtctgggcaaactgtgaaagcaagtaatttgaatttatttacagctcaaatcttcactctagtgatactctgcagagctaccatcattaatagccagggcttaatatctgtcatttcaaattgctttggttggaaaattggaacagtagttgtcaggctagttgtctttttcctttgaacattattcatattgattcagattgatttattcacagaaataccaaataatgtgggaggctagtttttgaagtcaaacatttttaagttgtacttttcctgtagtttttccacataacgcgtgtttacatttacacatattacctgaataatgtattgacattcattctcaggccccaaactagtttctcctttcctaccatactaatgttcttagcaatcagaacccgtactgtttaactggtgacaaacactgaaaactcgaaaggttgtaggtctgtgacgcatactgtatttgaaattattcacagcagaaaaccttaaatcttcttgaaccaaatgtttaaccagttccttgatctctgaacatagttgaggacagtatgaggagttaaccgttctttcctatccccttgtcattcctgctacagccagtcatggaattctgagtgtctgactagtagagggtctcagatcctagacatggtggatgatttgtaatcacagcaaagaaagaaacttaacactttcctgttctgggtgtagagtttctcaaccaggtctttctaatttcagaaggaagctcctaattataaagggagaagtagctttttcctgagagactctttttcagtatcatacactgtctatgggatgggctctcaaaaacataacttggatgtaatcaattcatacttagcatatttggtacatgctagagaaggggtggaaaggcaaattcaatcatttttgagtccagaatgactgggtgagacattttgattatatccatttgcctttagagagtcattgaaggtttctgcctagaacactggtatgtaaatagttttataaagaacaaagtgagtctcaaaatattggtaagatttaggtatatgcttacaacaagtgtatcatcgaacaagtcattatctatgattttgtttataatgtttcaatatttgaaagctatattacagtatttgtctaaaaactttataaaagcattgttctctccacaatcagggatattataccgctttgctcaaattataataaatacttaattattttgtagttctgattacaagaatcaagctataagatgaaatccttgaaggaagcatcaatgtcttcatcatctttgtacccccagtgcctatcacaatgcttgaaacattgcaaggtattaacagccacagattaaatgtgaatcaatgtaacactgaagaaacagatataaaaactgcttttcttttccttctggtctcaggaaattttacttttgttttacacatacatatacatatgatatatatacatctggacaaaaatcaaatcctaaaaaatctcaaaagtacagctgcctatttcgtattactcttaattgtaaatcaataaaaagtacccaaacaaaaaagtttctagaggctaaaatttctttatttttcatttagccatgatgttgattttaatcaataaagagttattaaaatacattttatttgacttgctaggaggatttaaaaggaaaaggatactaaataagcacaatattagattcttttaacaattgttctgttcatatgtaaattcccactatagctggaaataaatttgttatttcagcagtttgtaagttaatggaatatattgataaaacactacataataatacagtttgaagtctgaagtactataagtacttgaaatgagatatttttgtcataatgaaacatttgaaattggtaaatcttagaaataattaaatattatttgatacattcattaagttattgtctatggggattcgatgtatgtattatgagtctattaatccctttagaaaaaaatacaacttgttaaaattataaaaagcattatttctatcagatttcaatgttgatactttaattcaagttgatttgagaactaaattttataaactgtaatactaaaagtgggcatcactaggattcaatttcctattaaatgttgaaaacatgtttaaaacagatgggtctaggaaacaatcgtgcttcgagataaaatgctcagaaccaacgtctaaaaaacccagcttttgtctcataggctaaatatttcacaggtgtggttaattgtaggcactttttttttttttgcacctgcattcacatgtttgtggatttagttagtcatcgttgcctaattttgaaaatacagaacttaaaaataacacctggaaattcctccttcatttcatgtggaattgaaggaaaatctccttggtatatattagaaacttcagtaatagatgttgcttttttatattaaaaaaagaagagtatgtagtataaagaactagctttgaaaatgtttctgctaatttgaattactcactaaacaatatgcatatataacatttaacaattatctgagaagttagttaaatatttgtatactcaatctaaatcaactaacatatactttaaaaaattctttaaacaaaagctgaattcaatagaacaaccatcttggtggaatcatggtgactgtcgcatgcatttaaaataaaactacttaaccactattcaataattatttgtatttggaaaataatatacatgtatttgtttacatagttgcaaacatcaagttatgcacacaaaatgatgatgttccagcattcaaaacatgaggaaaatatttttaccagctgaattgtatcaccttgataaacctgcttacttatggtgatggtatgagaatgaagagaaaatgaaaagagactagtgaagattttacacagagagaatagcacggatgatagattaggtataaaggggtgaagagtgatcagtgcctacaatttctagcctggaaaatgagcaacactgacagattgtcagtttcaaaagaactctgccaggttcaataaataaaaaaattttagaagggaaggaggaagtaaaggctggagaatgagttggaaaaatgtaaaaatttgtatttacaataataactatggctgtgtgttataccattttttactggtaacttgatgctaggttctatcaacatctttcactgatgccttatgggctctctctgcaatataaatcatcatacccactcattcacctattaatttttaatgttaccatcgacaaaatccctctggatgcccgtacgtaattactaaaatagagtaggatcataaaatgaatagaagctaaattcaaaattaaataaaagcaggtcacctacacattaggaaaggccctgatattgaacaagctaagccattatcaaacttggaacagatgggctaaaacaaagggtgtacgaagacaaggatgtccttaggatatgatgtcttttattgaggagggagggagcttccataatataagaaacttttcttctgtgtaacctttaggggatacttttttcaaggatattttattcattttaaattcaccagggaacatacctttctaattctttctaagatacacgtgtgaaatattagtaagagacaaaattgatatttgggacatcacaacatagctcagtttattggacagatggtgcattttctttgattcttgcattgtattgctccatgctcaaaaggatttggtaaccttaaggtttgggttgtcaggaacttaggctcttctctaaggcttgctaatcctagcacagatactgctatggacattttcccatagcatgagttgttataaagtgaaatagttagaatgtgaatgactaagtagataacctgatgttccataatcctgccatctttaaacatcatctaaatctagagctagatctttgagagcagaaaaagactgtggtcatgaataaacagaataatttgcagttgccataaggggctgatcactcttttggttgagagctctgatttaacttcactttttcttctttctttatcctttggaaattacaggaagagttatctgaattatgtttcagaattacaaggaataagctaatggttgataaaggagaggaccctgtaacctagaatgaaggaatggttttttatggtgtttttatcagattcgatcagcttatttctagccttgagctgatggcatatacttacagttacagatgcatttattagtgaatacttttcataatattaaataactgtattatggatctgaaagcctctaacactttatttgtaactcattaaatgaattgttactaggaattgtgatattcctgtaacagaattaccatatagctttagtataagcaggtaaatggtgtttattagagataagtggacgctgtacatcatcattcatcgtatcactgaacatttgcttctgaaagtagtcattttaatacctttatattgtttaccacattcttgatctaaaataatggatacattggtaaaacaaaatgtatttttcattttatatgtgcttgtatattggtatgtaaaatgtcaacaataacagagtaaagcaactacccacagacagggaaaaaatatttgcaagccagatgtctgataaatggttaatatgcaaaatatgtaaggatctcaaacaacactatagaaagaaaacaaataatctgattttaaaatgggcaaggggcctgaatagaatttcctcaaagaagacatacaaatggtcaacagatatgtgaaataaaagcttatcattgctaatcttaggaaaatggaaattaaaactgcaatgagatatcagctcacacatgtaacaatggctattatcaaaaagatgaaagataagtgttggcaagagtgtggaaaaaaaaagagcccttgtatttccacaaaccttagtgggaatgtaaattaataaagccattatggaaaaatgtatgcaggttcctaaaaataccaaaaatagaattatatgatacagaaatcccactactgggatcttaatacagtaaatccctctaccaggatttaccccaaaggtttgaaatcagtatgtcgaagagatgtttgcactccagtgttcattgtagcactattcccaatagccaggagatggaattaacttgaatgtccattgacagatgaatggataaagtatggtgtagaaacacagtggaatactattcagcctttaaaaaggattcttttatttgtaacaaaatggatggaattggtgaacattataagtgaaataagccagacacagaaagacaaatgctgtgtgttttcacttatgtggaatctaaaacaatagaaataatagaaccagagaatagaataatggttacaagagggtggcgggaggtgggggtcaggtgaaagaaatggaaagatgatgctgctcaaaacttacaaagcctcagacaggagaaatgagttttgtattttttttaacatggtgaatatagtaaatgatagtgtactgtgtacttaaaaatgttggaaagagtacatttcgaatgttctcactacaaaaaaataaatatttgaggtgatagaaatgttaactaatttgatttcattattccacattgtatgcatgaatcataatatcactttgtaccccataaatatatactataatttgtcaatgtatagctttaaaaaaaaaaaacagaaacaactagaatatgtttaggactaacttgcaggttgccaagccaggatagggattgtaggctataatataggcaaactttagattgaatgcatgaatgtatgtagcccaaatagctgcaggacagagagaactgaaagaaagttaaaaaaaagaaaaaaagaaatagaatgacagttctgtaagagtgggaagtaaggattgtttgaaacattgaaatctcatttttgagagccgattaataatgcggtagagattaagcaaatctggaagatgtttaaacagtggtgttgaaaatgacatagcaaacaattaagggtgaacttgtgtagcacaccaccaaaccagagcaagggggcacatgtatagtaacacgtgaaaaacagaaaacagaaagggaaattcatttacttgaaaccacagtcttgtgttacataatattctttgcaactgtatcattcactttcacttagaatatttctacaatttggaaactcacttttttttcatgtgtactctgtgcttagaatagaaatacacgtcaggataaatgagtcatgtacagcagtcataaaatcatgtcttaggtaatttcttattttgcatatttacatgtgccatgaggcctatgggctctagaaagccaagttagccagggttggggattgcaagcaaaaaaaatgaaggaatttagggaaaaaaaaatacacaaatattttatttcctattactttggagtctgcatttctaaagtactcagattaaaaattacaaggcagtagaagggcactgttaatttctaccactgattaatcatgaaaattgcaaaatacatttatcaccaagagaaagacatttgtgtaaaaaatggacaaaggctttttgccgggatgttgttagatcatccaccaagtcaaaacggttgtacattttgttaatatgttactggaataaagtaatgctgcacatttagcactggattatgtgacctgctgccaaaatttgtatctctgattacagggtgcaagcctaagtagtttctcactgatttatgtctgatgcattataatccactgactgacagggtaattaactgtatttgttaattggatggtaaaatacatttttgttcttctgatttaatactttttttaaaaatttaagactaaggcaaaaacatatactatgataaaaattaaccacattaaaaacgagacctagtgcaatttatttcttaattcttgttaccaaacaatagtaactaaagagatataaactcaattgtgtgagttaacaggcttatagtaaatatcatttctatacatagcaaatcagttcatgttaagcaaatgaataagtacacatcttctctttaagcagaaggtgttataaattactattaaaatccagctgatattgcatttttaagtaaggacatatatactatttacattgctttataggggttttcatctcctaccaatagtttaaatagtgcctccctctctgactgtctaatttatactttctgaattttatttctcaaaagataaatatggaaatatctgtgtgtatacatttgaaaagattgaaaggaatgagaatctagcacttcgataagaaatacggtgagattttctgttaaaaattgctgttatactctatatttcatccagtaactcctcttgataatcctgtaataaatgaaacacttttaagcattaccagtgatatttttattttcagatacctctctccattaatccatgtcattatagcattataatttattcctgtttttaataaagcacttgtgatttatggagttgaccaatagtaactaacatcttgaacttgggagtttgttcacctatagagttaaatcatatatttttgtgtgtagtctattctgagtaaacagaatgtagagaaattagaagtagtaaggaaagaaacaagggctctaaaataaatactaagcaaatatcaattccatgtggaacaacagggcaccaattccaatcagcttcaagagataagaagaagttggagatgggaaaggagatagtcatcttccaggagcaggaaaagaccagtgtaatagagaaaatgggaatgattgtccacaggacgttatagacttgacttagggaaactgatttagcaagaatatggaagccagcaccatcctgaactctggctgaagtatccagtccatctctgtctgactcctacatactagagattcatagaggggcatacaaattgaatgtatccagcgagcttagagagaaatgggttagaatgatttctccaccggaacatccatagggtgctgttatctgacagtatgacagaagtatagtagagtcaggtagattccagggccttcaaccatttgtactgaagactctttcagaatcttattggtagaataagggtaccagcagccccccgagatggattcctggatcatgaagagacaaaacaggtagggtagcttatagatgagtcatcaattgaaaaaaaaatcttatgttgagtatttttcacttcactctgagttaaaatctgcaccattgtctattagatgctgcaggagctggctggcccctgctgcttgcttgacctcagcaagtggaactcctagctctctgttctgggcacactagccttttctgaaccaggtgtttctcatgtgtcactgtatccaagaggacatcacagacaacactgtctaaaacagaggagaacccccttttccattacaggctttgtttttcttcacaacattttaacactccatggaatattagatgctgttttgttcactatctgtttccttctagtagagggaaaacgactctctagtttccctcttataatctccatgaaaacaagaattttgtcctgctgtagttatttctgtatgccataggtgctcaaatagtcactgaataaaatagtgaaatgatgaatataagccttgctccacttaatctaatacctctctttacctcaaaaaatactgagcatgctaatttgaaaaagagttaagactcagtagatgggagttggatgcgtgttgatttaaaaccagccttaggtaagaaaggtgctagttggtggaattagtcagtgatgagacaatatattcatttctctctactcaatggttttagcaacttaatatttcaataattagctcatagcataaaatttgtctcagcaattagaataatattttctgagagttggccaaggctttgcattttcttaaaaaaaaaacaattttctttttttttttttttggatacatatttatttatttatttattattactattattattattttttttaattctactttaagttttagggtacatgtgcacattgtgcaggttagttacatatgtatacatgtgccatgctggtgcgctgcacccactaactcgtcatctagcattaggtatatctcccaatgctatccctcccccctcccccctccccaccacagtccccagagtgtgatattccccttcctgtgtccatgtgatctcattgttcaattcccacctatgagtgagaatatgcggtgtttggttttttgttcttgcgatagtttactgagaatgatggtttccaatttcatccatgtccctacaaaggacatgaactcatcattttttaaggctgcatagtattccatggtgtatatgtgccacattttcttaatccagtctatcattgttggacatttgggttggttccaagtctttgctattgtgaataatgccgcaataaacatacgtgtgcatgtgtctttatagcagcatgatttatagtcctttgggtatatacccagtaatgggatggctgggtcaaatggtatttctagttctagatccctgaggaatcgccacactgacttccacaatggttgaactagtttacagtcccaccaacagtgtaaaagtgttcctatttctccacatcctctccagcacctgttgtttcctgactttttaatgattgccattctaactggtgtgagatgatatctcatagtggttttgatttgcatttctctgatggccagtgatgatgagcattttttcatgtgttttttggctgcataaatgtctttttttgagaagtgtctgttcatgtccctcgcccactttttgatggggttgtttgtttttttcttgtaaatttgtttgagttcattgtagattctggatattagccctttgtcagatgagtaggttgcaaaaattttctcccattctgtaggttgcctgttcactctgatggtagtttcttttgctgtgtagaagctctttagtttaattagatcccatttgtcaattttggctttggttgccattgcttttggtgttttggacatgaagtccttgcccacgcctatgtcctgaatggtaatgcctaggttttcttctagggtttttatggttttaggtctaacgtttaaatctttgatccatcttgaattgatttttgtataaggtgtaaggaagggatccagtttcagctttgtacatatggctagccagttttcccagcaccatttattaaatagggaatcctttccccattgcttgtttttctcaggtttgtcaaagatcagatagttgtaggtatgcggcattatttctgagggctctgttctgttccattgatctatatctctgttttggtaccagtaccatgctgttttggttactgtagccttgtagtatagtttgaagtcaggtagtgtgatgcctccagctttgttcttttggcttaggattgacttggcgatgcaggctcttttttggttccatatgaacattaaagtagttttttccaattctgtgaagaaagtcattggtagcttgatggggatggcattgaatctgtaaattaccttgggcagtatggccattttcatgatattaattcttcctacccatgagcatggaatgttcttccatttgtttgtatcctcttttatttccttgagcagtggtttgtagttctccttgaagaggtccttcacatcccttgtaagttggattcctaggtattttattctctttgaagcaattgtgaatgggagttcactcatgatttggctctctgtttgtctgttgttggtgtataggaatgcttgtgatttttgtacattgattttgtatcctgagactttgctgaagttgcttatcagcttaaggagattttgggctgagacaatggggttttctagataaacaatcatgtcgtctgcaaacagggacaatttgacttcctcttttcctaactgaataccctttatttccttctcctgcctgattgccctggccagaagttccaacactatgttgaataggagtggtgagagagggcatccctgtcttgtgccagttttcaaagggaatgcttccagtttttgcccattcagtatgatgttggctgtgggtttgtcatagatagctcttattattttgaaatacgacccatcaatacctaatttattgagagtttttagcatgaagggttgttgaattttgtcaaaggctttttctgcatctattgagataatcatgtggtttttgtctttggctctgtttatatgctggattacatttattgatttgcatatattgaaccagccttgcatcccagggatgaagccaatttcttacttgctgtcacatcttgtcttactataaatgttcaaaatagcacaaacagatggtcagttgattattctcaggcaatattaaaacatacaattgaaattgatgtattcatattccagcacacctccaaagagaagtagaaacaaagaaataggtacctatactcttgttatccatagtaagaagtagagttcaaataggaggaaaagtattctattcaaattatattttacatgtctaatgcttagaacatatttagcaatcatttgataaatatataagttttatgcagatttttggcctataattgatttttagatagaaaaaaccctcttgtgttctctatgtcactttggcttgaaatcatttctaatgaataaaaaatcttattttagattaaaaaaagtatgaatccttttgttgcacagtgacttgttggaaaatgactacttacaggatgctattccaggtcctgaaaagagtatgaaaaatgcatatgtaatggcacttactaaattgtgaaggaaaacgaatcatattccctttagctattatttcacttgaaggagggagggctagatgatgtgtaaggctatgtcattcacatgcccaagtagcatatgaagctattatcttgaggtaattttttagcttgcagtttaaccttatatggtgttattagatacttttacagctaatctttatgtggcctttttagtgtaattgagtctctcgccatactctttttatagaagtacaaatgtattgggcttttctatcatacttttgaatcctatttctcatttagactcagaaaaaacttaaaatagggaccagcatttattcttggcaactttgctatggacggtcacctctgtaggttgtagttgaatatttgcacagtctaatccagtgcaatgtgaacaggtctatatggatatcttcaaacattttctggctaattataaagctatggtgggaaaggatgaattaataaaaataaacatagcttttttaacaagtcaggaggaaggctgttgatatcttttatattctagatgaaagatgtctttgttaaactgcatcttgacttatttttcccccacatgtgctttctgaaaattattttggccctgattattagataatactatcatctgtgagaaggattgatgaatgaagatagatgaatatccttgttacttcagagtgaactattaattttattcaacaaatgatctgtgcctttctatccagataacaattaggctgaaccatatgaaattgtcatttttgtaggttaaaaattactgtattttagcaatgaaatttctttttacctgcttctaaggaagttacctttcctttactaagcatcttcaaaataacaaagataatctgaatagtctttgttgagaaatctaatttaaataatcttgaaatatgcctcatattaaaaacactttttccattcgtaaacacaatagtaaagctcagtctagacagataaatttcattatctgctttacctccatttagcatgtgataacctgggccaagttaacttaccttcaatgggcattggtggcttcacctgttaaatgacaacagagatctaaattttttaaaggcaaatatacattacaccatttcaaatctcattattgaaagtaaagtaaaaagatctggaaaattttcagttttcctatttctttctccttagcagttttcaatgctgtccaccatacaatgaatagaggatatcattcttaggttaatggaaaattctggaaaaacaggatagtatgcatctcactttcttactgttgtaagagacaataatgtgttttaatttgaaatacactctgttgagctattgacccagatcaattaaatacgtcaaaggtgtgtaagagataccaaggatcaggttgtcctttttaaaaaactcaccttattaggttataacattttcaaaaggaaaaacacaattaagtatattcagaattttaaaccaatcatgaaccttttatcttgtctcctctctcccaacaatcaaaatgaggggcaaagtggaggctgtatgttaaacagcagactgttttctctacatcaaaaacaaagtgtcaaagagcaggatccaacatagtaagacaagagttcatattttcatagaaattctttgttgcaatgactctgaaaaatgattacaagtttaggaaattcatttaaatttaatttggccaaattacctctcggttggctcataattatctccaagtaattttataaataattacttcaaatgctgcattttgctatacatcatgaagtaactaaattaagaatttaaattatggtactttagtatttatagttaatcatattttcacttcagaacagcttttaattggaaatttgagtttaaatttaataaaaaaagctgagctgattcaagttattgttaaaagatctattccatttaactgttaactaaatgaggtaatatactttaagatattatgcttttaaaatagtgttctttgaatggttttgagccctaatgttttatgtaatctgtatataatctttagattattgtaaacattaatcagtgttttatttaatgtatagaaagataatctttgcagaatgcaatttcccaggtccgtagtacaaattaaagtggagaatgatatgttataattccacttaactgtattatgtctatcaaatgaataggaagagagattgggaaattaaacatttctggtttcttaaaatttaagaagtgtttgaaagcattttagaagatgcaaataatgggtagtttagaggagagaaactttgaaaaacatttatgctttgataaccaaacattctataaaagtcggaaatagtaaggagcaccataattacaatctgcaaatacacgataatatgttgttaggagaatagccttcctgagaattaaagctatttgagtcgggaaatggagtatgtgggaaatagcaaagtgaaagcaaaatggaatgagagtctttgccctatcaatgattactatcattaggtctctggtgtggtggctgggggcatcaagagtcagaggaacagggataagacttgattttgctgccaattagctgtgagacttcagaaaaatcaattagcatctttggatcccaatgtcttcatcttatccaaattacatcttatccaaattacaagctatctccatactctcacagctactctcacagctactctcacagctaaactttctctctcttatgaagccctacaacacattctatgtccctctcactgcatttgtcacgtttcaacttttgttattcttatttatgcatgtgtctgtatacataggtcttcactgcaaaacaactttcttgggaaaagttctatttttcctacattttatgcagtgttaaatacttggcacaatttcccttgaatatagttgatgactacctgtcttagaagcaacttacttcaaatgcagattccagagttctgctcatcagtactgtgctggccaatgcagtagctaccagccacatgtgtctattaaacatttgaaatattgcctaattctaattgagatattctgtcgttgtaaaagacacaccagattccaaagacttaatacaaaaatgtaaaatatctcatgaataatatttaaatcttaattgtatgttgaaataatattttaaatgtattttattaaataaaatacattttaaagttaattttacctgtgttaatacgataatttcagaaaatgtaaagttatctatgtgtttcacattatatttcttttggagagtgccggtctagagattttgattcaatagaattctttgcagtacagcaacccatatttgtaaaaagatcttcaagtaattctgttgtgcacaaatgttagaaaatgactagattgacgcattaactacacacagcgaacagtcaccaggaatggtagttgtggaagcaaagctctttatttcattagtatgtgacaatattagtatttgagtagattctatcaattactcaaagtccttgctttgggcagccctggcttgacatagtagtaaggaaaaagaaaaggctgccacctttctgagtagcattcttaacaaacaacaaagctcatttgaggtcattagaaacaattagcaccttgtctgctatcctaaacaagagctatgttttcagtaaatgatgtttcttgccagcttcaaaagacagactgatgtcctaagaaaaacaagcagataaatgtagaaattttaaaaaggaagaaaatgagcttgagggtttggctgttaaagttagatggtaaggctgattaatttacttattaatttactcattgatccattgttggtgtaaattgaatgaatttgaatggcttgttggaagcacaagaaataagaataaagaagacattaaatttttgactcaagaaaaatcaagaatgcatgattttccccatatgaaaggaatattaaactgtaataaaagtatatttagaattaatttaatgaaaagcagggttttccttacaccagtctgagtttatagttacagctgcaattcattctgacattcagatataacagcaagaacaatattatgcagcagaatgtaggtaatgatgcttttagggaaagaaacacctctattttaaagcttttcactttattctgattttgccttacagacgacaaacagaactcatgctctagaaaagcagcttgattaaaaaatcacagaacaattatattctttctaagacactggctgaagcacagtagacagattttttaaaaaattataaacaatatgtattcattttagttgattagtcaagtccactctttttcctttaaacaatccctttaagagaaatcaacttctttgccatctttgcaaacaagaatgggttttgggaggcaaaaaacccaaagtcttttagattctccacaaggcttactgcaaatgacttcatagccttctgagagaactgaggttgcattttgtgccactgcaaatttaaatccaggtcacagagatgttacatagcaaatgacacatttactgtgccacccagctgcctcttctaatgcaccaggactgtcttctgaacaaagtcagcatgccaatgtttggctgtgtgcaagtagttttgtttaccagggtgacgctaaaagaagaaattctgcccacaattaaaaagctacttagctcaattactaattcacccctgaagtgtcaaataaatgacttgtctctctgaaggagcagtaatcctgaatctcatgagtgaaaaattttcaagctcttcagtgagtcaggattgagattacaacactcacagagaatacttgcagagaatctaacactctatgctagatggcagaggacataagagagcattatcaggtttctctaatcagtcttttaaaatatgttttgcctcaagaaaaacttgttaaaacaagagtgataatcacagttattttgtggctacatgtgaaagatgatctgtgctggcaaaatcctaatagcttatctcttttgtcacaccacaatttcacatgtgctttcttaaaaaatattctcgccagtatatcctcctcctacaaatcaatgccatgttgtcgattaattccaataatagagaaaattaaaagtgaggggccagtaatctgtaaaaaacaagaactggaggttttcatttttgatgtccacagagagccagagctttggaatcataggaaaagagcacaaaatgtgtctgtcaagtgagaggaagacaaaacacttacctgaatgtattgtttacttgtcaggccagttaatacctctcagctgtgactgagttctcccgacaaggcaagacaagtatttgaatcctagtaaagtggttccttaacatggctgtgcacgaaacaaagctgggagtgtacacccccccgcccccccccccccacacacacaaacacgaaccatccagactatttgctaatctgtttttctgggtttagtgatcctttttgcaatttctcaagtgattctgatattcagccagactggggaatctcccagcccatgccttgtgactgtggttcacctgcaaagatacatgagttgtctcgtcattcaaaccaagcccagatttcttgattctctaggaccaaagttagttggcaagaaaaagtgaaaagtatacaaatatataatgacaaaaatatatgtatgcttatttatacacaaaataacattccctttatgtatactaaggagtattaagtctagattcttattccaaatcaaagaacatcttcaaaagtttctttgagtgatcacacctacccctatcaaaagtagctgacaggaagaagtattttctcctttaatatattcttttgttttgtcattagttgggggctattttagggcactaaagaactttctgcatttggagaaataattctattctaaatagaattctgcttttgatttttttatgctgagaactgaaaagatatggtagagggctgacctattttcactcattctttggacaatatttatctatgttttatcccttctatgtgcaaagcacgaagctaagtgctttgagggacataaagttgaattcgatatttatatatttatctgcccacacagaatttaaagacttttagggaggaaaagccatatacataaatatctatactacaaaaaaagcataaaacataaaagactgataaatttcacggcgttaatattttaaaattctgggcatcaaaaggtagcattttattacagtgaaaatataagtcacagaatgtgagaaaatattttaaatgactataactgacatagagataaaatccagaatatgtaaaaaactgccaaaattaagtaggaaaaagaccaaccacatattagaaaaaaagtaaaaatattatcaggtaatgagtgtaaactggattgccaataaaacatgaaaagttactccagtttaataatcatcaaataaatatgagttaaaaccatgagatacaacaaacattaattttgcaaaaatttaaaaatctgatcataccatcattagagagaatataaagctgtcggaattcattcatactcctggtggaaattaaataggtgcaatacctgtggagaaaagtttggcctagttgaagctgaaggcatgcatactcaaaaaaaattcaattcctaggcatatgcctgtcttagtatcccagctagaaacagatactcaatccagacaattaaagataacttcagggatttttttttttaagagatgtgggtctcactatgttgcccaggttgctctcaaactcctggcctcaagggatcctcttgccttggcctcccaaagcattgggattacagttgcgaaccactgcacctggcctagagataactttataaatggattatgtataaaattttaggcaggcttaagagaaatcaacatacaataggattttagtatcccagggctaaggtcaacaggaatcactactagctctagactggaaaatgcagagacaggctactgaaaccagaagaaattatggtagctgtaaagaggtcgggcaacagtagctgtggttctcaataagggaaaacagcgatgtgagctgactcaggagggaaggaacccagggaataaataacctagcttcattctcttgcctgatctctgggaagctgccttccactggccagtgagcagccaggacaaggaagccccctggtgaagtccatgtcagacttccaggactcaacgtagggttgtgacaagagaaaaattgaatataatccctagagaaactttaatgtacacatttatacaatgtccacattagcactgttaataatgacaaaaatacagaaataacctaaatacccataaatctggaagcatcttgcaaaaagtgctgagaaagaaaagcaagcaagatgcagaaaatgcatacactatgttaccatttgtcatctaaaacacataaaactattatgtggtagttgacaatacatgaacttagtaaaaggataaagaaattcagggagatgatgaatgacaaatttaggagagaggttacatttgagaagggtgaggaatgtagtatttagtacagacttacactaaaacattattagtgctttgcctgaaattcaaatttaactgggcatcctgtattttatatggcaacctgagtgaataaaggatatgcagtggcttcagatggctgtgttagttgcaaatatcttcaaccagtctgttgtcttttccaatgcttttatgttcttatagcatctcttgatggacagaaattgtatttctttatttgggcaatgggaacaccgacgatcattttgttattctttatagctgtttctatgtctgacacatcccataagtaatattgaaaatatctacacaaccatataagaactaaaacatgtcataagaaaggtcctctggataaagtagtttaggaagttagaaaagataactcatatgtagctgagagactcagaggctcaaaactttgagctatgaataagatcgctaaagaatatcagtatattctaggaagagcaatgatgggaagaaagacctgaagatatgaacgcacagtttatattaagaggaaatggaaatagtaacaacgattaagacaatacataacatacatgttattttaaacaacatccttgagtgctgtgttccagaaaacatgttaatttatatgtttaatattcacagaaaacatttgagatgagtaccataattttctcactttaaaaatgagcattggggttattaagtaatttatgcaggttcacaaaactagtaagtggcagaggcagtttgacccaggttatgtgagttcaatacacactcataaatatgtacacttccctgcaataaatactgtgcttggcattaagatacatggtgcatctgccctgtgtcagtcatttttctttatgtgtttctttatttgctctttgcagtaaacttatgagttaggtagcatccagcttcatgtgaagccaagtaatgtactcaagaatcactggctatggaatgagactggtaaggccatttctataggactccaaaaccaattaactaaataagcagtttaatttagataatgtaaagtgaagaaaaataatagaaaacatttgcctggaaatagatgctgggcatcaaattatgaaggtaaggcttgactttctactctcagcgattgcttgtgccgagagagagaggtatagaagtaattattggcagtttttgaatagggcaaggaaaggatcagatgttttgagaaaatattaaagtaataggaattttaattgacaagttattaccatatatttgggtaagtgaggtttaattcattatagctttaaatcattattgtcctgtctcaacaattaccacagtgttttacaatatgacaagcactcaatatgcacatatgacaagtaaccaataattgcatcttgcatgaatacatgaatgaatgaatggcatatataagccaaacgaatgagtaagctagtatgttactgtggagttttaaagatgttataatgtaggaactccaaaagaaatttgaaagattttcctggtctgccagtcttccttggttaataccctatgtatgattctcaaactaggcgactcttggagttcctaataatatcattatgagatgttaaaattaatatgcatttcctgagtgctcacaaagtaaaaatcccacccagaagcatataattaaaatatagaactttagactctgataattatctataaaaaggggtgtttgttatttagttaaatcctactgcagaagatggatagaggtagtctgctttttccagagctttacagcctttccttagttgagttttaaatatacttggacttagaagaaactgatactcatttcaaatcaacgtgttgaattttaatctactcaatataaaagtaattgtataaataggaaaggaaaatgaattatcatttacaggtacttattaagacaggattctggtgacatatatgttttagaatggtggatgggatatatttctttctacaatattacaaaatctgactctcattcaagtgcttctcacacactcaaaatgcttattcatgaagaaccatctaatgatatgtacacagacacacactcccagtcaccctcaagagagtcaaaaacaaagataatacccaccaaaagtctctgttgaatacctccaatacattaaaaaaatgaatttctttccatgaaattgctaccctctagagttaatgagtttatatcatttaaatatttccaagtgaataggctcatcagaatacacggtaaaaaatcttctagacagctcaagtctctgaggacaggctgttctttgagagtgttactttatagcatgaaggctttcattgaaacataaaaactaccacacacaatgaacttattttttcaacagtaagccagatactgacccaacgtaaagataatttgaaagaaaatgtgtctttgctacatatccatgtatagataaggaagggtttaattgtttttatagtggtaccttttaagagtgcaatttgggattctctactgtgcttaggaaacgtgtttcagcatttcatattcagaacctccattcatcatcttacatttcaatgtgtgtctcctaaagcctctctctttaaaaggaggcctttagcccccagtgatttccccaccactgttttcagaagcagtacctatgttcaatattccaagggatgaaaacaagaaacatcatgtttcactacaaactgtagtaaaactataaattaatttgtaattctgttcaaggcatctatatagaaatatgtgccatatttgtttaaagaatgatttgacccagccatcccattactgggtatatacccaaaggattataaatcatgctgctataaagacacatgcacatgtatgtttattgcggcactattcacaatagcaaagacttggaaccaacccaaatgtccatcaatgatagactggattaagaaaatgtggcacatatacaccatggaatattatgcagccataaaaaaaggatgaattcatgtcctttgtagggacatggatgaagctggaaaccatcattctgagcaaactagcacaaggacagaaaaccaaacaccgcatgttctcactcataggtgggaactgaacaatgagaacacttggacacagggtggggaacatcacacaccggggcctgtcgtggggtggggggagaggggaggggggagggatagcattaagagaaatacctaatgtaaatgatgagttaatgggtgcagcacaccaacatggcacatgtatacatatgtaacaaacatgcacgttgtacacatgtaccctagaaacttaatttaaaaaaagcaaattaaaaaaaaattcttctgaacttttacatcagttgtttctaatcaaagctcatctagtttttaagtttgaataccccctaatttatacataagttaactttctggctaatataaatggaataaaatccaattgtctatatatgaaatgtgaaatgatgctaatttagttagctttctttttcttacttgaaagttgtgatggtaactatcccaatgtttcagcaattatttgcaaactgtggtttgactcttaattcatccttagttcttatatattatactaactgtataaaacataatcaaatgtataattacaggttttaacattttagtaatcacttttgtggcaacgacaggcaaaattaatgttggtgctccaattagtgtgattataggaatggaaaaccaaatactgtactttctcacctatacgttggagctgagctatgaggatgcaaaggcataacaatgatatagcggactttggggactcggagttggggagattgggaggaatgtgagggataagagactattcggtacagtgtacactgctcgggtaacgggtgcactgaaatctcggaaattaccactaaagaacttaactatgtaaccaaaaatcatatgtacccccaaaactattgaaataaaaaatagtgatttaaaaatataaaggaatgatcatagaagaaagcataatgtgaaagaaaaacaagaaaaaaatatgaacatactcttatttacgcagccattatcactatgggacaaaaacatttccagaggtgatgactttctatctgactatttacattttagattttactgtacagaaatcagttctgggatttatatatttggtttattgaacctctgctcccatttggcctttactcaacctccaagacttcaaccaagcaaattttacagatgtggagaaggataccaactgatttctttgtttatcaaagatttaggcatacaatatatcttgatataaacaaacaccaaaagttagttgactttcattgcttctttgagatttttggcttcattttctcttagaaatgcgagttacctaatgaaaataattgaagtaatatttttaaattcaaaaaagatgatgaaaagagaactgaagaagacaaggttattcaaagccatgatagaagaaggatgacgtttctaagaaaaaaaagcatatttaatatttgtttcattatccaaaattccaccaaatgctatgaatgctcatcaaattgacattctcattgcttatttgaagttttaattaaaatgcccaagaggagtcttcattctcaaagactatataattcaaacaattgaagatgtatttaaaatgtttcttcatcaaaggaaataattcataccttccttagctagtaatcactggattccatggaacataagctacttgctgaaattcatagactagattgagttacctaacaaccatttatagttaaatgtcctgagtgaatggttagcaagttaaaactctctttaatatcaaattatttctacaaaaaagtcagcttaaaaataagatggatttttttgaaataccatacagaattaaaattaaatttaaaaatattttcagaaattcaatttggaaaataagataaaatatttaacattttaaagcctatctagaaaatatgttgatcctaaggaattataaacaaatattataaagtcttttataaaagtggacgaattgaaagattatgtaatacctaatcattacccaaacttaccactaaatcaaggccgaacatacaagtatgcattttaaaccggatagttccttagcaatctattaactcttttatcagccaagtttgttttgcttaccaaccttgaatttgctgaattccaatcttattgtatacagtgattagttcataggaaggataatttgtcttttaaagggttgaaaaataatcctctcaaaatcttcactgaaatgtagttaaatgcatatctttattagagaacttgaaagatagaacagagcaaagaagtgtaaaatatggagatatccatttgtttgtttttactcttccaacctaaaacctgacagaattagattttcagaggtatagtatgtaagagatgttctttaaagaattttgtttcggccaggcacggtggcttatgcctataatcccagcactttgggaggccaaggcgggtgggtcaccaggtcaagagatacagaccatcctggccaacatggtgaaaccttgtctctactaaaaatacaaaaattagctgggcatggtggtgagcacctgtaatcctagctactaggcaagctgaggcagagaattgcttgaacccaggaggcagaggttgcagtgagctgagatcatgccactgcactccagcctggagacagagcgagaccgtgtctccatatatatatggataatttttatttggtcaagtggagtaattttaaatccatgcctacacaatgaatttacaatacattttggtgaatttctgaatactgaaatagacggtgagtttctgaatgctgaaatagatcatggtataaaacaaattttagggttgactggaagagctagaagagctagcccttacatacttcttttgaccaagcttgtgactttctgcaatgtcattggatacttagataccaatatctatttgatgtaggaaagttttttaataatattgtttatagtatgaaacaaatcatttagcagaaattgtgtactatgagtgggaacagtgatagccacaagcattcccttcagaatatctataattttcctggaaaatacctagcttttagagcttattacttttgacataattaaatgtctgtgtatatttgcgtgtgtgatttatacttttattttttccaattatcaatatcaaagattaaattgaatcttttaaattttttgtgtagtataaaaattctgttaatattttcctccccatcattttaaaatgtactctggatttttagatcctgctattgttattaaattattatttttatgttttgtatattttagaaatggttttctcatagtaaattttacttgacaaccatatttattttcacttgacaactgtatttataactagtcattttcacttgataatcatatttataactagtattttatacttaacactatcattaattaattggcttcaatgctcatcaagagtttatcacatttttttctattattttctcttaaatgtaattattttattaactgaatagagtgtttcttcattgactattttgtaagaagtgtgaagaaaaggtatgctttgcaagctcttgaaactcagaatgtctttctgttgatttggaaagtatcttggtctggcataatgttactgggtcaaaaatatatttacaatatatttatagctatcagatatttgccaagaattatgccaatcatttatactcattgtctatatttcttataaaaatttccatttattataattaattatttatttatttattttaaaatggagtctttctctgtctcccaggctggagttcagtggcatgattttggctcactgcaacctccacctcctgggctcaaggaattctcatgttccagcctcccaagtagctgggaccacaagcatgcgccactacacccagctaattttttgtatattcagtagagagggggtttcaccatgttggccaggctggtctccaactcctgacctcaagtaatctgcccacggcggcctcacaaagtgctgggattacagatgtgagccactgtgcctggcctatcatcatacttttttataaatgagaaaactgaggctcagtaccagcaagtgtcttgacaaggatcacatataaataaatggatcagtggagtctccactactgatgctttctacgtctcaaaaccacagctcaacagatgtgagtttcaactgtctttgtgcaggaaacatcctttcagtattgttgttttttttttctgatatttaaaaaaaaatttttcttgcctcgatgttttagaattttagagataagtattttaaatatttataataaataaacacttcaccagattatgtttacatgttgctctattttcactgaagttttgcctggaatgggaaggaatcctaatacttaaagagaattaagtatgtacatttgttggaggctgcatcatcatgaacactatcacgccctagtgatctcactttctccctcctaaatagtctttttcttcaataagccattatctccagggcactagtgttatacctacctcataagagacatttggtgttttgggcacagttcattcacctttaccttttattttatttattatttatttattttttttgagatggactctcgctgtgtccccaggctggagtgcagtggcgtgatctctgctcactgcaacctccacctcctgggtttaagcaattctcctgcctcatcctcccgagtagctgggactacaggcatgcaccaccacacccagctaatttttatgttttatttttagtagagacacagtttcaccatgttggccacgctggtctccaactcctgaatttaggccatttgcccgcctcagcctcccaaagtgctggaattataggcatgagccaccgtgcctggccttcctttaccttttttaaaaatatataaattgttcacatattgatcgcctcatctacttcccactgctgtcaccatttttatccagactctcaacatcctcttactttgcgtcactcacaccacaaacctgctttgcaaatttgggacaaaaaaaattcttcactttaaatttcagctctattatgttgcttagcagcctaagaaacaattttgttcttggtttttttaaatgtatcctgatcttgagtaatgtgcttttcatccttataatttttaccatatcgctaatatcgttcctatcattgatttgattaaagttactttaaaaaatctattttaggcttataacaaataatgtcggtgagatacagatgaaaataaatgcaatattatgactaaaaggccattgtttcacagactatctaaatcataaatcactgcttaatttttactttcgagagtcacatgtgatacaagccccaaaactattgaaaatgtcacctattgcaggaatccacatttttctaccagtttagcagccccttcacctgtcacacaccttgtctatcaaattttacagttcaccaacttgtagtcagtatctttggcaccagagatcattagttgtcattatttttcactctgtttcccccctgtggctaatacctagactttcttctatttgccatccttcacctaatctcattcacgtctaaagttccacctaagactcaacacctttagaagtattctgaattctccagacaacaacagaggcacttttcttaatatactacatttttatcactaaaatttctctaaattattgtaatcagtgggtcagtttgagtcctgcagaagcagataacaggatattagtcatgcaaaagagctgctatagtggaagaaacacccagaagataaagggaatggagcaggagcaggcaggaagaactttgtgatcatagtgcagacagagcaccagtgaaagcagagagtgataagagaattgggtaggaaaatactaggctgtggggcagttttaagtctcagccacaacggtgggctagtataggtacccctacgtgctctctcgttgagtgggagctgcctccacccctgtcttccaggttgcagtgggaagatcttgcctactgtgcctgttaacaataattagataaaaataaataaataaataaataaataaataaataaatcctgctggtttcttatcaccgcattctcccttagcaaggattcgaattggctgggaataaagaaaaacagactgaaacaatatgtttaggaatgtatttacttctaaaatatggtgtatggctcaactctaggccaaggcctctgatttgctgagatttatgagacagatgaagtgcattgatttctgtacaacttggaatgggggaggcagggaatgggaaaaatctaataattgcatttaagatgatttgtttagtaatgagtaaaactgggtgggcattataatcaagaataaactacagaggcaatattttatagtagattttacatgtttttctatcaataaatttcaataatttagatcaattgtggagatatatatatatatatacatatatacatacatatacaatataaactgaaatgaagaatatcagtttcaaaatgataatactctataaaaattaaattcaaaaagaaatgatacatatcttaagagaggtaaagttagagtggggccgttaaaagttaacttcaacattttagtggttaataaaccattctctatgtgtacaatatgtctttaagagaattacatcttctgagccccaggatttagtttgacaaactgctactacagtccattatccatgaggacattagtatattcctcattaaaataccatataaagcaagcaatgatagaaaattatgaaaacagagatgttagctttaagacataatgtaaagcataaagaatgtggtaatcaggaaggaaaatattatggggctaagatacaaactgttgtctgctccaaaaacgactcatgttttgatctaacaacaaactaaatttgggagaaaggacaacaaaaatataactaaaaacagaatacatgaaaagcagttactggatatcaagaatgtgccttatagaatccaataaaaattaatctgaaaataagaaaaacatatttttcaaagatttacacttattgttgataactacgcttactcttgacagaaaccagttaaagcaaatagggataagttaaataaggtatatacacatacctgtgtgtgttagagggagaagaaagggcatggtagatatctcagaattcaaaaccacaaagatgccactaccctttacctgtattcgtgacttattttcaaatatctattttattgtattctcattttttagtcctggtcattctgcttttccatctgttcatattgtaggtagaagatgctaagtcttttttctttggatatatatctttggatatatatattttctttggatgattctctataccagttttatactcaggaggcagtatttgatttgcagagtttgagtcaaatttaaatcactgtgctatccaaacacagccagagatgaagggtctcaaagcattccttggccatttgggacgtgttttctgtaggaaggcaagatttttccagcaaggtccacacactaactgcaataggtatccactttattaagctatgcctttttgaagaggaataaggatagggaaggtagtattgtcaaggtctgggactttcacatttaagaggttataaaccagtattatatcttttcagtagcattccaacacggagcgtttcctgtccagtattgaataacaataataaaaacccatttaaaagctgctctagtgtgtatcatcaccatctatgaggaattctaaacaatgccagcataaatactcctcccagctgggatgaacgtctccccacctcctcctcctttgatctgtcattgtcactttcagtgccattaatgagacagccaagtataaacgggtccccggagaacctccaacaaatctgcgcactgggagaacagggtggagccatggaagttcctgccatttgcagaggggaggagcctggccctcctgttcccctgtgggaacctgggattcaatctgggagatgagggtctgttaacaggaacccctctatcgctttgctgcattgtttttccttttacctatttgcccaataattccatccccctcacccttcaaagtgtctgcgagcctaatctttcctggtcgtgtgacaagaacccggattttcctacattatgatgctgggacaggaagatggagataatgtctaccaaggactcttctattctacttcaagtcatgtattaagacttcagttgtggcaaaattgcacctgtgcttatagtaaataataaaaaaaaaaatagatcaagaaactttctaatagatgtttttcctctagtgattttcaacattatggaggtttaatgagtaataactaaaggagttaatgcaacactgaaggagtgtctaacaaactcagagtatcatttggctaatggtaaatcatagtcactatttggtaatttaaatataaaactattattagtgcctatgtaaagaatagtacttcagaaagcgaacacttaaaacaggtcagaaccctaatgtgaatccatttattttacttagcagggggttgaaaggagaaatgtaacattaaaaagctttctgaaagtgagatgtaaattgtaaccattttacaaaattgaagcccaagacccattgttataacacttcggaatatatacagatttttgaaaactaagtacttggaatccacataataaaaatataggttaattagaggctatatatcttttaaaagtctatttttaaatgattgcctccaagacaaacaaaggtagaaaatgggattcaaatttaatacagcatttaaatttctgaactctcttagctacttattttcattacaaagctacacaactttctccttttaaaatctaatgcctatgcaaagttatactcaatattttcttattatatcattagtttctagatctaattctgaatatcttcagaggaaaaattagattgttaaattcaaatacgaataatgtattcttggttaaagagcaattctaagacatctttcagtagaacaataccaaaaaccccatgttcctgaacctaagccttgatgtatgaaaggtgttcccctcatatgcaggaccctgaagcaaggcattcccctgtaggagatatatggtctcctcgtctgcttacagctcctagtctctgttgtccacagtaaaatagaaagacccctaaagacctgttgcttagtaaatacagtaaacagggacactgttttggaaactgctgcacaaaataatttcagaagttattgagaatctgatatcttgttcaggaaatttattgacaaactgttaaatgaattggaattgatggaattgcagtttcaggttcctttcacaaggtggcagggtaaaagaaaatacaggcaccagggtatggttttgttttggttggtttgttttttgtttttttttttgttttgttttttgttttttacaaattgtgttctcttgtcagaacagcactgtgtttcagggaaattgaaagcactggaaaggaagtgcaattattggcaaccaagaaccagttttgaagagatttagtaaatgcataatttaccaataaaaaggttggcttcaaactgctactgtacttcacaggcatttcaaagaattacccatataactatttacttcattgagcagaacagtgcctaaagaagctgtcaatcttctttaaaaagagaaaagatgtgtggtggagggcggggcgagggcggagagtgaggaggttggttgaggagagaacaatgctcatcaaaagcacaccaatctgtatattttaaccgaagaattttaacccagatgaactgattgtttgagtaatagtcaatcagcagcatcttcagaggttcaccagaaacagagtattgtgctaggcacccagtccgggtgacagatagagaaggagaagagattaaatacaatgtttttaaaactattgctcagaaattaaaatttcagaatattccagaaatatatttacatttattgattaagcattatgtaatagtctttgctctgaatcttatacggtactcatcattttattagcaaggatatagatgcacgtaactttttccaagttcacagtgattgtgagtgattatttttaagtgaatatttgacatggactcttattatctaaaacacactaatgacttcctcttgctcttgaaataaaaaccagaatcatctaaaatgctctacaggactcttcatggtttaccctctgcccttttgtgccagcttcccactgttccacgtgctcccaggttccctgagctctggccacattcaacctcctgatacctgggcctggaatgcatcttcctttcccatcctaaccaagctgagctgctaacctctactttttctcagagaactcaactcatcttccctctccccagggcagccttcaacaaggaataggtgaaagacctatggctcaagctttcccagcagcaggaggctctgctgtaagcatctattacagtattgactgtggcctcacagtacactgagctccctaagggcagtgatgagccttgcatttgaattagcaaatacaccatcaagcaaagagtggcccatgtacacacatgacacataatattctacttgctactggggcttgtaaatactttgtacagattgtatgcaatgatgttttaaatttgtattttgtggtgaaattcctcagacataatatttcacagcagaataaatgttaactcatctattttgaggagtcctgaaatggtgaatccttttatgttgcttaactagaatagaagctgtattctttcaggccattgcattggtcttatctgtttttaactgtagacataatattgttctaaaacatgtttacagaaatcagtcatgtaaaaactgcattggggaatcagattctgacatgaattcaagttattcatttgtaactctaacattgaaatgcactggttcatatcaaaggctattacattgtcactggctagctaggtgacgttgggtaagtaacttcatctttgcagacaaggtttggcatctgtaacaggagtgattaaaagagattatccctaaggtcttttacagttcttaaattctttgtctcttagttcctctctaaggaattttaactctgaaaactgctagcatttcacatcctactctctttgcaaatgagagattttcaattcccagtgatgaactgaatctgcatacacacttgtattttattacactagagtaaaaggatttagggaaaaatacacatatattcaaattctcctcctaaggaaaccggatttagttaaatcatgaatagaagtcaggataagtatattcaacatttacccgtagctctttttccccaactgtctgtttccgatatctaaaacatagtaacatttcattaagaagtcacagcaacccttctctaatttgtgaagagtacattgtgaattacatgaatagttatcagcatttcagcatattagatttcttcccccgcttagtagatgtttatgagtcctttgggtttaagcacacttattcattagttagtacgtcattgaagaagacttaatgaaaatatttcttttttaataaaatattaactcttaatcatatatacctttgtacagtggcattgcacagagagctgttgaattctaaatattcaagatattttaaaaatatgtcttctttgtgatccttcctcatcccatcctctgtcatttcttttgttcatgtagatttttgtaagtatcttctcttactctgtcactaatcattgtagtatttgtgaactagttttaactgcactgcaattgagtctgtcagatttgcattatagtcagtgcttgtgttttgtttcataaatccttatactgaggacttgagatttaatgtttatcacttacttttaggtttttattccacaaagatattgcatataatgtgacatagtgatagtgagccaaattaatcattttcataagcttgtccatttgtctcagcaccacttacagaaaagggctgtccagtgctgtgctattaaatgtttaacaactgacttgccagaggggaaaataccttattgtagtgtttgccaatttcaatggtgtaaatccacctaacaatgctgatttcaatatattaacatgacatcgatgaaacagtcgagcaatgatgaacagtgatataccattatctattatttttaccatgcaaatacaagagaagtaaatgacatcaaaacatatataatagtaaaatacagccaaataagtagaaagttaggttttaagtatttattaactttggttttagtataatttattgcttatttatataatttaatttttaattagtatgtttaataattgacttacacattcctgaaaattttgtaattatctctcacaagccagagcaggccagctcttacacaccatggagtttgtccttttccagtttttctgcaataacacctctgttctatgtcaagtatccatacatacacagtcctctgttcagattctctattttgtatttccttatgtgtctttgattgtactaattctgcactcttaattattacatatttatgcctttgccatgtaagtcaagttattcttcctttttgtaatattgtgtgtgtgtatatatacagtgtaaagcatgccattttgatgtatatatacatagtgaaattattactatagtcaagcaaattaacataaccatctcctcacatagtttttttttgtagtataagcaactgaaatctacactcctagcaaattttcattatacattattaactataatgatcaggctgtacattgatctctagacttaatcattctatataactacaacttcctacttttgaccaacatctccccataactctcccctccaagcccttgataaccacagttcaacactctatttctgtgtatttaattttgttagactccacatataagtgaggtcattcagtatttttctatctgggtctggcttatttcacttagcataatgtcctccagattcatatatgttgtcacaaatgacaggaccttctttttcaaagttgaatattccatatatattatgtatatatagatacacatatacacacacacacacatatatggagagagagagattagtgatatatataacaatgtctttacccattcatctgttgacagacacttaggttgtttccatattttggctattgtgaatagtgctataatggacatgggagtgcagatgtgtctgcaaggtactgattttatttcctttgcatacatacccagaaaaaggattgctggattgtatgttagttctatttttagcttgttgaggactctccatactgttctccataaaggctgtagcaatttacattcccaccaacagtgtacaaaggttcccttttcttcacaacaaagccaacatttatctcttatcttctttatcatggtcatcctaaccaaccttactgtggttttcatttgcatttctctgatggttagtgatattgagcacattttcatataactgttggccatttttatttcttctttggaagatgttgattcagatccttttctaatcatctcattttataatcagatatttttgttattgagtgtgtgagttccttgtatactttagaaattaaccccttattagatatatggtttgcaaataaattttcagtctgtaggttgccttttttattttcttgattgtttccttcggtaggcagaagatttttctgattttaaattatgttgcaaagctgcagtaatcaaaagggtatggtactggcataaaaaaagacacataggccaatggaatataatatagatcatagacataaaacccgagaaacacaccatctactaaactttgagaaaagcaccaagaatacacaatgagaaaaaagataatctctaataaattgtttcaggaaaactggattatctacaggcaaaagaatgaaactggatccttatcttacacaatccacaaaaatcaacacaaagtggatgaaagacttaaatgtaatctctgaaactgtaaaactcctggaagaaatcatagaggataagcttcttgactttggccttggcaatgatttttatgactatcacagcaaaatctcaggcaacaaagaaaaaataaacaagcggggctacatcaaactaaaagtatcttttttttttttaatttaggtgcaccatggttttttttatccttgcactttaatataaattttagaatcagtttttcaagttaaacactcacacacatacacacacatacatctgttgggatttcaggtagtgttgcttggaatgatagacgatcttgggaagaatttacataatatatatatagtctcaatccatacatttgaagtgtttctccatatttgctacagcctctttaattttcttcagtacatgttatatttttattttttattttattattattattattttttgagatggagtctcgctctgtcgcccaggctggagtgcagtggcgcgatctcggctcactgcaaactccgccttccacctcctggcttcacagcattctcctgcctcagcctctcccagtagctgggactacaggcgcccaccaccacacccggctaattttttgtatttttattagagatggggtttcaccgtggtctcaatctcctgacttcatgatctgcccgcctctgcctcccaaagtgctcggattacaagcgtgagccacctcgcctggcacatgttatatttttaaaggttttttatatctttcacaaatttactttaaggttactttttattgatcaccttttaagagctttttgaattaagtgaatacatgcaaaatggttacaacattgttcagaataaagacccatcttacatactgttgttatgactttagttaaatactatggtggaaagtgaaaaaaaaaaaaactaatgtgtgtttgctttattaaaaatctaggagaaaatatataatgaatgttggctatgtaactatatcatattatgtatatccaaaattaatgttccttgaataacactgaacaatgatattaagaactaaaaataaatattcactatatgctaggaatcctacgaatgatgaaactgcaccttaagagtcagtcaatgggaatacaaaatgctgcagccactatagaacagagtttggcagttcctaagaaaaagtttgataattaccatacgtattagtttgttagaactgctgtaacaaaatattacagatcaaggatcttaaaaaccaggaatttattttctcactattctggaggctggaaagtctaaaggcagagttggtttattcggcggcctctctccttggcttgcagatgggcacattctcatgctttcctcacattgttagcattattatagtttataaatagttgctgtttgtctatagaaacatatgatttttgtatacatatttttaatctcaatcctggtaaactatcatatttattgtgatcattaaactagtttatttcagattttctacatagacatatcatttgcaaataatgacaggcttattttttcccttcatatactcttaaatagttctttttgttttgtttttggttttgctttatggtgctaggtaaaatattctgaatagaatttaaatgcctttggtagaaggaaaaaacatatcttgtgtctgatcttatacagaatacatttttagagttcttcattaaaggtaataattgtagtttcttgtaggtaattttatctgtttagagaaattcctttccactcctttttttgctacagtgttattaacataaaaagtagatgttgaatgtatccagtattttctgtgcatcacttgaaagtggcatgatttatttcttttagtgtgttaatgtagtaaagtatattaattactttttaagagacagggtctcatgttgctttggctggccttgaacacctgggctcaagtgatcctcccacttcagcctcccagatagctgtctttcaaatagtgctttttggatttaaagtttattttgtctatgattaatacaaaaacacttgcaataagtatctgtctagcatatttgttctatggtttttctttcaacatgtctttagtctcaggctttagaaatgtctcctattgatagcgagcagctagatgttttcttaaaatttgttctgatcatcttgtcacctaactagatcattttttcatctatatttcaagtattaataagcttagatttaattattctactttgtcctttttgtattgtcatatttcatatgccttattttacaagattctatattttccttggtctgttctgctagattaaaaattgtactgtcaatttctgtaactttaatggccatctaagaaattttaaaatgtctaattgacagatgtcaaaatttaatccatatttttaattccttctctaataatgaataacttaaaacactaactgtataaactcagtttcatattttatactttttggtcacatgtggtagttttatcttacttttaatgactatcatttttatgtctaaaattattttcaatgcttattggtcttcactttgctttagtgagggtatgctgatgtttagttttctttggtttaaaatgctttattttccttttgttcataaaatcttttagaccaatagctatgtattcaccatactctgaagatataattctgtcttattttgcttttatttttacaatggagaaattactgtctgtcttactgtcattttttatagaggagatcaccagagtccagttttcctaggacaactccagtttatgccagttttcctgaagtaatgactggttctttccctttcactcctcaaagtgctggattagataataaactatgtgatctttctatctatgggtgtattagtctgttttcatgctgctaatgaagatatacccaagactgggtaacttataaaggaaagaagtttaattgactcacaatttcacatggctggggaggcctcaggaaacttacaatcatggcagaagggtaagcaaacacgtccttattcacatggcagcagcaagaagtgcagagcgaaaggggacaaaatccccttataaaacgatcagatctcgtcagaacttgctcactatcatgagaacagcatggaggtaacagcccccataattatctccacctggtccctcccacaacatgtggggattatgggagccagagttctagatgagatttgggtggggacacaaccaaaccatatcaatgggtaatctgaattattttgctctgaattttttaaagaacttttcaagtaatatattttattagtaaattctacaatttcagtttaacatgcctaaggataaagttctttgtatgtatcctcctcagatttgcttgggattcctgattctatagatttatgtttttcatcaattataaaaaattctcagtcattttttaaaacatttcttttaatacattgtttctttaccttctgtcattcaattagatttttcatcatcagtccagcctccattgctcttaacttttctctgttttccatctttttctatttttttactagactctatgattcctattgatttattttccagttcactgattctgtcatcaacactaatctgccacttgattttacatataaaaagcaatatttttcatatctaaataaactacatttttattcaaatatccttggctattttataattgattgcttttgtagtcatttttattctcttttgtttattttagcctatgaaatagtattttgtattttttgctaaataattttaccatctgaagtctttatagtgcttattctcttatttttgtgggcccttactcatgatgacttgtgttattatgagttcactgattggctgattattttttaatgtataagatcatattactcatgaatttataaatgggaattatctgaggtcttggctaatgacctaaagaagcattcatttagagctttgtagaacctcttccaaggtaactgcatcatagaactaatttaaagtaaattgttagcttgagtttttacttggttgtttgtagttttgtctgctttaaaatttttgtttttaatcattttattagtgattacacagtaagaaatatacaagctaaaaactctgtagccagagcaggctagtgattatgaattttcaccagtaactttcttctcagtttccttgcaattgagatttattttttgttcatactttacactcatgatgtagctctttggtgttgtcatgacatggggagagtcaagtggtttcctcatgtaggcctttggttttatctcttgaccccattcccagaaagccttcaaaacagaactcggtttcaccttattcagcaacatctacaagatgtaagcatgaaatagtgctccttttagtcctctggtttcctgcatttacttagtctgtgacctcagagtatttcttaactgtcttaccagctgttatttttcatattttcagtagggtgattttttttctgcaagattaatctctttgcaacaatttttttttcttaaaacttaaatataggtatttggacctagttgataagacaatgaaataattatttgagaatcccctatgaagatatcatagataaaatatctgaggtaacctgtagattatttagattttaaaaagatatattgattaaatatattcctattaaatattctgataaaatgttttttatattgtgttatttttaaatttaacttgtaatggaaaaatggaaacataatagtgaattaacagttacataaacaagcaggaaatgaaaggttaaattttcatgccatgcattagaagtgaaaacacaggaaattgctttatcaataaataattgatggttatattaatcagaaaatgtaaaaacactatcatttttatgatacttctcttttattttatacagatttaccacataatacatacttgttaatttttagaagattgatatattctattcaaaataaactttcttcaagaaacaggtcatttaaaaatttatgactgaggcatctgagtcataaataataattcataagatagtcatgaattaaaaatctatatcaaagtttatttaaatttacatcacctttgagttctgtagttaatactttgtaacaaccaatacttagaatacaatttaaaatttattttcttcttatgaaatgcacttacacaagcattacatggctttgctaagaaatattttatgtatgagtctgagtctattttataggtctgatgaaaaatgtaaaatagagggcttacatggattaaggagggagactcaaatgttcagaggcccaaagtcatcactttacttctcatgttaataagagtatattcttcggttgtattatatagtgctttacaattgcaaagtaatgaacggtgtactctgtcattttttaattcctcttttctcaagctaaaatactttaatacttttaatgtttaaaaaacagctatggcttgcataaaaagtaacagtttttttaagggagttgatgatctgatacactcaagaaatatgaagtactactgatatatctgcatcttagtgtaagaattaacatacagttgaactgaaaattgaggttgtctttttgctcactttatcttttgctcattcaaagaaatgaggtaaatttatcttttctcattaccccttactggactcttcctaatctagtccacctgctgtgtctttgctgccagttatctctccaaggacaaagctggtatgatcactttgcttttcaaacacctattaaatcctcattgctcatagaaaaaagaaagcaaatgctatagattacgaagtgacacagcccatatctccagatttagttgttttgtttactccatcactgtctgtcacatactctgtgccgtttccatactaatcttcatgaagttcctttcaaaatcccacgcattttgaaatcaggttctttttgcacagaatacatcttctctaaaacatgtatttattcatcttaattaaaatcaaattcccattcttttatgaaagaatccagtcacataaataggccccaaatgtgcactgaatgaataaatgaaaaattttttaaaccctcaatttcttctttataaaggattaataagacatttttagccatagaaaatttaaagtaattttaataatcaaaagagaaaactttagaaaaatttttatttaattgtccttaagcaccacatggaattgatgatgctaatcttagaagcgttctttctctattttctgagtacaattctacctcctctttgagattaatctcaaacctttcctgacctccctaccagttggactggtttcagtgccaccccttttaaaaaatgtaacagtgctttgtatttctccaaactcttgcagtcatgtaattcctccacccctcctcacatacacaccattagattgtaggctcatacaccctacgatgtgtatctttctccatcacctttatatccttccaggtgcctagctctgcagtgtgctcactgtagagaatctataataattattttacttgatacatagcaaattattctttcaattagtcatagcaattaccagagtttcatagacttctggaaaaaagtagaatgtgtatgtattctaacacataatatttcctcatatgtaataacacagaggtgtgcagacatgtttattcatgtgtattggtcatgtaagcaccaagggaaaagaatcagcatgctgaacagctcagagctgtgaaagagcatgaagtctctaggaaactgaaaggagtggtttcccctttaataataggcagttacatcttaatgagaagtagtttgaaaatcaatttgttggaaatatgaaaatataaggctaagagattctggagtctgtatctaatgattatgacaacattcagtaagtcaattttcttatctctaaagtgagagtttggccttgaaaattattcagtcttttgcttttagaataccatgagcttaaattcatcagataagaagaatcaaatacctttcctaaagtgtagccaaattggtctaaatctcaaaccagcaagatgagttaatcactgaccaaattaaccacttatcccttctgctcacccaccacagtgactggtatacattttggaagatggttaattttctcaaattactgatatttgaactatcactactgaccattctactgcataaatcagtgtggcagttcactaaatagtccctgagtgtcttggaaagtgatgtacctttgaagtccccaaggagtaactcacttggcagagtctcatctaataattatggcatttaggacagatagatgtattctgtgctgcaatgagtgtcccttgctggcttaaaatgtcaagttttgtttttaaaaatgtaaaaattaagctaaggggaatatggtcattataatgatgaagctcaaatacttaaaatcattaatatcttttatggaggaactggttataactattacttagtttaatatttaaaagtcccaagacactagcatgagccagagtttcagcattttacattcctaaagcatttaaaatccaagatgtggtggtttgcatgtgccagaatgtgccacgggttcctggaaatgacatgtagtctttgaaaagctcttttgggcaattggtagataaaatgattaagtcctcatttgccagggtcatttattaataattgtatgggtttgggtcctcatgacattttgaaagtcatccctatctgggattcttgtgctgcattaactgtcttttttttttttttttttttttttttgtttccatccgcggtttctcctggcttgactgtaggcatctggaaagcagagactgtattttactcatctctgagacccagatgttaaccttgtgctcagttcatgcaaacaccagtatttgtggaacaaacaaaaggaatgtcattttcacatatttagatgacactgtaattgcatacgttctgtcctaagaaagaagaatttaaggaagccagagcatacctgagatttaggaatttttagtttatagcattttacttccaaaataaaaatgatagtgaaagtttaaaattttaactctctaaaactacaacagaccgtgatgaacgaagcaatcattttcccatgaaagagtaaacagacaaatcacatgtgtaaggactgaggaaatgcatacctacgatgttgtggttgtgcttctgtcttttaaaaaaaatggttcaatctgaaaaaaaaatcatttgcatgcctgttatatgtgattgacttctccactgtaacatcaaataaaataatcaaattgatgattcgtagctatatgatgataggaatattaaagtatgtgacaccctatgaagtgcattgttgacattttgtgtgcatgtattatgtgtgtgttattacagttgttatttcctgggaaggaatggtcgtgtacgttagtggaggtttgtatagcttttggcattggaagtggtctcctaatttagtcttaaacctgacagtatttttcatatgtgagtgtctctggagcatttgaaaaaatagtttatccttacctttaaatcttctgctaactatatatttcaacttctgggtagctttgatgattctagacaagtggcttgccagacacctaggtcaggatccaggcaaaaatgaatcaaaccacagaccctctaaggcagctgtctatttctcaacaggaatatgctctcctacaaagatacttttatcaggttaacaatgtggtatcagggagatttcagggctgtaccaggccaagctaataaaggtctatagtgaagttgagccacagtcaccctgacttacatgtttttgctcttgaccaagaatagctgaggtcaaaagtagaggacttacttgtcacagtgatcttctcctgcctttcctgctccagtctttgagttgtacttttgattctatttcaagacataaattctgccatatgagcctgaaagatttcatgaaattgccaatttcatgcttccaacatgccaagttctgagacagtttcaaagccaaatccagaagcagatatgagctctgagtgatatggttctgccatcagataccaatatgtttgactcagaatgtctgccttcagatgtacatgtgatagcagtaggtctgtaaattttgaatgtacctttgaaagaacaatataagcattaacaaattacaaaatatacagtattcagccaatgacagttgttgtttcaaagcctttatattattactctcacttcctacagacccaaataatggtctacaggttttatttttcatatgtttcaatgccatgatattatttaaaaatatttgcgtacttctgtgcatacaatgtacaatacaaaaattaataaataaaaacctctctattaaaatgtaatttctgaggatagggagaatatattcaacttaaatctaaatgcatatgaaatcctttaaatattgttcctttcctgaactatatgatggggacaaggtcatcaagacttgccctgtggcaagttgcagggcatgtttgggctgctgcaatggaagctatttttttctgtagtcaatgttgtcccactacactttggggagaatgaatgacagcatagccctactggagtgagctgaacatagacagctgtaaacaggaagggacaggaaaaattcctgaaggatgcatggtagatggtagaacatcaacagctttaaaacatggcagtgttttgtttttttttttctttctttctttctttttttttttttttttgtaaagccaagttggagtttcagtttggctaatgctgctaaggacaggatgactattattgatgctgtagcttggggggaagatggggaaaagcagaagacacatgtaatgttagcaagtaaaactcaagaaggatttatgattcttccatcagtcttttcatgcaagtgcagaaaagcctcatcaatggcatcagcaggctgccatatgtattagtcagagttcttagctgcaacaactgaaaactactccagttaactaaaacaaagaagaaatgtattgaaagatagcatagaaaaatggaagcttggaaaagtagattaaaaaggaatcaaaagaagcatggcactgattaggatatgcctacaggtacttaccactcatgagtagcaaaatcaatgaatgtctaccatataataagaaaaatattatctgatgagcaaaatatggacatgttttgctctaaaaagtcaaattcttttttaaaagatgaagaaaagtaaattaaaattttataaaaatatcgtttactttttaaaaattcaaaactttagacaaatttagacaaacaggtagaggacagttctgaagtttacttcttaatggtgttctcaaaattcacaacatttacccatagttcttatggtatatgactgtttataataattcagcagtcaaattgatgtatgatggtaatctattaggggaatgggtcatcattttctttctaaaagtattgtaatctaacatcttttaagaagcaatcaacagatattcattgattatgtagtatatgccacatagtatttaaggtgccatatggaacccttacctttaagaggtttataaactaatcaaagaggcaaaaggtatgattctgattcagtaaataacaatcacactaacaatcaaagcagtctactttctaaagagagtctttttaaaaatttgaccattattctgaacctaattttgtatcatatgtacatacattctttatcattacagtaaaggtttatgaagaaaaaaatagttcaccttgttaggataatcactaagtgatcttaggacactctttgtattgacaacgttgtggttaatatagctcaatccccaggatcgatttagcaaaaggagatgaaattaaggaatattatctatttgaaggaaatacatattaattccaattcaggcctcaccactacctacctattttcaaattgtctgtagaataaacagcaatatgtgaactttgcttcaaagtagatgccaatatgggctatcaagttaatccttaagacacttgctgaaagattatatgaagtatgtagaaaggtgggtgtgtgagctatctaataggttggaagtggtgacagttaagatatatagctggtttggaatttgggttattattttgtttgttttatttagagttttcagatctggaatattgtaagtagcttcagttggctacttagtttctaagcgctgtgctcatggatacaatagaggggaaaaaagtcagaccttctttctcaaggaaacagaacataatcactaacacatttactccgtaagtcacaagacctaaagctgtggagacatttgtaagataactaggaacttctgtatttacttctgtcacttggaagctatagatatctagctttctcgcaacaaggatcagtagtatttctttgataatgttcagaatgatttacatttattaacactcttcatgtatttattttctgtatgcatgttgaaataacatttaatgtgactgagaagagaaattatttacatgttgattattttgtatatcaagatgacatcagtcactaaaaaggaatgagcaaaatactgtacatgatggtgataatttctacttacctaatgactacaatgtataaaacctattagcttgtttccctgtgtttttttcataaatcttcacaactgtcccatcagatggaagctattatcccccagttgagattcgaagatgttaagtactttgctaaggccatcctacaaagaaatacagggctggaatttaaaccaagaagtccaaagtctgtagtctttctgctaggctttgcagagcttacaaatgacctaatagattgccttgcccagcagagccagaaattgcttccagaggcatgtctatattagcagcatgagttgatccctatgtgataattgtaccattaatgtaatagaaatattgagcagctcagaacttcctgaccccaggctaaagtgtaaaaagggagaaagataatagtctcctgctggtttcaaccagggtcatttccaggacattgtctggcctagacagtaagaatcagatgcaaattgtaacaatcttctttgatctgtgtgttcagcacaaatagatttatgaattcctctcctttagcttagttagtgttttgttggagtcagatagatactttgttaaccccatcgtcagtctagagcaatgttgtcatagaggcatgaccttcctgtgatgtatcaaactcttcatttgtaatattatagtcttataatagagaacacaatattctgttccaagactcaaacctaactcttctccaggaaaacatatgcaactgactctttattagattgttttggaaactttttattttactggtcaatcaagtttagtgacctatttgatattcaggtatgtgcacaatgtagacatttttcaaattaccgtatgaatttagataatatctcctattgagaaagaaaagactatcacatggaataaccttgatttgttaatctggctagcacatttgccattgttatatctattccctgttgaaaaagccttcttgtcagacttgtcatatgctgtttgtataactggtaattacagaatcaagatgaattatcccctatttttaaaggctataaaataaataccaaccaattaatataactacaccttccattctctgaggaaaaaaaagagaaaaatcaatctcatttcaaagtcatttattgatttgcctcccccacttccacccactgccataggactacatattaaaacctgtgattcttccccctactgtttaaaagaagctgccttaacacaagtgtcatggaattcccacatgacgaaatgggagagttccctgatccccctcctcccaggacatgtgacaggggtgtggctcacctgtttgcttgctgccactgctcaaacccctgatgaagggggaaacatgcagatggacaggtgcaggagccagggcgcgtgttttgagctccagcctcatggtagtatctaggggtgggtgcctgtgtcctcagtcttttgaccttgctgtctgcagatggcttaagtgttaaccagctcgatggaccctctgccttttcacatgggcagagggccagtgtgagagctttctgtatccttagctcttgcccagtgttccagaagaatggggatacacatgggcttgaaggatcaatgtgaggttttatggaatggtggaggtggctctcagcaggatggacagggagctggaaaagggatggagtgggaagatgatcttcccctgaagttttggctatcaagcagccaaactcctccttgaccactcccagctgtactcctcctggtgttcagacataccttctcttctctctttccctgctacaccgttctgccattcacctgcttgtctcctcatctccttgtcttctcctggagcctggggttcgaggttatatgggtacgggatagtggggcattgcaggccaaaacacaactttttgggcatgaaaacagaaatgcctgttcccacttagggctgcaggcctccagacttgagattggagcctttgcacgggaactgccctcttctacccagtatttccctgtctcctgtccatatcaatagcatgcttttcctatgactaggtaatcacaagctttttagcaatctagaaaatatttgggtgcaatgccctgattcattcccttagtttaataccttgcagatgaaacactccttcttttcctaagttggttatgctgccaatgctaaaaaccagggaaagggaaagaaatgactgtttaagtatcaaaatacctaagctatatttttcacttagcttgagcaacagcaaaccatgagttaattctggagttctggattttttttttaattatgatatcatcaagggagatcttaactcatgaattaaggtcattacagacattctgtaattactcttaaagaatgtatgctctcaagttactgtaaattcagggtaacattaccatatagggcaactggaaatttgctttggtaagaaaaaactgaaatacagacatatacttactttctctctctctctctctccccctccctccctctctctacacacacacacacacacacacacacacacacacacacacatatatatataatctctttgtcactatatatatatatatatatagtgacagagataatttcattaaaaatttatattagcaacctggcattaaaagctttatctattttgatatagggaccagtcccctttctcaccattaaaaaattatttttataacatattaggccatctgtagaggtggcaagtcatcatcccttgtggataaatttttccgtaactgttataatattcacctgctattttcattgttttgtggtacatgcctaattttttaaccactaaactttgtggaatctccttcagttctcacaggcagatgaatttatttatttttaatctttatttttgagacagtgtctcactctgtcacccaggctggagtgcagtggtacaatcacaattgactgcagcctcaacttcctgagctcaagtgatcctctgatctcagcctttcaagtagaaggaactataggcatgcaccactacgcccagataattttttattttttgtagaaacaaggtctcactatgttacccaggctggtcttgaactcctgagttcaagtgattctcctacctcagcctcccaaagggctgaaattacaggcaggagccaccacgcctggctactttttatcattcccatttatagctgagagaactgaagcacttaagatagctgagcttctcagtgaaatatgtgtgactctagactcaatttcttgacactagtgaatgacccttactgcctctatagctgttgatttaaacacctggaactcctcaattccataaattggcaatttattccattcagttcaatgtttaaataccttctttatacaaaaatgtgtaagcatccagtgcctggtgctgaaaagtgaagatcaggtggaggagaagaacaatgagtagcagaaaatactcacaatgagctgtatgtaatctaaagtgttattagaatggtaatatagattgtgataaaacgcagattaagttaggaggtgacgttttaactgaactgtaaacagtagcatacatttttgccaggaggctaaagcaaagaagacaaaatgtgcaaagatataagtccttagagtaaatagtgcacataggggatgagatgaagcttgtcatagttgttggtttagagcaggtaagcagggcttacatggcgagttctgtgttctttgtccaatgtgcttacttcaatacgtattttatgccaggttatataataaatctgtgaaaaacactttttcatgcatgcctaatatgtttttacaaacaagatttttcttgtataatgtttaggtctaagagaccttaactctacattgtgggctttagactattgggatggatcctgaattctttagattcttttccatacctttttcttaatatttaaggattaataattaagtattcttatgacattattttggatgctagctgacttagattttctttggaaaggtttatggcctttaagaccacattatcattctgaaatgaatgaatataatgtaaaagaaaaatgtgtatatttcactactctgaaacccttaagtgtgaaatttccttattttcctgtaattactaggtttggaaaattaaagtagagttattctttatgatgccaagatttttgaatggaatatttgctttctattgaattatataatgttttaaagaataggaaatatttatttggtcaagtaaaacaaattattttatttataattgatgagaagcattagggtaaaagatgtttaaaaatttaaagcatacttctaagacatagtggtgattctctatactagcatgaacttatatttataaaaataattcattgctagaatatgtgaaatggaagtgaggaatcaaagtacattaatacaggggatcaaagtagaacattccatagagattgtctttttcattatgtgaatatatacacacacaaacacatacatagaacccatatatacacccacattttacagacatgtatgaaccttttatttaaacataattttagaaaatcagaatctccagattctgaaagatctattttcatggacaatattctgcacaaataatttaagttttaccagaaagctgattattgaaataaaataatttttaaggatagattctcactaaattttttgtggattcaagacaagtgtgaattactcaaaatattcatgtacataaagcatgccgttaaaatgcagtttcttttactgaaacatgttaagaaataccatcttacaaggatgagaaattgtaaagtcatattaaatttgaaactgattatgtagccttaaggaaagtaatttgttatcaaaagaacatagcttcctaaaataatgctttttacagttacatactacatgttgaagtttgaagatgtgattgggctgctaggggtaggatgaaggaatgttcatggagtatttcaacatgagtgagttctcacacattttctcaattcttacattctgataatgtcaacattaagagcaaaattttcttagaaaaggacaggactaataccaagtgtttagaggacaagtgcaaacttatattactggaataaatccatacattagaaaatatgaatccatattattccagttgcaggattaacataatattaatgacaaagttccctgttcatttcctggcattcatacattaatgcaaccaatatctatggagtatctgtgaggtatgtatacatagctttcaaaagctttaaaaagtacagggacaaacataaagagcctatattctaaaatgttatggaaattagttttcatgtaaaacttcaactttgttcattcatctcagtcttctcagttgataccatcaatagccaattaccagtgataataacctgaactcatcctttcctcctgtcagcacattgagttcacctccaagttttctccaatttttatcctcaatatttctcattttctttctcttctttctgttctaattgccactgcaaagtttgggacttgtgttctgaaactaaattccaagattgtttcctttccatcgtgttatatgtgattaattgtccaaatgactgacattaatgactgttattaaagtttgaaataaatgattatccctaccacccccccccaaaaaaaaagaagaaaaaaattgaaacagagatcaccatcctggcaatgtgtgactcaaatgctgcaaatgcagaggtttttgatagataattttaatagactgagttcggaagagcaattgaaagcatgagcaatttgtaatatggactgtgcattggtactgaggaaacacataaggtactggcaagaacaaaggtcgatattagctataatttgaacctttgaaaaggttacatgttccagaaagaaagattgcttaaggctcttgaaatgcttgtttctgacagatgctatgataccagttagagattagtgagattagaagagagggagataaagagaaaaattctgcatttttctttgacatttctctattgaacttttttgtgaactagttatatttctaagatctatttcataatcaaagttcacatagaataaacaagtgtcatatccttacagtaaaatgagatagaaatgaaatcacttcataaggtgtcaaaaggtattcaaatgttacgtattgttctaactcaaagatgtgtcacctcttttgaatctatacatggctaaaataaatgcgtagccataatatactgcattattaatgctgtcatgcctaattaaaaaatattgctgtgagaacactgtttcataattttcattcatttgtagacttaatctgtctatgactgatgttaaatttttataaaataaatgcatattgacacctgtttcacataaatttgaattaaaataattatttcaggagcatgagttcaagtaggctagtatatatactctcttaacattttgtctatgtataaacttttttctccaatttagaataacttattaatctaacactgcttcatttcttatattagtgcaggaaatgtagcattcatatgaaatagtggtatcagaagtgaaatctaagacctgtttgaagccaaaatttacatatatcatcatttacaaactgtgtgtgaaaatatagcatttgaattttgaaacaatattgtttaagcaatttcatgcttgtaagccatctctatttctctttatatatgtatatgtgtatgtatctatagatcatacatatgtatgcacatatatataagtattccaatacacaagtgtaaaacttgattctattttaattatacaaacaaatattcacagagggcatttatttccttttgacttatctttttaaagctgcatattgatcatcattttgtaagaaaagaaaaaaaatttaaggtaccattagaatcaattttcatatgtcttaagtgtaagaggagtgattatacctggcttggattttcaagtctctgcatgagattacaggcacatgggtgacagtctcattagagttgatcattattgtaccccaagcaaaccacttcttgaaagaacaggggccatggatagatttgtcatagctaattcaatgcttgtggtcactgaggcatggggaaatctgaagagaagaggttaggtaataagtaagtagtattactgggctattatcctggctattttctatattcctaatacatgtctttcccttttattaggaggccaacagttaaagtggaacaaccaattcacgaaaagaaactaattcaccgatataatagaatgaaattgatttgtgagataggaaaactctgtggtttgtgaaatggatgttattaaattccacaaagagtgaatttttaaaagagtatgccctcatagcagctcccaaacatttgaaggttatctaattttctcttctccagtttctttgcctcctacctttcaaaactgaaaaaaaatcactcgataccaaatacatacatgaaaaagattaggatgaaatagctttcctttttcaatggtgccagtagttgttacatctgaaaagtttttttttctatgctatacaaccgtgcacagtatatttgctatgtcatgaagttgattttctttttttaggtagcacatgttcattgtaacgtatcgagcaatgcagaagtatatatatataagaaaataattataatttatcctccctccactgaagtttccaaaagcattttggtgtgtatcctaccatatctttcactctggtcttgtattttttaaaaaagtatatagggttcttctctttcttttccctttttaaagaaaataaaaatggaatcatactgtatgtaattcagttattgccattttcatttataaaataacatggatatcccttcatattaatttatgcataatatataatgtttatgatttatattgcctaggtagaattaggattttactcaacaattctcccattgatggacatgttagctgtttcttgttgtcttgccttcaaacaatattgcaataaacattattctactaaagacacatactttcaggtacactaaattgtgtactgttatttaagatgcaagctgtgctaaattttatctgaacaccatttaaagaaaagggttaagcaagtaaattacataattgtgacagtagagacgagtgaatgtggatggctacaaacttttcaaactcaaaagctgcagcagtagatagtggttaatgtactaacatccaacgaattggatctttgactaatttgctgtcctttgtgactattgctaaggagaagaatcctttagaactaacagaaatgtttaactggaactaaagacttagaatcttaatagagagatgtatgtctcactttttaccagtttgtattcaaatacatgatatttacttttgcactttgagtgatgttccagaaaaaactaatgtccaaattttattagcaaatataaaatgctcattacagtagctcaatgtgggtatacatattgataaagcaaaatcaaaggatacttgtagtatctacacaccacacaccatacaccacatccatgtttgggggcatttctcagttgttaatagcgttccttggatttagaaataaaataatatgtgatggcctctgataggtgaatttcatcactttaccctatttctcttgtgctgacaactgaattaagctagctcttcagtccatagcaaattatcattatataatatgtcttattttaatttatctctttcgagtacatttctcaatttatctctcttcatcataaagttaggtataagtgttatataaattgtatatacaaattgctatctgtgattcatatgttcatatttggaaaggcaaagatgaaggtttaaaatttttaaatgtatcaaattcatacaaagatacccattttgtccaaatttattcccttatgatgcctcgttttctgttttttacaatttcaacttttatttaagattcaggattacatgtgtaggtttgttacctgggtatattgtgtggtgctgaggtttgggatatgaatgtcccatcacgcagacagtgagcataatacccaacagttggtttttcaaccctttccgtcctctctcccttcccactctagtagttcccagtgtctatcgttgccatctttatgtctatgattacccaatatttaattcccacttacaagtgagaaggtgtggggccgggcgcggtggctcacgcctgtaatcctagcactttgggaggctgaggagggcggatcacgaggtcaggagatcaagaccatcctggccaacacagtgaaaccccatctccacttaaaaaaaaaaaaaaaaaaaaagttcaaaaaattagccaggcatggtggcgggtgcctgcagtcccagctactagggaggctgaggcaggaggatggcgtgaacccaggaggtggagcttgcagtgagccgagattgtgccgctgcactccagcctgggggacagagcgagactccgtctcaaataaataaataaataaataaataaataaataagtgaaaacgtgtggtatttggttttctattcctgtgttaattctcttaggataatggccttctggtgcatccatggtgctgcaaaatacatgatttcattttttatggctgggtagtatccggtggtgtatatgtatcacattttctttatccaatccaccagccatcagcacccagattgattctatgtctttgctgttgttaatagtgctgcagtgaacatatgagtgcttgtgtttttttgtaaaatgattcaatttttgttgaaatatgcccaacaatgggtttgctggatcaaatggtatttctgttttaagttcttgccacgtatccaagatttccatagtggctgaactaatttgcatttccaccaacaatgtatacgcattctcttttctccacagccttgccaggatctgttatttttagaatttgtaataatagacactctgattggtgtgagatgatatctcattgacgtttggatttgtatttctctgataattagtgatgttgagcattttttatatgtttgttggccacttgtctgtctcttgagaagtgcctgttgatgtcttgtgcccacttttgaatggttatttgttttttattggttgaattgtttaagttctttacacattctggatattagacctttgtcaaatgcattctttgtgaatgtcttctttcattctttagttggtctgtttcttctgttgatagtttcttttgctgtgcagtagctctttagcttaattagatttcacttgtaaatttttgtttttgttgcaatttcttttgatggaatagtcataaatttgttcccaaggccaaagtccagaatggtatttcccaggttttcttctactttgaggtcttacatttaattttttaatccatcttgagttaatttttgtatatggtgaaaggttcaccatatacaatttttgtatggtgaatttttgtatgacacatttgtatggtgtatttgtatggtgtgttttgtatgctgtattgttgtatatggtgaaaggttcagtttcattctccttcatgtggctagccagctatcccaaaacaattgattgaatatggagtcctctcccctttgcatatttgtgttgactgttgaaaatcagatggctataggtgcgctgctttatttccaggttctgtattctgttccattggtctaagtgtctgtttttgtaccagtccatgctgttttgattactgtagctctatagtatagtttgaagtcaggcaatgtgatgcctgtgattttgttctttttgcttgggattgctttggctatttggtctctttttttgtcccatatgaattttagattagtttatctaattctatgaaaaatgatattggtagtttgacagaaataatattgaatctatagatactttgggtagtatggccatttttatgatattgattcttccaattcatgagaataaaatgtttttccatttgtttgcgtgtcatctatgatttctttcaccagtgttttgtagttcttcttgtagacatcttcacttacttggttagatgtattcctaggtgtgtgcggtgggagatgggggagaatgtatttgtgtaccagatttggctctcggtttgaatgttactggtgtatagaaatgctgctgattttttacattgagttttgcatcctgaaactttactgaagtcatttgtcagttccaggagccttttggcataatctttagggttttctaggtatggaatcatatcatctgcaaagagaaatagttttactacttcttttcctatttggatgccttttgtttctttctctttcctgatttatctgacgaggacttccagtactatgttgatttggaatggtgagagtgggcatccacctgatgtctttatatctggcacttcaagtcaggaatttattctttggctgtgttatattattagtcaacctacttaaaaacaccttttcttttgctattgcatttttcatactcaatatttccaattagttctctttatgactatatgccacagctttttgttgccaatcactttatcttttaaaacatatgtaatgcttatttaacatttatatccttttatctattaatttaggtttgcatagtacaggaatttcaattttgtatattccttttataaacattaccttactcagatattactttgttacctcatattcctaggaatttaatacggacctaggtatgatgggctaaagccgaggctgtgccctccttggtaaggttaaaggaaggagggttggccaggcacagtggctcacgtctgtaatcccagcactttgggaggccaaggtgggcagatcatgaggtcaggagatcgagaccatcctggctaacacagtgaaaccccatctctactaaaaatacaaaaaattacctgggtgtggtggtacgtgcctgtagtcccagctactcaggaggctgaggcaggagaattgcttgaacctgggaggtggaggttgcagtcagccaagatcacgccactgcactccagcctgggtgacaaagtgagactccatcttaaaaaaaaaatgtaggagggtaattaactctaagcagaataccattggtttcattatcactcatcattagtagttcattctcaatggacaatcctacctacaccgaaatcttcctttacctcaccttctgccattcctctttccaagtggggtattccttacttgtaattgagaaagtttcttctgctaagatgaggtaggaagaaactccagggaccagtttcaaaaccaactgttgtctgttctctgtcatggggtattccaaaatccccctatattagccaactgactgtgctggcccaaactcaccattttttcagccgcatagtgtaatggagagtgggaaggatctccctatagatttttagagtaagaaaagaaaatacatacattcatttatgttatttaatgccttttctacatacgtgaatttttctgcttgactgcaactcactgtctctccaaaaattcaaccagggtccaatcaatttctgttagttcctcacagttccttttcacttattttttattgtggcaaaatatacgaaacataaaatgtatcaagttattcattgtaatatatggttcagtggtattaaacatattcctactgttgtgcaaccatcaccaccatcttcagaacgtgtttcatccttcaaaactgaaagtttataccctagaggggaggcaaaacattacctctaccctcttcaggtttttcaactgggcctgaacattaaattgacattaagatagatcaagaggagaaaaacatacaaatttatttaatacaagttctccatgacacaggagccttcataagcaagttaaaacccaaagacatagagttaaacatgtatcagctgaattggctgaagagtagtgaattatgaaaaggcaaaggagcttggacatggaggcttaatttggtggagaaggggccagaaagataagggttagtctaacaatgtttatttgtacagattgttcttgggctcaactttccatccctgatgataaaaagatgaactttccttctagtatagggaggacatctttcacatgggaatttcatcttccacttttaagaaacaagacgaaatcagggtgtttttctctcaaaatagtcaatataccagagtggcatgttctgaactcctaaaatgtagtaaataacgactctccattgtcctctccccacatcgcctgagtttctcatagtttttctattgatgtttcctagctccatcttcttttcactcatacctgtgggttatttgatgatttgccccgagcctttttccgttcttatttcatcaaggggtctcgaccccttttgctgcgatagtgttgatcattattgataatctaaactctaaatttcctaaatgccaagaaagaatactgaccaaatatataaaatggcatatttcatagatattagtatctactttggtgttgggattatacataatgattagtggaattatacataaaaagtcccagctttcaccataccagaaaaccaacaccatgggaaagtgttcagtctttggcagcactctgaaaaggatttttgacaaagcaagatttatgcacagatgatagccaaaaagatgtgcataaaactctgccatatgtgacagagttgaagtcattatcttacttgttgtggaaataagagaggaaatatgatagctatgtcccaaaatatatggcggtccattacatagagaagaaaagacatttcagagactaaatcagggtacaggtaacagtcattagaatactgacaattgctaataaatttgtgtgtggtgcatgcttgtagggggttcatgagatttaggagccaatcaaggaaaaattgatgaccacgaggtggcagtagcacatacaaattttatttgagactcttccacaggtgtgcattgagaccagtccctcacagcatgagactgcccagagacttaaggcaccagggctactatccataaaagaggaagtaaagaaaatgcccagagagaggaattggcaacagaaagtgtacttatgtatctaagtgatgtcactctgtagcacaatggagagtcattgggtcagagagctggatccaaagggcagcagcagctgagggactttatagtgcctggacttattatctatggtagcagatgttgagtgtagtttcttgaaaagacagaaggatgctactgactaaaattctgcttatttgggatatattttttcaaaaatggatgtgaatttgagtttggaactggctgggttttgagcttaacaggtcatagcctgctgtgaagaaataaactaggtaggggtcagtatatggaggctatcagcctattgatataccagtgctaaagagtcttttacttatatgacttcgggaattttcaagaaagataattttattgcagaaatataactggaattctccaaatggaatgaactgttttgacagtattatagaagtggttaaagagagattgcattaaatgtaatacaaaaccggtttgaggtcactcttgttgccatatttaatttgtatcatagcttagggttttaagccaaccaatctatctgtaatgaacagtaagcataaatatataaacacaatttgaatacttaagtggtattaaaaaaaccttaaaactgtattttgagtcaaaaattcagcagtagcagttcctagttctgtataaatacagaactgcatgtgtatatgtacctgtatacgtgtgtgtgtggtgaatttttataaaagttgaccaaatttattggaacatttgattgtaatatcacctgtttgaataaaatctaaaagcaaaattcctgaatatatgcttatttatcttattaatacttttctacatttcatatatgttatattacagatagtgatacaaagtagcactgaaagtttcctactttccttacttttttaaaaaaaattgaaaagcaacacgtaagtcctttcgattatctacttaggtgtatttatgattaaaatcgtatagaaaaactggtgtgtttcacttctcacttagcaatcccaaggtataatacacagctctatgcactgtatcatagataaactatataattatatttgcagtgatatgatttcttatccatttacatggcaattccagtgttgtttttttcccagcaattgtcatgcagtataataagtagccagtaggatccatatcttaccaaaatgcatcaaattttaataatactagaaaaaatgtatatttcagcatgaacattacaaaatatacctaatattttggggatactcataataacaaactctatatctgatagttctcaccttggttgtaaaagacatagtctcacccatggatttgacataaacactgtgtagcagagtaaatgatcttaatggctgtcagtttggcagtacattaactaatactaatgccttccttccctttacaccaatacatagtttctaagtgtggctggctagaaaagaaatttacaaggcaacccaagcaaaatttggtttcaaagagaaaatgcagacaattttggtttcaaagagaaaatgcagacaatttttttttttttttttttgagatggagtctcgctctgtcacccaggctggagtgcagtggcgtgatctacgctcactgcagacaaatattttaaatatttagtcttaccaaagaaaattattcttatgaaatagcaccttccttttatttcttgatatctacttaagtagaattagtaggagaaatacattaatccctagatggaaaaggtgtagttaaaattaaaaacctcacatcagagatggcaagtctgcactagcaatcaaatcagtcatccatttattataagaatttttaattagattgttataaatgacttcagtgtctactatgtatatgacattgctatgtacacaataggtctaccagttagaatttcttatgttgcattcaacagaaaacctaagtttaggtttactttgctctgctagctaatagattattttaaacattcagtagttattatgtttttccctgtcttgctactgctgtggttcagtgtcatttttagtatggctccactggtgagcacaaaattactgccatctgccccagggtctattcattcatttaaacaaaatgtccctcctccagaggtaaaaaaaaaaaaaaaaaaaaaaaaaaaaaaaaaatgtctgagaccttagtctgattaaattaacccagatgcctgaaccagttaccccatgcaaggaatgagattattgtggtagttttaggtaaattagatcctacacttgatgggaatgagtaaattatagtgaggaatctaacaattaagcatcatccaaaagtaaataaaaatttcattattttttctaggtctcgaagtttactttgtttcccataattgattgtcttataagagttacctgtattgtgaaaatgttcctttcatttatttctgaatgtccaggctcaactttaagcaatatagaaacagaacattcatttactgctggcttttagcacatctacatatggaacaagtccttcttctgtaaggtttgtgtatccctgaacaccactttttggaaattggtctctgcactaagctaaacaggtttttccctaatacaccctttggatcagtgaagtctccataataatctgatgttcctcagaaatactaatgcacagtacgtaagtggggtggactccgactcttacacctccatggctaccgtaactgccatattgctttgaatattttgtttaacctccctgatctcatgttcttcatttataaaatgaaaataagaccaacctcaatggcttgctcaaattcacttcatatagtatttgagggcacatagcctgctacctggtagataatgatttgtgaacaatcttgtaatctgttagtgaaagcttaaatcattacgactctttcagttgatatttgataacatctattgtctttaaaaataagcatatgttttgacctagccattccatcaccaggaatttacttagaggatattattagaagtattcatatatatttatgtaatgaggtctttattacatgttatataagcaatttttaaaattataagatattaaaagcaaaataatagacaaatagacaccctttcacatcttttagtcattgtcatgttagccagttttactatgagcacagcacattgataagccaagtttatcttatcatatggtttttctctgtttttttttccacaattacagtgtgagatccatgaagaaaagaatcttacctgtcttatctgttgctgtgtcctcaatgtccagaacagagactgctgcttagtaaaatatacagtgggtttaattatttaacaaagacagaaatatgtaaacacttattaagcatttaagtgtaaacttagtgcttatgaacattatgttcattatgtgaacaggcatttaagaacacgagaaggcagaccatatgatgacaaatgaacaaataacatatatatatcaagtgctatgggatcaaaattgaaaacttattttgcaaattttccataaatgatagcaatagttatgcctatctttattttcccctttacgtgtttccataatgcctagatttactgcagcatattttattacttttataatagaaagtgattaaaattcagtttacagtttttaagcttttctcttactccttcctcatctaagctcaccatttagccaattaggtacctaacaggtgtagaaggaagaagtcagagaagtagtgagttttaaataggggtcaggaaaatctagtgcctacctggaaaagccaggcttgggggaaggaaagccatttatggatccaagaagcaaaaagggagcaggaaatcacagagccaggcccattcacttatgtgttatttgtgtccatttttgcactacaataatggtgagttgagtaattgccatagatactgtgttatccccaaaacctaaaatattgactatctgatcctttaaagtttgcattttccttagataagacgtctgaattttttgactcattagataatatttgttaaccaaatgtagcctctccctgcttctcttaggtgacattaaaggtcgtgccaattccaaaagtttcaaagtgttgctcttaagtaaatatttagtttcttactctaattaaaaataagagagctagaaaaaagatacagataagtcacatgaagatattgctttcaaaaatgtggaaaggggaggtataaatttagaaagcgatatagaaatctgatgactgtactgacttttaaaaattatattcacatttagatttaaaatggagtggttattaaattctctaagtatcaatgtatgaaagtaaaacatatgaatgattgaaaagcagtgccatcaccgagaattgagttctctatgaaatttgacctttcatttacatttaaaataaattattttgaatacataaattcatggaaatttatttaaatacttctccaaaaataattgcttgggattcattacaatgctataagtagagcagatacacagtaaagcagtttagctaatttcatatcccaagttttatgccaactgaactatacatttgattgtattgattctgaaattcctctacagcaccacccctgttgaactgcacacatccctctataaatacaatctgttttgaaggtgtaagtcttttagttattttctaaagtttgccaaagtggcatgtgtctctgccaaaatgggaaacatgggacgatttttgtgcctctaggtggctctaaaatggcatgccaccatctgccactgggcatgttctaacgataaacatttaacatgctgtatctagttttacaagattacaagtattctgagtctttgtctactttgtaaccacaaagaaagttaacacacaaacacacttacacaaatatgcatgcacacaccaaaacacacacaatgaagcttttacatcaactgtttcacttaaggagaaaattattttattataatgctttgctgtttatgtgatgttaatgcaataatcaatatactatcaacaggaagatgagcaacataaaagtcacatcagtatcttctgaggtagatttctatttagtttcttcttcagaggtattaaaatttgcagattcagtattgtaacaattaagataaaaaaacttgtttgctgtacactgactcacaggtaatcactgacaccaggttatcaaaactttcttcgaaaaatataaatatttgaatgcaatttatgtgaaaagagtagtttgctttgttttatacataatccagtatggtgaattgcatatacgaaaaaagaagaatgaagtagattctcaccatggacactccataatttgtgtcgtgtctatatcatgcattgtttttgtttttttttgttctgttttgtttttcaataagaatatgaggtacagtgtttgagaactttttaaaaaaattattttagtgtacagacctaaaagtgctctgtatgtttcattactgctcttttgtttggtgatagatccctgcctcaaataaatacagttctattttaaattccctctctccctccatccctcattttcttccccctcccacttgtctagtccttttagagatgtatatacacacagacacacacacacacacacacacacacacacacatctcttgtctagtcctcttagagatgtatatacacagagacacacacaaatttcttatctagtcctcttagagatgtgtatacacacagacacacaagcatctcttgtcctcttagagatgtatatacacagagacacacacaaatatcttggctagtcctcttagagatgtttatacacacctagccacacacacacacacacacacacacacacacacacacacatctattcaaaccagatccattttctccctgtaagatggttatatgaatgaaggtggcttgattctcacacatggaagcattctacttaagtattaccatgctgaccatggttcccctttgcatcctcctttcctcctcattcagccctagattcctttcttgatcagtatccatactcacttccaatcatgcttaagtttatctccaatttctccgtttgttagaaccatcacttgacaatttaagacaattgtcttaaattttgcctgcaccaaagcagctgactagttataacttgaaaaaaaaagtacaaaacctcgttgattggactcacttcaaaatttatcatcacagatctcaactgagccctcaatactgccaagtattcccatgattgtactttttaataaattcacctttgcactctttatgttaactctgttctctagcttacttcgttatctccattcaactcctcagccttcccaccattacagctaaagaagatgcctttggagccagccctgccctttgtcctagacattatattttctcttctctcaagtatttgaatccagcaattaccctctaagcaccaattcctaactctgcggagtttttcatttcaatgcacaaaactaccttaatatcatccatcttaaagaaaaacaatgcaccctttacctctggactcccattattctgatctccgaattagccgtatttttaaaaatattgtctatactatatgaatgttcttggtcactgcccattgtctccttaattcagtctaattaggctctagctcccatcatttttctagttaatgaaaacagtccagagtttacccaagtaggtggtcaggtctctgtccctgtcttattagacttgtcagccgcaattaaaacagcgtacatttccttgtttcttgaaatgttttcttgtttaaacttccatgacatgacattagtctgtcctgttgtctgtgtccctctagtttctctaacctttgctaggttgccttgaccaaaatatttcataattttcaattacctgagcttgtttcctcctagctatcctctctcttgcttcattctttccataggcgataccatttagttcatgtcactgcatgtcacattgaattcctcaaatttagatgtggagtctggaccccatctcttaaaatcagactgaatatccactgcctcaccaaggtcttcacttgtataaagaatagacttccaaacctaacagttccagaaagcacttagacatccaagctccaaatcgtatgccctccagaagccctcctcattttagcaaatgggacaaccacacaccacctttacaggataaggcctaagatatatccttgattcttccctaccctcttgcctcacacccttgctatcagtaagtgctggtggctgaatctctacaaatccaccctgagctgaccacgtttcagcatttccaaagctaaaattgaaagctacaccatcattgtacccagcctggactacataaacagcctcccaactgttctccctgtcttctctcctcacttcctacagctcatggtccatattgctaccactggtctttctgaattatctatcacataattttgtttctctgcttaaaatcttgtaattgtgttttatttcacttggcataaaatccaaacttgacatatgattctatgcgtttttgcctgtggctccactatcatatctttccattacccttcgtgctctctggtgtttatttctcccaaggcccctgacattgatcttgcttcttctcatgatgttcattccccagatgttttcgtggcttctccattcatcttccatgatgaaacttgaacattatcctctgattaccctaaacaagtaactggtccatcagttacatctaccacgtaactaccacattacttgtttctttataatactgtttagtaaagttatttgttatcacatttttggtgtgtttatggctcctaactcccaaccccaaatctgtaaactctttgtaggcaagaaaactatttattctttaaacgtttcaccaatgcctagtgtactgcctagcatgtagaaaatgctcaataaatttaattgcttgaccgactagagcaaaatagattaattattctcagtatttttttaattaaaaattccatctcattcacaacttaacagatgttaaaatattaactgtcttttcttgctggtattttctaatttttcctataccaaagaggctccaaaaatttgtttttatgaatatattattcatgggagggtcagtttagtggcagagttagattttttaagatagtagaatttcatgagatggagtgaaagctctagttagacatggacctcagagctggaagcccagaatccaatccagatttaacaatggcttgttgcacagcatggagaagttgatttaccttcttataacagtttcttctttaatatatagattcagtattagtcaagtcccaactatacagatagggatgtttgagaattaattaaagagtatctataagattctttgacttgactttaaaatgtatcattaaagtagtaaaaaaaaaagatttagacattactataattaggaactttttttcatcttttatcagctagttaacattgtcaatattgaagaataatgaacaccactggcatactaagggcagggagttgggaagagtcagcagatgcatgcaagaaggaaaggcacagcctacagacaattaaaatccattacgaacagtaagaaaactggctaaaagttagcctactttttattttctatgctagcaattataagcaatgtcaatgacaaaatatgcttccattaaaaatatatttttttctttttggagttctaaacaattgctatagttactgcagagttttaataatgtaagtgtaggcttctaatgatccaattttatgccttttcctttaataaatattgtaatctctatggaagttaacatggagaactctcagtcactcaataagacacaactacatttgttcatttcaagagtaagttcatattggctctgaatcattctagcttccttcaagcgcagcttgaatgtgctatatgttccttcattagacagtaggtatgaagcaagcaatactggcacagaaattgtcgagatgaaggaaagaatgtgggtttcttctattctactcttctctgtgaccacttgaagatttcgtgtttaaaattttgaagcccccggaataggctttgaagaagctaaatcaagaatagcatggtaatttctgattattgtcaaatggattttaactaatctctgccatagttatatgtatattaaggactttttctaaccacttatatacatgctacttcaggagaaagaaacttttagaaattaataaaaatttaacagtgaatatagatggaaaattctaatcatcttttagtaggatgtgaatatatgaagttattgacaaatttgtggaaattatggctggaagaaagaaactaatgctatttttagtttttattattattattattaatatgtatattccctgtaaaaaattaatagtaatagtgtcaattattactttttgtactgatttgattatataaaacattttagtaagaaattttaactataattttttgttatttcttttttcatgattatcactaaaaataattttgttgcacagagaagtgatgtaaaatatgacccatttttcacatccattattctaggtatgaagaaagatacaatcactctttctttaaaacatttccaatcacatacacatatttgttcttgatcatggccagatttttagttttcatgtctatagaaaaaagttgacatcattcaaataattatgattaattattatgttgcactgttcaacatattagaataaaagcatgtctgtagaagtggggcctacttccatttcttcttgctgcattataaacataatgaatactaattttaatcatccaaataatggtttcatgaatttctcacatactatatttcctgttttaattgtcaatagtttttttattaaaatggcaaaaatcttgaagtgttgagacttcatctgatcagatcatttttcagttctgaaatttgctgcacataaatgtattatgtataaagaaaaagtgatgatcaaattattatttaagaataaatataagcagcaaataagtcccgtaaatactagaaattatccatgagaaattgttcatgctttttatactgacacctaaagttagttatccttcaagggacattcttatctacttgtttgattaggtgacaccatctaattttgcagcaaactgtaaaattcaattctccttttctcatcccactaacatagggggaaaatacacagccttctctgttttcaaacggttagtttcctccattcttactcattgctgggagattgagtggctctctaatattttgtttcagcttctgcctatgtgttggtagaatctattatacatgtttctgttgcatgagggaaaaaagagaaagaaaactccttagtgcatttgtcctgtaagcctgttagagagaaagagctcagtgaatatttgtggactggataaatgaatatagccaagataatgtgttttaagaagaaccgtattggttgccttgctcactatttttctgaccacctttacactttctcaggatgtaatctaggatgaatacaccaagtcaagaagctgccaaaagcatgtccctgcaagtccgctcccttctcttttctcacctcaatctaccttaaggaatagtttttggacctgtcaggttcccagcaagaaacagatggagtgctcaaatttagataatttgagaaggtttttataaagggactattgacaaaggaattatttgaaaatgtacacgttaatgcaattattcaagtgtactttggttatatttattataagaattatatgttttcaatatatttatatgtaaaaaatataaattgaagaatctttaatttgctaagtgattttggatttcgggaaatggtttagcaaagagtttctttaaaagaatagaaatgatcatttctgaacctcacaggcatggcaatgagtaaatgaggtcatctgtgtatgaaattcattggaaactgaatgttttaaattcaaggttaaggtgagaatgtaccatattattactagtatttaaaaggtaagaatgtggaatattattacaggtatttaaggggtaaagatatatttcaaaaaatattaattcacatacaactcttgaggaacatacattgacatacataggtataaccagctagctaattttcttttgcatatctgcaaacagtgtcatatccatgcttagaagttagataatgtttgaaacatagcagtttttcagggattattttcattatttttgttaaataatcatatcctttgtttcaaattaattttatttacttggcttgtggataatacatgcaacatactggctacttattcttatttaaaaggacaagaatttgaagcactattttaacaatgtatataattctccatatcgattgggactgaattaaatcagtcaatcacaaatgtgtcacaaaaaataatctggcacttgagacaggaaactatatgtcacacaaattgccccatgtaattccagagagcgtgttcatctgctcaagtattatcacggaggtattccaggttgcactttgtacctctcagctcagtaagacatttgagtgcacagtcagtacagtacttgccaagcagggggtagagatttcacttcaaatgcagggagttgtcaatgaaaactcagggggtggccagatacaacagtgtattagggcaaagctgaagcgttcttggaaatgaaatccatttctgaggtgcagtgtcacattttgatattatttttcatttattatcaaaaggagctcttcccttctgtttcatttacttgtgattttccaaagacaaaaacttaagaatgtgaaaacaagaaagggtaaagaaaagaaacttaatgaagcttaggtctacaaagtagactatttgcctgtattttccagaggtatgaagacaagtccaatttatacctgtaaaggagtgttataattggaaatgtttcaaaagctagctctcacctgaatcccagaggcacactgtgtttatagagagtgccgcatgctctgctctcatttataaacttggcaatttcttttaacagaaaagtaggcaaagagacaggtgtatgattccaactgcctggagtttatttaaatagtctatttacttttctgttgagtataataaaaagtatttaccacagcatatgccacatgacagggcacttttgaatttttagaaaatcttatgttgcgagaagacagactttgggaactaaatcttcattagagctgtgatttaactagcagattccatcagcgtacaagcagtctcaattaaagctggatgaaagctttttattagcttgtctctttagatttcagagaaatagtatctttccactgccaccctcacatataatagcattaagtaatttcagtttcaacttagcatcaatattgttgagaaggtaattctttttgagtatttcattcagctctcataaatcataaacacacattttagtgatagagaacaatttggcagacgtatatctgtgcaaaaggctgtggcctgataataatgcagtcggacagtgggtttcaaccattatttgaatcgactacactaaggcaataaattattttcattttagaatgacagggttgcacatcttccatgctgtgcctcacctggttgtggttatcacaaacccctttattctataacaaattatggcaaatggaaagggctttatagtgatgacttgtaggtaatatctcctgataataaggatgtaacacttgctgccacaacaaatttacttcctgctggcattttttatatgatgttgcctgccgtttttctcattgcccttagatgccagaggctttcatatatggtctgacaggtggtcgaagataatccatcctgtgaagtacttttaatgtgaagaatacatcatctatcatatgtgaatttggattggtttcattctccttttcttattcctggtataattaatcttctacaattaacaatgtgtcagatcaatcactgatttttaatcaggataatttaccaccttaaaacaagattaaaactgatttttgagcccatgagtcaaagacttgacttcaataagtttaagccaatctaaagaccacggaaatatttttatggtattaaagtgactctgtgttctgttttaaccacacatgggagccctttgtagctctggatatccttccagaggaggaatagtgcctgaggcctggctccatgactttccggcagcctttgagggaggcacagagaaatggtggaggcgatggaggacagagacagcatatcaaggttttgtttgaaccagacaaaagccagagtttgatcagcaaatcacagaagggaacaaatcctacttgtgtcatgtggaaatgaaagagagaaagcaaacaaatcaggctaaaacttaaccccaaatgcctgtaaagactgtgggttttcattgagttaatttgagatgggatagactgtgagatatttgggcccaataagatgaccacttgattcagatatcatctatgaaattctgtatggtcactgtcagactgtcgttcatgtatatatacatatgcatgtaagtgtgtgcacgtgtgtgtgtatgcacaatcctttttgcacatgtagctaatggaaaaatttataaccgtgttttgggagaagttgtgaaatttatgcaggtttgttttgaatattctggtgactgctggacaagctgagctaaattatattggctaaaaaaactgagtattttgagcagatggttagtttctttatattaaacagttttccacaccaaaaagcagtcagtcaaacttcctaatggcactttgatatgtatgccatttctgatgtggcatagacaaaatggaactggaaaaaaatcatatctttgtacatgggcaggcctttgtgggctaatacagagctgtcactggagggagggagtggaactccttaggttgtatacctccatttagactcatattaagcttctgtaaaatattcagctcacacattattctgactgtctcatgtggtgcaaaaattagatattgctgacctggtactacttgatgaggcaatatcagccctaagtaacatccttcatgctgatttttgtgtgaacagtcaattgacaagcctagacatctgaacaattgagtgctagcatcagctacctgttggttttattttattttttcttattttgcctttcaactttattttacattttttcttttccattatcttttccctgaatgacctttacagtgtgtctttttttggtgagaatagacagctacttagactgaatgttttggactttttctgacctaaactcagaggactaagattatactttaaaatcaatcttctaagtctttataattatttgattccagaacaggaatacatgtcctatgaacatgtaatttatgagccaactcctcaggaaatcaggcaatgatatagcttggatctggaagccgtaccctaacatgtggtggtatcaattgggaaagattgggtatagaggacatttaagtttgacaggtatcaacttatcaagagacagggtccatcactgggactatgcccagttccatccctgagataccaatgtggggcaaatcaatttcgatcatctatttttagatttggaatgcattttcacacacaatggtgttttaaatcagcattttcaaaactgatctagacattttgagcttaaaaattcactatgataatttttattttatgtttgtatttatgtcaacaaaaatctaaatatattacattaaaatatgggcagctaattatgatgcctacatttttgtttgcatttgtgattgttctggtaccatacattgcatcttaatcgatgtggacttatcatgttccatccatatcaaatgaaggaaaagaatttcaaaatgtgctttatcaataataatttgaaatgttcagaaaaatgacatatggggcaattgggtcatttagtacataaacatgtatagagttatatagcaccatatttatgtcagaagggcagtatggtttcatgtaaacagcatcatttgtcactttaagttagagttagtttagatttagttgtcattgttgatttgtttttatttaatctgttatttttgattttgtaagcactatatactatgttaaaattaatcctagttttatatttatagatggttaagtaaaaggtgactaagaaatattgtagctgaacccggtgagtttgaaaaactttgcttttctttgagactttctatatattattcacatttgagaaaaactgttctagatgacatttaaatggtaagatacttcaaatatattttggcgtaagtaggcatttgaggactatgctaaagctctaagaactatttggaacactgtttctatgggaaaataatgttggaaacttttctgttagcactgatgaaaacataataggcaatattctgtttgttgttatccaatccaaaatacttaaatattttctaaaaattaaaaaagaggaggtggctgtcccggccatccttactaactcaaaaaataaaaagcaatgcccctaagttgaaaaagcccaaatgaagaggttggagggcacagggcaggtcggaaagaaagaaaaaaaccaaagattctttctcaacagcataaaatgtgtcatgatgtaaaaagctaacatgctcagtattgtagtaaacaatgacattattttgcacatgtaaggacaacgatttctatatagcataaatcattgtttgtaaagagaaataaatctagtttcataaatttatttttacattctgtattttcctcaaagtaaaataaccaagtctcatgggtggaaaaaaatggtgagccctttgcttaattggaataacaatttcctttcctccagtcctcactaatgttctgctattcaggaacacattgtgaatttgacccacagtcatattttctccaaatattaaataagaaattcacaaataagtaaaccaaatcaaaagatagtaagtcttcttaatgaaatatatatctacatatgtattttctttctatcccaagttgatacacagcttcaatggcaacaggggttttgtgtctatggctatggtctcacttctctgagagaatattttctgcctgactgctatgtcatggagccaaatacctcatagactcagcctttgcacacacctcacattggctccaactactatccaatcagggtatttttattaccaaataatatccaaagacctatattttcttgctaaatgtttacttcatttcatttatttttaatgagccttgtctgtatgtgtttgttcaaattagttagatcaaaattatatataagttaggctttcttgtttttcttttcttttttttttttttttttgagatggagtttcattcttgttgccaaggctggagtgcaatggcacgaactcaactcactgcaacctccgcctcttgggttcaggcgattctcttgcctcagccacccaagtagctgggattacaggcatgcaccaccatgcccagctaattttaatttttagtagagacagggtttctccatattggtcaggctggtctcgaactcccaacttaaagtgatctgtctgcctcagcctcccaaggtgctgggattacaggcatgagccactgtgcccagcataaattaggctttcttaatgggtatatataggtggttataaagtttatgattgttagcatccttgaccacctaaattcgatctagatctagatctagatctagatctagatctagatctagatctagatctaaatattctatttagaatatcctcttgttgatttctgtgttcctcatggttaccagcatagcttccttcatggttttactgcttcctaagctatacatatgtacaactatgagtatatcactgtgaggtagtcttagtaatgtcttacagctggtttgtgacaattaaataaagcaatatttatttgaaaagccctgcaaggtgtcttagtgtgggatcacctggtagcccactctgtcacaggaaggaatggaaggagggagggggtagggcaggcaggaagaaagggagggaaggagggagggagggaaaatttttatgatttagaggcagttttgagacttggacaattcttgtatgtattttttttcatgtaagtaattgttcgggaaatacaaatacaggcataaatcctaatatctgttaacgaattgccttcatgaatgtggcacttttgttaaatcacatgggcttctttaatcaagatgcattttatttctgagttacagccaacataatttgtaaaggtaatgatatatgttattcagattccaatacaaagatttttcatgaaggtataaaagtctaattataactgctgaagggtagactggtaacacaagcattcattgataagtacttcttgagaagtccattaaaacaaaaagaaaaagagtgagagagaaagagagagaaagaaaagaaaagaaaaaagaaaaaagaggaagaaacgaagagaaaggcgggatttttaaatctttcattataatacagatagccaagttattttggctctgggcttctaagtcatgttttattttcattggtacttattggttcattcaaagtaaacagagtatcaaatatactttaaatggttgtgtgtattttgaaatctacatacaaggtaaacggagtagttttagcaccaaccatctcaaaaagatttttgtcccgtggaaaaacctacaagtgaatactccatggcttacctgcttcctggattttatgacttcatccatttggcaatagctagaaaagagtgccttcttagctcaggcattttctatttctcaaagtttgaaattttcaaaaaaatttggtctacaaattataaaataataaggaagtatgtaaaaaatcagtggtggctcatgcttgtaatcccagcagtttgggaggccaaggtgggtggatcacctaaggtcaggggttcaagacctgcctgaccaacatggtaaaactccggctctactaaaaatacaaaaattagccaggtgcggtggcacacgcctgtaatcccaactacttgggaggttgaggcaggagaatcacctgaatccgggaggtggaggttgcagtgagccgagatcgtgcccttccactccagactaggccacaagagtgaaactctttctcaaaaaaatcacctgtccaaactgacaccctagtgagttgcacatctaatagatgacatagtttttatttaaaataaaaaattattttcaaaatttcctaactaggaattacagaaaatgagtcagaagggtttaaatagacccagttgaacatgacaaaaaggtttatatgagattgtgtccagtacagtattttcaacaataaaattaagaaaaaaatataaattaagattaaaacatttcttccaatcactaaagcaaatgaaccagaaaacctatagctcaaattatcacataatggtgaagctcagattgtcatgtcaaagtggtggtaaatttctcaatttacatgcaaatttcacacatatgtgaatttctcaaaactttaacataactgtaaaattctcatttttattaaactttttagcgtctgggaaatagagaatgctgaacgatgagtcaagagaaagactcttcaccattttgacctctgtaatctacaagttacttttttcctcaacttgtttattcatctgtaaaattggtatcataaaagcttccctccagggttagtatgaatgttaaattaattaatgagtataaaagtgaagtctaacttgtagaatgtataaatatataggaaatattattattaaatttccacgttaacctcttttcacagctattcctttatagggattagacatagaagcttcaatgcattattgtgtaaaagatgaatgtgcatatcacatgatcatatataacactccatatagatttaatttcttaatgctagagttccatgtttttttaaaaaaatttccacttaatgtggagaaaaaagggtctatccgtatatttttattcatatcttatttcaagcaagttaaatcgtcactccaatttcttggatgaaatattggatcccaaatatgcatttaatataatttttaatatatttaacctttattaaaaatactttcttggtgagtctatattttttttcttggcttctttcatcttgttttgtatttgatccctcattcttcattacatttatttccagtggaataatttatatatctgaaatacagttgttagagaacttagcatgtcctagtaatcatttgttttgatgatctttcttagatagttatgcttaacacatacctttccgagactgatgatttttatatgaatgttaacattttttagaatgataaacttagagacaaatgaatgttgttttatttcttaagatcagccgtatacaaaaacacactgtacctaaggtcacctatttagaaattatgtcttgatctgtctgtagaataacacagaaaaaaatattaaagtattatgaggtgaaaagggataagaaactgaaagttttccgtttgatccactgagacctttttaccctaatgcttattaatatgaaggaatagcagatgtatatctaagtacagacagagggagaaatgtttgcaaaatataaattgcttagatgcataaaatgctttgggctttctactaaacaacactaatatcaacattatttatcatactttataatacaacattctaacattaagaaatctttgtagatttattgacaaagtacagataaggattttgttttattttaattggtagtattctatgcggagtatgcataaaatcttaccttgtttcattgcttttattaattcgtgggtatgcatatataacctttgcttaaggttaatatgtaggcacatgtgacaaatggaggaatgtatgagtgaagaacaaaaatttggagataagggaatgctgttgacattctgtatttgtaaattattagataaggagcatatttttcttacatacaccccttgcttaatgcacattattcttacacaaccagctgcctaaaatgtttacagccaaatagttgacatagggaagttcatttatctttgaaacctttccttctctctctctgctttttccaatgcatctccacccaacacttcttgatggttatgccttctattttcttttttatctggcaaaagttgtttaaaaaaaaggaaaagaaaacaagagggagagtttctctgaatatttcatccagtggcatgctgtaaagtggagaaggttagatctcaagagaggtaatctttgccttgagatactcaaataaaaagtaggtcattattccttttaaatggctgcttagaccctggctttttagcctgatctaaagctagatgattgaaagaataggtgcaaggttatggggttgcttgcagagaaaatcccatagccagcattttgtaataatgcataaacaataatcttcattgctaaataataaccagtggcttcatggaaaacttggtgtggtattttttgaacggattcccataagtttcataaatatccattaaagtacaagcaaaaggtaaggatatgatagaatcagatacttagaaggtcaatatgatgtttttcctatttatcattgcaggttattacataataaatttagcattagcaaactgtattgatagtcgggaccacataaataattgactgtcggggccctggtgttcttatgtgtatattcatgaaaaagagtcatggttgagttgacaattgtatggttcatgcaataaatagctgagtaaaaagcattatgcttacttccattcaccaacatattttgtcaatgatatatacttgcagacgtgtgattattcaataggacatttttttgttagtatgtgagatccaatgagaacatttaatttcaattcagtatatatatatatatacactatatatgtatacacactatatatatatatgcacaatacatatatatatatatatatatatatatatgtattgtgcccttacctgtgacagccactgtgctaagtgctcagggtacagcataagcaacgtagacaacaatgctgataactgggagcttgcagagcagtggagtaatgttttcaggaaaaagcaattgaaactgtaaatgccatgaattatgtatgaccatctagactataggaagttttcaaagaaagttaacatctaaaataagatagatataaatgatgacttggaattagccagattaaggggacagagactagctagaattagagatgggtggagaatgaaaaactgcaaggaataaagcgcccagtagaggcattctattgttcacatatggggtgggtgagggggaaggaaagataatggcattgtcacagtgtggtacagtgtcactaactaaagagtgcatgacaggctaaagagatgaaacaaagaaatctgctacaaaattcagcagatttcttactaaatggtcaatttcttgagttctgatttatacttttttactttttcaaggacaagcacagtgtcctgcttccattattatttagggattgtttacattttgattattaggctagagtaatttaagtttggcatgccttctttacaacataatggcaaataattaatgttcatgggactactaatgattatgcaaagtgtgacagtcactgtgtgaaaccctggagataagacgatattagacatggtctatgctctttagtaacttacaaactacacaatatatagaggcataatctgccctattctttaatacttgcaaacatttccaaacaaatcattgtaggtatacttaaaattagaagagctgtacccttgttctatctcctgagtctcagttttactttaagtcctttccatccatttatgttcattctctagaaaatcacataaattcagaaggagaaacatgatgagtttgcaaataatttgaatgctgatattctttatcataatttcagaactgagtttagaaacagcattcttatcaatacaatgtcttcttgcatgattctgggaataatatttatctcctctgaggtaaattttcctgttggtttcttccattttttcttatttatgctacagtttttttaaaaaatattaataatgcttacttaagcattattatgtagagtggaaaacagagttgcagggacttttggtgtctgtgaacacgggcataaattggaaggctttaacagggaaataagcattatttccagcataatctctggaaatcctatgctgagagaggctctattctggggtaccccaaacacactggtttttgtagtgcttttcaggttattcaattattataaatttttaaatttccttccagttaaatgcttaagttctccccagctccctgaagaaaatatccctggctggttggccgtcaatagctctgcatgtatacaatatacgaaagtggaattgaagggtaaaatagtcatccttcaacacattacctgatttccaacctcatttttcactcctgtcctccaacctacttccagcttctaacttcccgagcactgtcattccgtcaggtcagcaaactctctctgctctaatcccctctccttaggctttcgtctcacctttcttcacttggtttcatctctccatattcttgaatatgcttttcatcttttagaatgttgtggaattttcttgtctgtggaaggtatttcatccatattttcccctattatcagcctatagtttttgattttgcttttcttgattctcatttaaagattacatcttctcagaaacagaagtacagtagatttagccctggtgaaaatccagggacattgattcaggtctctcccagcaaagcagatggagttgaaaactgctgcatggtatttgtgctgatgtgctgcttaaggctttttccggactgaagaacctcaatattttctatcaacttttaccttcctcttcacacttctcaggtcacatattgaactggaagctggcacagagttctcagaaaataaaaccaagaatgttcaatgtataactgggaaatagcaatacaatactcttttgaaacataatgtaaaccatattctgctgttcctgaggaagcttcttacctgtatacttgatgagagtaaattaggtgaacattttgaccactttaggcaaagtccatataattcctgatgagagtcattccaccctcatggaaggaggacactttgaatttaaaaagtcatcatttcagagtggactaaatttgcaatttatgatattaataaaatctttaaagccaatgatgcagagataggaaggtggtaagagggaaatcatctttagtttttgacaggtattttaccagagttctttgctgttgctataaatcaagcttacattattattctttcatagtttttggttttgttctgtttgagaaagtagtgtgctcatgaaagaacaatccacaatcagggttttggtagcttcaactaattcccatggcaagtataactaattgtgaagatgactttgtgagaataggtgatgatcgatatttgtggacaagaattcttagtgaaatcactcaactctaggcaaagctacagtttaacattcctattggaagtgcatctcatttagaagtacctcagacagctggtaaaactaaatataactatgtcttctagtatgtaacagccctgtcattcatccggtgtcctgccttcaatttaattgtttcatacatgtgtgttcctggcatctgaaagactcatttttttcaaaaaatgataaatgtagttgtcaacaatgattatgcactgagagcagtaaagggtgaagacaacacagtgtcacaggaaaagccctgagacacaagaatagcacatgataagcaaagggaggtctacaaattatggcattcctaagtctgaccgtggaatgccattcctgttcattccaaccagagatataatttttacatagacaaaaatcaaccattccgggctgggcacgggggcacatgcctgaaatcccagcacttcgggagcccaaggctggcggatcatttgaggtcaggagttcgagaccagcctggccaacattgtgaaaccccctttctactaaaaatacaaaaattagcaaggcatggtggcacatgcctgtaatcccagctactagggaggctgaagcaggagaatcacttgaacctggcaggtggaggttgcagtgagccaagattccatcactgcactccaggttgggtgacagagcaagactccatcaaagaaaaacaaacaaaacaaacaaacaaaaaacccaaaaaaaaaaaaaaagaaaaagaaaaatcaaccatcccctcacacacatacacacacacagaaaataaataataaaaagtgaatcagcgatatcaaccaacttctgtacaagaaacagcagctagcgtagattatctaccaatattagcactatcgagttgaacaatttaaggatgaaggcagaatgtatagaaggaatgaaagcaaaagtacagtactctagtagttgaaggaaaaaacaaaaacaaaaggtgagtaagtaatggctattaagcaaaggaattttaaaaataatttgactgattttaaatgttactttttcactatgttcagatatatatatttggcagatgtactgggagctatccctaattggcctgaattccaaggacagtgtatttagataccaagagatttctatcccaaaagtagctttactataatgcattcagccttcaaggtccatggaataaagtcttatcagagctaaggtatttatgaagatgaaatatatagggagtgtctcctattacacacggctacaagagatggatttctttctcaggtcaaaatgaatttaactcattcattttcagtgttgcatctcagaaaatcatgagtataatttttaaaagtgtaaacattttgtaggccgttaacatgtttggcttttttttctgcagaaaaatataatggaaatgtccttcccaaggcgaaaaatactaacaactgaaaaaataaagtcgtagtcctacccacttaacctttacattcctgtcattacaggcatgaatgtaggaacattcagatattatccaatgcttaggtaatagtgattaccagcctgcatattccagtgaccttctaagtatctggcctgatgtcctcacataaattttccagtgaggttttagaggttttcttcacatctttaattgggataaagctttcagtctctttctcttctcctgttagatcaacttttcccttatttgctgatccacagaagtgtattgctcatgactgaaactcattaacctagaaaccagagcacatatattcatcaatggcagtttcttgcaaccgttactcttctttactatgacaccatggaacatgtagccatatccttacttttatttaccacaagctttcagtttttcccttggcctggattggttctacattctttaatctaaataagtgtaccaatgaactgggaaagtagaatacattgagaaaatgttctcctgtcccctaggttttcaaatttgatctcaaattgaaagtcactcactgtacctatatgtgttcacttggttgcagacctgtcacttgactgtaatcatgcttgatcattcacgctgcaggattctcccttagacactctcatttactggcaatactttctctgccaaaagtgcaccaccaccatgccagcacctcttcaaggtctgctcattccacagcgttttttgtttgtttgtttgtttgtttgttttacaaaaagaagactccatcagttgcttacaaggtgaaaacgaagagcttatgtcactttttctgtctttacattctttgtatcatgtacgtactcttatccccatttaaacacttcttaatttcagcaatagactctgtatcagtcacaccccagtgcccatagcaattcctacatcagcagctcatctctagtaagaagaaaaaagcctgccatcattctttatgaatctgctttgtaattttctgttatctactctctttcatactgtatgagaaatttcacttacaccaaaatgaaccaggctgctattattgtcaatttaaaagcaatattctgatatagttcataaaattatatttcataagcacatcacaatttaaatatttaatatgaaaccttaatatcaattcataagcacataacaatttgaatatttaatatgaatacttcacatcaacctgaattgataatgagatatctaccatagcataacacattgaccttgtaaaatacatcaactgcctcctctgagccaatcaatccatccaaatacatttacaggtaaattttgttttctgatgaatcatttttcagctgatttcctattcaccgggttagtgtgacctcaaagatagtttgctttatcttataaacattaagatactttatgcagcatgaggctgcaaacagaatgtaggggcaataatctcttctgtgagggcaatttgaggaagactatccacatcggcccattcatagtgacttttagctatgacattccagacaaatgttaaatatgttcagacattgtcaactgacaacattttaacatgagtatgtttaaaagattattctgagataaagtcgatgaagtacagagaaagtctactttctaatataatgtatggcaggttggtaagaaaggacaaaagggataataaaattacaatgtggcaaggcgattacaatgtcactgtagcacatatttcgtttggtaaatacttcctaatatgtcctatcatgggctctttagatctttaacatttcttagatccagaaaaattaccttgatatcattgtatttttctttttttctttttagacacaggatctttctctatcacccaggctgaagtgcagtggtacgatcaaggctcactacagtctcgacttctgggctcaagcaatcctaccgcctcagccttgcaagtagctgggactacaggcacatgctaccatgcctggctattatttttatttttttgtagagacagaatctatctctgttgtccaggctggtctcaaacccctggcctcaagggatcctcccacctgggccacccaaagtgctgagatttcaagtgtgagcaaccacacccagcccattatacatttttaaagttgataaagactcagatagggttcctggtattacaaatgcaaaatataaatgtttaagtataaaatttgtaaatgaaaaacaatttggttgcttgaaattgcaagtggtcagttttcttcctttcatgacaattacatgttcatatacataagataaaaagtatcaacttggatttggtaggaaaatacattcttcatgggtgctggtattttgttgttgttgttgttgttttcttttaaacagccccaagtaactactggcttggagaatgttgagattaaaaataattcaatctttttgtttcatcatatcatcatcatactttttaaatttaattcattttgtttttttgagatgggtctcattctgtcacccaagctaaagtgcagcagcacagtcatggctgactgcagtcttgatctcctaggctcaagagatcctcctacctcagccttcactgtagctgaggctacagggatgagccactacacctgactattttttgttgttgttttctgtagagacagggtcttgctacgttggctcatcacatttaatatttagcatcttcctagaattgcccaaatacaatctctggaaggcaaaattgaatatttcctttttaaaaggtaattttgaatcattgcctaatagtgtcttcaactctaccaaactagtgaaatttcatcttttactttaaatcttttttctcccaactaattaaaatacatcaagaacacttattgttatttctcctttcagctccttcttgctttgcttgtagtgctattataagtacaaagtgtatgggagcaaataattgcatgctgttgacatgaaaatacgtttttctaaaaaatctaaagaaaaatatttctccttgttggcttgttccatttgaaaatggctgggatggtcatttaacactttgtggcactgttggactaagtgagtatcataaatctagtaatatgtcactgtctatttggcccacagataggaggcagaccataacactattttggaaatatatcatctattttccaactaatttaaccataaggaagatgaatagctgcgtactttagccgcaatgcctttggtgagactgctactgaacagccaacatacgtttgccacctttgtcactcaaacttctaaagcacatttgactcatcagctggttgactcttacctcaagataaaaaaaacagaatgtgtgcctataacccctgcactttgagaggctgaggtggtaggatgacaggagcccaggagtttgaggttacagtgagctgtgattgtgcaactgcactccagtttgggtgacagagcaagacctaactattatgttcttgatattctgttttttattcagcaacaaaagctaaacctatctattaatggaaactacttcagagtcagtttactgcccatgatcataagcattttgcttaattaactcattctctggcagctaatgagatttgacgcttattgggtgcttggtataaccatgagttgtttgaacatttaaaaacttagtttattattaaaatattttccaacaaatgtgatcttaattctgggactctgatacaacaaacccaggagggctgcaaacaatctataagcagagcaggcttcatggatttgggactaatgtagccctgtgttcacagggaccccatattagggtttaatgttctgttgtcgtaatcttcaaattttttatgattttattcacaaactttgttttgcaagtgaagtatagtggggtaatggaatatgtacctaggctcacattcaatatcatctaccactaggttcttgcctgcctgctctccaacccgtgggctttgggggtggctgacccagtgggaatttctcacccacctctatatcaaacatattctcatgcagaagttacaattccttagggatcacctgtccacatgagatgggcagggtgtattacttttgtaatgcaattttaggaattaaaaacatctcttgaggccctacaccatggctcacacctataatcccagcattttgaaaatctaaggcaggaggatcacttgagcacagatgctccagactagcctgggcaacatagtaagaagagtctcttaagaaaaaaagttccttgaatcatatttaatatcttcctagagttccccacataaattatattctttattacattaaccttttgatattcaatattgacattcttactctgttagtaaactgatttctaggtgatttgactcttcgataattcaccatcagtgaactttgcaattaattgtaggtttagagtatattttttgtaggacctacaagaaagcttatatggggatttcaaaggtaggtagtttttctaaacctgcaatgtttttttttcacctaataatatattttttaaaattttacatcttatcaaggacagtttacctcactcttggtttttaatcaaagaatatctgccgatgatttttaaaaattaatagctcaaatagattgataataaaaagcaactgtatttttcccaaactccatgcctactccccagaggcaaacattcacaacgatttttcagtttaatttttgtggtagataccatcatggttctgaataatgctcctatgcaaatgtatctccaagtcaaatccttatctaagatgccaagatttggctttcttactcctctttcctcctcacaattgtttgttgtaaaattatattttaagtcttccatcagttactttgaaactttaaataatacattaaacccacatttatttgctgcatacttcagagaggcatctctacttttcttccccttctctcacgcaatttcagcaatacctttgcttttataccatcaagggtaattatatttattttcttttttggagccataccatatttaattttctatgcttcatctttagattgatattctttaaacctttttaccttcttgtgaagatgtgaatattgtcaatttaaagccaagaagaatgctcggtttttatttcctttctttcagatacaacgtcatgcccactgtaccattcaaaggagcaacctagcatagaaatttaatattcctaagtttttaaagctttatttgctctgaaattatatttcacttcagtctgttcagactgacctgaatcaaaataagaataagttatcataatttttgtattgtattcacagtgtgaattcacgatgatgtattcaccatgaatgtttaccttttactcacaaccaagcttagctgtagaagacatcactagctctcttactgttgggtcatacagtatgcacatttaaattattgatacttttttccaaatttccaggtgaaaatgacataacatttcatacttcaataagcagtgcatgagagtagctatttatttaaaagcaccaatattgacatctatcaatttctcattttttctatattgaataggcaccaaaaaaatcatttcactattgtctaatttttatttcctttttttattaaaattgaagatgtttttacattattattagttttttgttgcttgtaggtttctttttcgttgtatgataatatatgtgacataatcatttatatatagtttttattcatttactggttcacatatgtatcacatatttataatttcacatattattttaaattggtgcaaaagtaattgtgatttttgccattaaagctaatgacaaaagctgcaattacttttgcactagccaaatattaggtgcattttctttgcccaaagctgtgaggagccaacagtacaacaatgactaagacagacaagttcccttcctcagaatctgaatgaggtgaacattcagagctcaaaagaagacttggcccttgatggatcgtagatattcttctcattgtgtcagagagagaatggagagaatatggagaagttgcagatttcatatttggaatttgagagaccttctggtctaattctaatttctaaagtgtgaagtgaggttattagctgaagtatgggagggtatagaattttaaggcaatagaagaaattaacaaatgtagtctcttaaaagaaatgtgttcatatgtatatgtccaggttaacacataggaaaatgcatacaaagtgtgcatcaacaagctacaaatagtgataatctagggataagaaagcagaatggagtataaagtaatttttaaaaatattcattttaagttgtttcctttatctctgctaattataattatgagacgttccatgtactaaacaacatgattggcaagacaagttttttgtttgtctgttttatcccagatgactctatttttctttaattttggaaacttgaaaataaagctaaattactgtatctgaagtcatggccttcctaggtgtaggaatgaaagacagtgatgattctacattttcactctcccaattagtgattatatctattgaaagtttctgtgacaaaaaaaaaccctggatagaagagcagaagtgactcaaattttacatgccttatccaaagtttaaaataaagatgtattattttgaatttactatttttaaaaaactgattttgttaacatttttaagcactatggaaaattaatgtatttttgtctgtattaggctcatattttcctagtgcatttgttttataaatatgtatatcaagtctttgtttttcacattctaacttatccctcgtatgacattgttgagaaattccttatttacccaagtatatttttagatatcagaatcatatgtgttataggctgtaacattttttaaaaatcaatatttaatgaaatatttttacaatatgatacctacatctctgcttattaatataaggaatacttacaagtaataatatattttctataaagattcctatattttatgcatgtaaataaatatattttgatttatcataattatattgaaagaactgaatgtgtctttagaattcttttataattttctttaaagctaattcagaaacaaatatcttagttacgtatatttatgtaaatattcccctctcaaaaatagtaaggtttataaatggtgatggtggaggtactagtggtgctattgggaagcttgttattaatgacaccttaggacaattaggagtggctggagttggaggaagaaataacccttcaaggagtgataactgcccttctgtcccataaataaaaaaaaattccaaatagattgtaagatagagtactattcatatggataaatgtaattggactgttcattacttgaaatttagaacttaagtgacttttccctaccattaaacagttatttatttaaattgttcattaataaggaaggtactaggaaagttaatatacacattaatttatttacttttaatatatgactttatcaacacctcaaaaggggaaatattactatctttcttttgaaatataccaaactggttaaactcttttctgtctttcttcctttatttcttctattctccattctatttgtttattgcctatcaactctttgattaatttaatgtggtcctgttaaaatattgtcctatacacttttttttttacaaatttcatcaattgctcttgagtttgtgtgtgtgcatgtgttttgttttttttgttgttgttgttattttttgccggtaccttagaatcagctcactgtttgagagtaaagctctttacagttgtttacccagaaatagactgtttaaattcctttgcatctcagctctctggtgtcttctgaacccactcaccagctgtggtgaggattctggctggtggccatcttgtgctctatagctctagcctacaggaatattctgaagagatgtgaggaaaaggaaaaaaaaagtctttctatgttttaagaagtaaatttgtgaagtcctttaagaggggattttttttttaacttcaccagtgttccaaaactgagttgtttactggaaaatttaagaatgcaaacattttagggaatgtcaaaacaaattttgacatatgccaagaagtatgagcctattttctttctcttattttttcttagttaaaagtgtctctaaataaattgtactataagcccaggtgcacgaattcagctttaaacatctattttagtggtaactgatcaatcttggtgagctctaaaatactgcaattgcctcaacattacccttttatggacagttccaaattaacttatttttctatgggaataccactttgcttagatatcagaaaaagcttctgattcaacactctaccttctgcatcctgttgaacaccatatacatcagtttgagtattaccgactgctgtaacaaacaagaccctcaatttcagggagtttacaaattagaaattaaatttgcgaaagtaaaatgtggatgttgctggacagctggtagatatgctccacatagtgattcagtgacaatatcaccttccttcttgtagttttgacattgctttgagtctcagaactttctgtgtcagcctgcagatgggagaagaggcaacatagaagacatatttgcttcttaatttgacctacaagtgggtaacacatatgacctttacccatttcccagatataaaaactcatcaaatggtcctattatagatgcagtcatggttgggaaatgaaatcccttgctagactgctacttcccaacaattgcacccagtgactagggaacagaaatcctgtgggcagttaattgtctttgctaccccaggtaatgaaaacaaatgctgtttatcatcaagttcaggaaattctttataggaaaaaaaactaatgtttaacactctataacatgttaaatacaacttcacatcaatttatttcaactttgattacatgttagatagtgagcaagcttgggtcgtaggatgaaactttaatgcttgtgcaacattaaataatactaaaattataaatttattttaaaagtcttcattaaaagatgaaaatatttcttgccttttccttcttgttttaatttgtaattcatataactgcaaaaagaaaagtttaaatatctaatggcatactgggttctttagattgattcaatgccaaagtctatggtagaacctgtagttgataaagtactcaagactttaatcgaatcttcaagtcgtgttttcaggtatagacatttgtaatttgtgtgtcgggggttgggggttatttctcacagctttctaattaccctcgataatgacaaatgcatatggaaagccaacgtaagaaacttgcttatatatcacactaacaaccttattgttcatttatcatattctcctaacactcagcatgctgtaattaagtcatagtgtcaactactactataaaaaaatgagtggtaatattccaggttaagaagactagaaaagtaaagagtgtctagaactaatagaatttttgaactgaacttctgaagtgatagagaataactacataatctataatatatcttttctcctgatgcagaaagagtaaattgatatggaggacagcttatgtctctcttgattactatgtatttcctttctctgatttggacagtagcttctttggcttcaccctcctccagtcctagactaattacctggtcttatttactgtttttattttccactaccactgcctctaaagatatttgcccttttggtcccaaagcaaaaaatataaacaactgatttttaaggtcaagaaaatggtatggatatttggaaatgacctataataaagacaaacatttccatttggagctcaaactttctagctaagcaaaatattgcataagattttaatgtccaaataattggtctttcagagaattactcatcatatcagattttccaaaaaggagttattcctgacagttaaaaatggaaattttttaagacttattttattcacctgttcttccaaagaaaatcagtaaattataaacttaataaatactaaagtatacttcttcctgtattattgttttatacacaaatcttaagtaaaattcttaaaatttttagacaactcttaaattagctttagaattaatttcatgaattctcacaggtaaaaaatgcatttgactcttcatattggaaaaaacatatataagtatacatatattaccctcgctacacatacgcatacatacacatatacatattagagatacatgaaccttgatatcacacagacacacaatcttagtttttagaaatgaattaaccagtccagacttctccatgaactcaaatatagactacccttgtgggggaacttaccttaaatgaataagccaaataagtaatcgctttcattctcagaggagaaagactactgactgagaataatttaatctaaactttatgaaattgaataattgtcaaactattattaatgtaatgaaaatattgcttaagacctaaaggaatctttcttgtctctgactttcagaaatactgtaagatgtatattatataggataaattcttaataatagaaaataaatacagaatcatcagtatcaattgtattttcaagtaaatattttacaagaaaaacagaaaatagtgtttgcctgtaggttaatgctggcagcaagtctatatgtgacttagaaaaacaagctttgtcaaaaatatatatgataaatattggctgtgtgtggcctgataacaggttcatgcctattatcccaacactgggaggccaaggaaggagaatcacttcagcccaggagtttgagacccgcctgggcaacatggaaaggccccatctcttatatatattatatgtgtcatatatatcatcattttatgtataaatatatatggatataatgtgatgtatacattacactgtgtataatatatacatcacaatatatatgatatataaaatgacatattataaatattttctaccatgagcagtaataatggtgtttattcaaatatttgatgcttacatttgcaataacaccatttttactgggatttaagaatataatatctcttataaaatctacacaggggtttaattaaatttttacttgcctttaagagcaaaggtgcacagttaaatgtataaagttcttagtgtccacatactaaatttcaaacaatccattggccataaggctcctgaagattagcttaaaagtgtctttttaatcccatgggaaataaaaagcaggaattaactacagcattttattttttattttttttccttaagttacacacagtttgttgctggtcacatgagaaatatgaattgtattttctatcatttaaagttatatagtacttttgagatgcttttttactttttctcaaaaacagtttatttactaaaaccatgatccaattaggaattctcaaaacatttatttctctttttcaaaatcaattccagggattgttttggcagagagggaattgtttttataaaacaggttatatttccttggcaagcaatggctgatatcataattagtcatatttgagtagaactaataaaatataagtccaaagttgtttgtcatttaattgtatataccatcttatttggtttgtcattcaaccaaaattcaaacaaaataatattttgaaagcactatgtgcccagaccatattttccatcaataaccatgctttacaagcttgtgatccagaagtagtaaaattgtgatcaacagtaaaaatttaggattattttaactaatgcaaaaactcattggatttttatatatttttcagtgaaatgtatgccagctggtcaaccaattaacattagaactgaaattcagaaatcagataaacattccggattaaatacctactctgtgaaaagtaaaaaaaaaaaaaaaaaaaaaaaaaaaaaaaattgttagttcattgtattgttttactatgtggaattttagatgcaaatttcagtctgtgttttatatattcctttttgtctctctatgcatacctcttgatggtgtataaatattgcttcaaatattattgtatgtcttgatctggcttcttgttaaaagagagtgttctagtcgtgaaaattcactaggctatactctcattaaacttgtactttttcattggtatattttacataaaaaagtggtccaaatttgctcaatagtgaaaatctttttttttttaacctcatcccatgttcctaccagccactaagcaggtctttgattttcttgcccccaaatgtatttaattttcagtttgtactttttctactccagacctgaaaccagcatttcttcaaggagccttggttctttttaaaaggcaatacacaggcactaagtgtgcttcttgctattatagtattcttatttccagagtctttcagtggatagagagtagtggaacacagacacataaattatttttttctaattatgaagtcatactaatagctctgactcaagttaaacattgcagttttcgttactttccccatctcatttctatttctcttctcccatgatgagaactctgattcccaacaaagcaatgcttttacctcatttggctttttctacaatatgcaaaaaataggttgagttatttcaccagtactacaaccaaaatcaagtatctgggactacaggcacatgctatcataccccactaatttttttgtattttatttttagacatggggttttgccatgttgcccaatctggtctcaaactccttgactcaagcaagtctcctgcctcagccttccaaagtgttaggattacaggtgtaagccactgtgcccagccctttgtcattattttaattaagatgattctatcctgtcaaaacatgtaatagcatatttatgtgccattctttccatttgtccccacctttgctttggtcataaatctgaaattaatacaataaacactcaccattattcatttgctaagttcttcccaatggtctattgaacatataaaacattttttctagcagattcctcaggaaggacttgaacttcagtattccctgaattcttgcacgcttaaatgtgttttcgtgtagccttgatacttaaaggaaacattggttggataataaggactttgctcattcattctttaaattttttaaatgttttaattaattaatttaagtagtatcttgctttgtatgttcctgttgagaagtatgataccaacatgatagatgatatccattttttttgtaaatgatttgcttattttgccaagtagcacagattttttttctttatttttacaatataattgttttattgggatatgacctgagatggcctttctggatcattttttcatgttacatagtaaactacttaaaactgaatgtttttaaaaatgttaaattagggctttctgtttttccagaaatattttttagattatgattttaaatattaattctatcttttgttttctttaaggaaaccaattttacatatgttgaaccattttgtagctctctttcatatgctttttgctctctttgttgtgtctattgtgttgctaaatgctctttattattatttaagtcaaatctgtcctcctttgggaactttggatttactcttcatctcttgagatttcttttgttagtttccttctgaatccagtcaacgtttatatcacaatttcctttttttcccaaaaaatatttcatttcagttctgatagtctgaatttcacattcaaggaaatgcacatacacacatacatgaatatttattctttaccttcgtgactgtcagggatacctctatttccacagttacctattttttcccctagaaggaatgcctcaagacttctagtcttgtgtccttccaagctctctctttaggctgaagggtagctaaatctctcatctactaagtttgagacatgtcttattctgagaatctctcttgaagaacagttctgtgttccagctgctaggttctcatcgcctcttctctttcccactgtgatctgttttagcatggacttaagctgactctttcagttagggtatatttcctccttgttacacatcatttgaagtgtttagtattttcagtctcctacttatttgtaactataggttgagggtggtcttatttcctcttcttttcatctgtatgactttgaagtgtgagtggagagattcagatctatgtggcctctattgccctgcataaactaaacacctttttaacattaaattgtgcattcatctattttgagttattatctttatatatgcatactaatgtattataaatagtcttatacaatttagcattcaacactcatgtactgagaaccacttatgtgccaaacacagggattgtttcatctcactagattatttgaagccttttgataggtataattcttagtctagtatcaagagttggtattctccttttttggtagatgcatttattatgtttgtaaaatgttttaagataaccttattcatccccacaataattactattgggaaaacagtttttgcctattagatttaaaaacagtaaagaaactcagtcatgttcacttagtaaataatgcaatgcaagaaattagattaatctttattatattacaatctgggcaagtgtaacaaactggaaaaaggaagagtttttaaaaagcataattttaagattatagacatcaaccactcttccattaaataaaggtgtcaaaattgaaacacatggaacaggagtgaacagtgcaagaagctaatcacatgttcagtaaacctcagaggaggtcaagttgagggattggtgaatgtcaaactttaaggtggtagaaggattgtgtttgttaggatttaaattgttaaagaaatacaagtgaggtgaccagaaacattttattcaagtcttaacatccagaatgatcagtgggtgttcactatacacaatgatgggtttagctaatatgaatgatgagttttgtgagggttttagaaagcaaggctgctaaggtccaggggggactagtgcactcacaaccttgaaggcaaaagtgagatatttcaagttaatacagtgagaaatagaaaatatttagttcctaatctggggaatgctataatgaaaagcaatttattaggaagaaatgactgaaggtattttacagcaacaattctgatataattttttttcaccacgatgacttttctatgacagagaagttttctaagagtgacatatcccatcctatgactcctacagcaaatataagaaaagttggatttgtgcttaattcctgctgctctggcagtaacttggttccccttattcttgagggaaaatgtaaatgcaagcaagagtgaatttgtaatatagtctctattctacattcatatattttaaaaatatagcatttagacttaaagatggagcaaaagcataacttttatctacttgccttcagatatgaataattttcaaaaatatgcattcatgtgggtgtttaaattatttggaaacattggctccttcctagtaatgatgactagtgtttccttaaccattgaacttattgaaaccccagagtgtggtttgctggtataaaggctagaatcaatgatgcagctctagaattgaggctggtagctagacagttaatatactcatcaggctgaagtcatcagagtagagaaatggcattcatagtagagaggaagaataaaaataagagtcattttgaaaaagtaacaagacagagagactgagtctgagggaagaggactaataacttaatgctgtctgaacttcaaattattataactgtgaaatcatgaaatctaaagaacttaaaggagtgtgactacatatttgcttgtgccttcctcatttaacaaatgttatggaatgactagtatatagcagccacttttctaaacatttgaatttgataattaacaaagcaggaaaaaaattgtgatcctttagcttacagtaaataaaaggaaaaaatacattgtataaaacttctcttcctcattttttcattaaaatttatttaaactttcttgggttttatgttttgttgctgggggaggaggatctttgtgtgtgtgattaaaccttgcatagctaatatactttgggaatttgagaattgggaaatttatctaacacatattttatccctggcattctgccaggtaccttgtatttgcagattatctcatttaatccttttaacattgttgttatgttacagttatttcaaactttcaaagacaatgaaaatgaaccttagaataactggtagcgtgcctgaaggcacatagcatggaaacatttgggtgagaattggaacatagaactgattctacagacccatatgttttctgttaaactacctttttatggtaaggtacatatcacaaatcacctaggcagctttcctaggttcgaatctatgctattgaaaatcttgttaaaaaacatattagtatcgatttaattttaataatataattttggttaataatgtagtttttctttgaactttgagaatatataatattatcatccttattctgaagttgaatatttattgtagagaacagcagatatagaaggtataaaactgtaccatccaatgtagtagccactagccacatggggttatttaaattaaaaacaattaaaattaaaaaatattttttcattgcagtaaccatatttcagctgctcaatagctacacatgacttgtggctactgtcagcagctacagataaagaacattttcatcattgcacattctatcggatggcactggtctagaatattaggattggataaatagcaattgtggtccaaacactgaatgatttttttcatctatatttgattaactctccgagcaaacttaatttcttattttcttgcctccttcaagggcaataaaacaaaatccaattgatgggtactgctaattaagacttgattgtatgtttagtatgcagtctttacatttaaagttaggctataagtttctactatttctaggtaaaagttttatgtcagtcagtgattactttgtaaatgagcctcagttattaggcagtaaaagatgatacctttcttgacattttgttcctttgtacacatctaaaggtgactgccattttcatcaatttactataggcatttagtacttggaagttagaatcttcaccattagctttaagaaataagggggaaaaatacaagtccataatttgctaggcttaacaaatccagttttaatgtagcaaaaacatatttccaagtcttccattcaatagcaaaaacagataaagatcaggtcagcactttcccccaactactattctgtttatcaacagtgtacaacatcttcatctttattctgtaacgttgtgaataaatcattaagtttctgttgtctgttaccgcaatgggcaaaaatgacagggtggattttaccaaatttgcaacagctggaactgaggtgcaacaaaaggcccatatgaatactaattctggagagacatgctgtatgaattttgatgctttgaacagagacaacaaatagctgtttcaaatttgaaatgtaaatcaaaagtcacaagtacagatggttgaaattacagaagtgggattggcaatccagttgcttctcaccggggcatctctctgtggtatgtactggaacgagtagcactagaggtttggctatttaataacgttcagagatttcccaagcaacacttttgcggtagttaccaaaacttctgcgtctggtcataaagaacaaaaagggatatataaattgaagtatttgaaggcatttctatgtactcctttaggatttggcagtcagaatagatgttagaagcaggtgattcacaagcctaggaaggactacattaaatgactgccacttggagatgatggtaatggaacatctatgggttaatgtttcagttatttcccaaattagctgctacttcataagcaagcccaaggatgtccaaatagttcatccttgctttcttgccctttacatggtgaattaactctcaatttgtataacttattcccccttttaaaattgtctaactgaatttatacatacaataggatataagttagattccggaatacaaatagaggcaatataccgtgttacatttcatgcctctctgaaatgtgagaagagtatattgttactggaaaaagtcttacctttctattattgaaaaataatagttattgttgtatcaataatatcataagataactaagaggcaatgcatcctaaaccttattgtaagcataacgctgataaaaatgtaaatgccaacactttaatactgaataagacataccttagtcatcttattttctacctaagtcatcttactttccttctagtcctctcggacttgtaagatctcaaagagtgcttctgaaagatacaggaatcttaagctttaactcagtttataatttatttatttgaaaacatatattcatgggagtagtcattttggtatctattgtcttcttttaaatgagagaaaatatgattagaaaaattaattctggtctagtgtagtcaagatagctttttgaaactagaagttaccctgactgagcaccctagatagacccatcatttcagaatagaaaggcagtgttcaaagatgcgaaataagtttcaccacattttcatcaaattggagttcagtattgcaggcactgggtcttactacatctttatctttgccagatgttttttattcgattttatctcttctaattctgaaacattctttattatttcctttaagaatctttcatttcctagtgttttatatactgctttttctctataactagtatatacgaaagggctgcttttgttgacctaaatagactaatggaaggtccaaagaaacctacttccagatacgtcatccactccacagatactgacatggcaaaaactctgagtttgggtcaaatcttctttccttcctttttttcccccttatttcaaacttccattccttcccttcatttctttccttttttctctccttctatttcctttcctctctccttctattttctctcctctctcctcctctccccttctcttacctcatatcctgtccccttttctcctcttccagttttgtttcctctccttctttcttttctttccctctcttccacctctttcccatatattaaataccaaatagagctgtgttaggttctaaaatatgaaaaagtaaaaacatgttctcggttcctatggaattaacagtcttagggatttttattggtgaaataactgtggatcaaatagtactaataaagtagtaagctcaggcactgaaattactgtgcagccattttctagctttcttgaataaatgatatatcctctctctgagttttcatataggtaaatgtatatgaagactatgatctcataacattgacattaactgatacatcttagaatcaataaaatttgttagtaatttttactttttaaatgttttgttctttacaaattcattacaacatttttgtggttatgaccatattaactagaaaataatgaagaagctgtagactagagagagacattagcaacccacaagtggagtcttcacaatttttcaatttttctctgcagatgacttaagggttgaaagacagcacagtattctacataattgctgagagaaagggatttctattcataaataaaagtaagcatatctggagcttcttgatggatctgtctctgtagataaaaacatagcctatgtccctcttccctggggggtcactaaaatcctcaaggacacacctacatatccatccctattctccagctctgctcagtgaaatcgaataaagcatcatactttgtccacagcaatgctgtagctaaaatgggaaagttttgcatttacacctactgctccagaagattttggttaagtccgtttaagaacacaacatgttttgttgggagacaacctagagtggaagaaacactgagttccaagatgtgagctcacatgccagctctaccacatccttccagcatgaccttgtgtaaacccatttaacctctctgagtatccagtcatcatctgagaaattaaaatatctttcccttgggataagtttgaaatgaaatggaagagtttatatgtaaaatgattagcaaagcacatacctccaactatgtagttctcacgtcactttcttctaccctcttgtttggatcaaaatttctgtctttttttctttttttttttcttttttttttttttttgagacggagtctcgctctgtcgcccaggctggagtgcagtggcgggatctcggctcgctgcaagctccgcctcccgggttcacgccattctcctgcctcagcctcccaagtagctgggactacaggcgcccgccactacgcccggctaattttttgtatttttagtagagacggggtttcaccgttttagccgggatggtctcgatctcctgacctcgtgatccgcccgcctcggcctcccaaagtgctgggattacaggcgtgagccaccgcgcccggccatttctgtcttgatgatatgcttttgatatttttcatgagtccttttataaatcccttagaagacatacttctaaatataattagtcacaaagtagagtggggaaggaggagagatacaaccacaatgcagagaaaaacaaacaaaaatgcgagacaagatcttgagaacaagaaagataaatattgcttcttttgctagggtttcttcagcttatttactctggtggaagggtagcatttaatatgtaaaatggagatttctgcactgttctaataatccagaatttcattagcaaaaagaaagtgacctataaacactgcaaatatagagaaatgaggaaattctttgttttgacatgagctttattaacaatacaacaccacatttctccattctgtttgtttgtttgtttgtttgtttgttttttgagacagagtctcactctgtcacccaggctggagtgcagtggcgtgatctcggctcactgcagcctccgcctcctggattcaagtgattctcctgcctcagcctcctgagtagctgggactacaggtgtgtgccaccacgcccagatattttttgtatttttttagtagagacggggtttcaccatgttggccaggatggtcttgatctcctgacctcgtgatctgcctgcctcagcctcccaaagtgctgggattacaggcgtgagccactgcgcctggcgcattcctccagtttcataagttttttttttttttttccctcaagattttaatgcaaaataaagttgggtagaaggaagaatgcatccttattttaataatgtttgaacactgttgctgagtgcacattgcagacttctttttagcttgtttggggccttgtctcagatctccaaggaattaaatgagacggcaatagaaatattggtgttgtgataatgatgaacatcttttatcaaagcagaagtattttataataaacaagatacacatttctaatccaaggaaattaaaagtagtttccattgttgcatgaacttttgtatttattagctttaatctcaaaaacctattttaaatgaattaaaatgtaatttgattcttcagcacaaacagccctgctaacctcattagttattcacaataattacatgactcatcatttatactcaggactggttagacagattttttttatgctgtattgcttaccccaaacataatttttgttgttgttgtagttgctgtttaaccaaagcatcaacatgttgtaactgtttccttgtttacagctgtcttcattttgaaagtctgaaagtcatctaaactaaaattgtatgcttacatcagattacatcaactaccttgtcattttagacataggcaatatattgtgttagaatattttgatagccatagtcttcctgtcttataagttcattcattgttaattactagggttatgcgaccaccatgaaaacattattggaacttttaatatactagaagttggtgtagtataatgaaaagacaatgaatcaaataggtttaagtttgatttatagctcaacaagtagcaattacttcaaactttggaataagtgctttggatacttttctaagacttggtttcatcatccattaaatagggggaagtggtacatagtcatgctgtttttatggtgatttgatgatacaatagatgccaaaataaaaatttgttgatctcctgtcacaaaaaataagcagaacaatttatctgcaattactagtctattggaagctataactgacaaatggatattattaataaaatatgaagctgaatctagattcagctgatctcagctcacttagtttctctttggtacagcttttcctgactactctaggtaaagaatttcctttggcattctcccgaccagactttatttttgcctgatcacttaatcagaaatgatgtcatatacttgttttattattggttcgccaccacaatataaactctttaagggcaaagactgtaatttgtctaccactatgctcagtccttgcagctgctgggcagattgtagaagctcaataaatgagtattaaataaatgaacacagtggagtgcctaaccgatgggaagcactgtgtttggtgctatagaagtttaaatatgaatatttaaactaagtatataaccatttaaataatagcccaaagtagcttttcatccagtgggcaataggacaagtgaagcaaataaatgaaacacaaagaaattaagcttaccaccataagcaagtttcaaggaatgacagcttaatgcataagagagagctcagcaataagaaggtctattcagccaacactgaaccatctattagatagagcttattatggtgataatgataaatgccagtgtgctattccagatatataggcttgtgtttctccaactttgccctgaagactattgggaaatttgtgggtgtattctctaagagaatgcttccactttcatttcttttataatctcaaaattaacctgagtttgttcaaaattatctgtatggctatgatataaacaattattttcagctgggcatggtgcttacacctgtccatgctgggcaaggtggcttatgcctgtaatcccagcactttgggaggccaatgcaggtggatcacgaggtcgggagttcgaaagcagcctggccaatatgttgaaaccccgtctctactaaaaacacaaaaattagccaggcatagtggtgcatgcctataatcccagctactagggaggctgaggtaggataattgcttgaactgggaggcggaggttgccgtgagccgagatttgtacaacattatactccagctctgggcaatatgcatatatattttttttcacgtaatttcagtggctgatattttattggtgtttatggcaatatgcggatccaattctagtaatttaatgttgtagaagaatgagaaaaccacagtggtagagttaatgtataaataatgcatattagctatacaaagaccaaatgaggtttcagataagtttctgtggagaaattagagggacatatggtggtgtaggcttacaaagtaaagtgaatttatattatagtagctaatttgtattctcatattaaggtaaggtttagtttcagcaacacactatcatttaacatattaaattagagtcattataaaaggtttattttgtagtttgtatttcatttgaaaaattggtttatgactacatagctatcaaaataggaattttatatataggtttgtgcatttatgactaagtaacaatatgaaagcataattcaggtcaacataaggggtctgtaattttgtttttctttttttcttttttttttgagatggagtctcactctgttgcccaggctaaagtgcagtggcactatcttggctcactgtaacctccacctcccgagttcaagcaattctcctgcctcagcctccagcgtgactgggactataggcacctgccatcatgcccggctaatttttgtatttttagtagagatggagattcaccatgttggccaggctgttctcaaacccctgacctcaggtcatccacccgctacggcctcccaaagtgctggatttacaggtgtgagccactgtgcccagcctgtaattttgttttctctatggaaagagtttatacatttataacatttgagaaataatggcaggcaagtctaaggtggtgcttcttcattttcttggcaatttttgagtgcctacatgttggtgaccaaagctctgataatggcagtaacaaagagaatggggaaaagacagctaggcagacattgtcactagtcttggttgcttggcctggagtgatttccagttctgggtactgctggaatggttggaacatcagccaaaatatggaagtcacatattgtagaagttgttaatcagttccatttggtgaatattgaatgtagggtcctaatagatttccagacagagtcctattggtctagtcctcaagggggagagtaatgaggatttaggaagagaggattgaggggacatttgtgaagagaaggcagttgaagttgtggccatggatgaacttgtcaaatagggccaaaggcaaaactttaatgaaaactacatttaggaatttgaaggagaaaaaagtttctagtttataatttttactactctagaactttaaaagtaaaaatttattttaaaatttatcgtatacattgttagagtacaaagtaaaacctgtttatctagaggaatgtagagagaattgtgcaatatacgaatttgctttcaaaggggcagaaattatcttagtgtggaaaagaaaagcaaagaatttgccaaggaaatacacactatagagaccgatcctagctcagccttaacttacagtaatttatttctgtagaatgtaaagattttttatctcaggttgctgtgaagatgaagtgtaatgatacatatcaaaatgctctagaaaatcgtcattactgtagaaatatttgctacaattctctctaagcaagcttcttaaagttgatatattaccatgcaaacatttcccttagtgtttcattatttttatttatatttctatttttaccatctaattacttttcaacatttaatattcatgaacgtcaagaatattctatatcatcttctgcttttattatatagattgtacacagtgaattacatagcatgatgaagtcattaacttcattaactagaaaagtggttgaggttcaaaatacagataatttgcaaggagaaggaggaagaactagtaaaggtaaattgcttttccttgccagtttgaaagatttaattcagactttctagaaagcttaaagaattaaataatttaattactttgaatttttacagccaagatgagtaattccatcaatatggtaggattatataagaatttggcatgaaccaaatataaaatataaaagtacagtgatatagcgttactgaagaaattgctaacttctgggacagtgctaacatttggtgcacaattacaagaatgtatatcttattttcaaaagatcatctttttgttgttgttttacaattttctttccgactcccacagacacatgggaatttgtcacaaaaactcttaggagccatcagtaggcaggataaattgagtaatgccccaaaagatgggaatacagcattatggccgagaaagagtgctagtttcaagaggtgtacgatgtgtgaaaataacattttctgtttgttttttatgaaaatgaacatataaatgggaaacacaagcctgcttgccatttggatataaattctaacattgttgaacatgagatttgtatactaaaatgaaaagggtgatgaaatagtgcacattgcaagcaagaggtatgtagaaaagaaatcacacaaaatacctgtcaacttccttttctcaccactgttttttagcagtcataaatactgaaaatatacttttggacacataattgtacatacttatgtgatacaatgtgatgttttgctacatgtatactgtgtaatgatcaaatcatagtaattattatattcaccacctaaatgtttataatttatttgttgtgagagcagtcaaaattctttcttctagccatttgaaatatacagtgcattattgttagctatagtttccctatttttaaacaggaaacatactttttaaatctttcactatccacataccacaatttataaattaacatggcaaactatttgatgaaaaaatttgtgtttccattcctaagttactgatattggtcatgtttaatggaaaatcatgaagtcccaattcctgaaatctgtttaaatgtaaatatttaaacttgacttgtctgtggccctgcaatgctgagaggatggcccaatgccttttataaactcatagactatttcaggtcgagatgcaaagacaaagggagtgatgctgacgttactatttcctatcttatcccaggtagtgtgtagcattttacagataattaatatgaacaagaaaaacagaagaaaatacaacatgatagatattaggaatatttaagggacaaaacaattgtatgagggaaaaggaagcaatgtatttcaggaagattttattttgttttgtttttagtaagctcaaggttatgagagggttgaaaaccaaaagaaagacttaaatcacagcaagatggatttaaattagccctagagggggaaagagaggacaaccttaaatgactgatggccttgctagaaagtattccaggggcttttcctgatgttctctcctcctcttccacttggacttcctctgcctaccacagtctggttgtttcgtctactcctactgtcttgttttaattgataataataatttccttcatttcttacagttatgtcatcttaagaaaatcttttaacctcttagagcatcagattccttatccacaaacgtagataacagactgttgcatagccttgttgatagcagcatgcaaagcacacagtatgttgcctggtgtgtttactggtgcataattcattaagtgtttgcaaatcattgtgtatttagtattgttgttcttattcttattgttaaacagaacactaagtcaatatccaaattaaaaaaataacagtaatagtccttatcactaagctctctgaggaaaaagagatgtataatttttccttaagtctatgtcgttagctgcatctctttgtacattttcatccaactctatatctggatctggatctatttttatgtatctaaactattactgtgaattcattcattcaaaaagaattgtctaaattttctgtgtcaggcagagtgctaattattgaagatgcgaatgaaagatggtttgtaaccttaaggtatttacaatgtagaatgaggaaataactgtgttaataaataggttctataaaatatggacatttataagatgaaaatctaaagaacttacagtgtggatagcagaaaaatggtcaactctacatgaatatgggagtaaatggcaattagtaaaagctacccaaaagaaatgagtttgattcaagcacacaaaacttggcagtcaaaatttaacgcaggtatttttttttcctgaagatcctaaatacaaggtaccctgaaatgataaggtacagcaaaaattggagggtttgaattagggtacctacttggatcatttttaactttatatcataattggatgtcaaaagatttctattctagcatctttagtacaaataatccaggtacaggtaatcatttagttttaaatgtaatagtacagatagtatcaagtgggaaatggtttattttctcctagggccaggaaaagggctaaggtgacatttaaggtaggctttaaatatctgcagtacaggtgaaggctgttctgtgaaaggggaagaagggaccagtgctgtgtcagttaggagaggaagaaggttaactaccttgtgaaagccttatgtaatgttgaacttgaactttatttggtaaaagcaagacttcattgcaagattttatttcattttgcttttaaagactagaggtgatgaaatatttccagttttctaaaatggagaggggtcgggtgctgtggctcatgcctgtaatcctggcactttaggaggttgaggcgggaggatagcttgagctcaggagttcaagaccaacctgggcaacatgttgagaccccatgtctacaaaaattttttttttaatttagctgggcatacacctatagtcccaactactcgggaggctgaggtgggaggatcacttgagtctgggaggttgaggctgcattgagccatgattatgccactgcccttcaccctgggtgacagagcaagaccctgtctcaaaacataaataaataaaataaaatggagagggaaaagagtggaggaatgaaagctaggaatcaactgcaaccttctaattgtatgataatgaaggcttgaaataatatcttagggatgaaaggaaaaaaaaataactggaagtggaagctaaaaaagaagaaataatgaaggttgactttatacctctaacttaagtgaccaggcagcaaatatttcaggaagaagcaatttggggtagaaagttaactctagtggaatggctattatacaacaggccctgtggtagtgatttatatatggcttctaagacagtcccacaaattatctaatctagaatgtagagaataattttcacattttagagttgaggacattacagtccaggccacacaaccagcagagattccgatccaggccactgacttcaaacttttttttttttttcctgtaatagtaaactaattattttaccactcttaataaaaataatacaagtttaaacttgaataaaatgccaagttcaggaagaactaactggagatcgttgaaacggggagcgagatctgattttcagcatgagccctgagatgtgcctaagtctgcattatggtgctgctgtgaaagaagccaaatccattgtgtaataagatacattctctcttctaatgtgcatcaccttgctctttttgccttgttttgtatacctctgggttttcacatttttaaaaatgcaagaaaagaaacctcagttctgaatagtcacaaaaatagttgaagtctggataactgggttttctcaggaaatggctaaagaatttgtgtttagctttcagaagtagcagctggggagtgatctattaattgttttcaaaccctttgatggttgctaggtgaaatttgtatgaacagtggtttcccatgtctgaggaagcaaaaatataaaaaaagaaatgggcctcctactgtctagcatagcttagacaagctcttgccttaatactggattagatgatccttttgagatcccttccagctatactttaaaacgcttagactatagaattgatagaataaagttatgtcatttcttagcagcaatttgtatattttatataaacggaagatttttggataggttatacttttcttttgccaatatctgggaggcttggtatatatttgtaaacacacaaaatgcaattcaagaaggttgcataaaatgaaaaacatttatcaccagaagacattttttatatatggtatttgcctctacatagtataaacaaattctcttttggatgaaaagggaaagcacttaaggtaattgcatttacatagcacactcagttaagacaactggatatttcatgctattaatattggtgtcttgttttgtttaaactgattttattttacattaaaatatgattaccattagtagttttattttcaagatgaattaattaatacaggttgtgagtgcaaagtctttttgtattttctttagtcattaattcaacaagtatgaaatagttgttttattccaagaaataatattacaaatgaatgtatttttaaaatccagacttcacttgtttggatgtggcgtaagggaggaggagagtcatctgcttcttgatatccatgtggttttgccttgaacccctcaatactgtggccagggtaacccctaaacctctaacagtctctaccagtcccaagtggagaacaggaattgtggcataggcttattattggaatgttgcttcagttcacatcacaaaatatctgatataaactattgtttttagaattttcaccactgaaaatcactcacctaaagcatgtatgagcttggcagattacattgaacatttccgggatcacaataccatttacttttgcttttcttctcactagcctctgctcaaatcccatgcaagattacacttcagagtactcagctctccttcttgtcttatgccaagcagatcatccctcttcaatttcattttcttaattcgaatgtcttatcccgttaaggggctaacagagaagattcacccttctttaggcagtttttttttatgaacaacagagataaaaagaaacctgttacatctgcttctgtcaaaattgaaattcttaatgaatggtcatgctcgagtggtctttggaagcttcaaatggctgcttcatcttgagagccaatccttatgttcacacaacctgtcagatgagggaattggtcagcctccaccttcttcctagcaccccaacaccttgcctttgaaagaaagaaaacaaaatttcgttcatttttttcttctgccactgaactgaaatccatccttaatctgttatattacttactacatacttcatgcttatataaatttaggcatattcacttgaagaggtttgtcttccccagcaattacaaagcctaggcctattttttttaggactttttatctgtctatcaaaagaatcccatacatatcagaataaagaaaataataggtacagataatatgttttctatgctaacttctaaaaactgttctatagaagaaaatgagtttacattagtaatgtttattattcattgtatttatacacaatccatttctaggtttttaataaatatttttcccctttatgccattgttgttcaatattcctacttacaattttatggcatccacatttttaaaacatcaaggattaagggaatattttattttttccaaaatgatggacaatggactagtttatagttcctacaaattcaacttcaacagatgtgtaatgcaggtggaaagcatcaaaactttatgatgtgcctgcgtttagttttcatctaatgtcttgattgcttacgagttattcatgtatggtgttagaaaaactttgcaatgccgtttattgagttgttaattaagaataaattgtcacattttaaagagatgataaaatatccctttctgatgaaatggcaattgctttttccccccttgcttttgttacacaaaattgagctctgagatttgaatgattagaaattatcagccacaattatgacgatgttctgatttaacattttcctctttgtgagatagtgggaacttgctcatgctttttaaaaatgtaagtgccgcttccatgtttatattataaatgtcagtcatgattgatatttggaaattacttcatgaaagggtttacatgaatgcaacataattgcatttctttttgcaccaactgattttattgcaatgtttaatggtttgttgcatactttacagaataataaatttaattttcttgtattatcccataaataacctggaaattttttaattaaggtaatcatagtagctgtcttaaccttgcaaacatgtattgcttcatggatttaataattggaatatttatctggctcaagtcacaacaaatatatcataaaatatcaatatgtgacttgagccacataaatgtgccaatactcaaatgtatatgtatagttttcaaactcttttctcagaaatgcatactttatgtttgttggataatgttctctttttattgtgttcactaccaaacttttgtatttacatttctagagatgtcactttatagtagcctcattattttttttatcagttcatttgacaatgatgtaagtccacattgattttcaaataaggcaaaaacttaagcttaaatatgaaccgcattggcacccttaattatgatagttacatataatttgtattgatatttagctttaaagagtttttgttttgcttcataacaataccgagacaacatacatatacacttcaaaattttgactaatagcaaaaaaataaaacttctctttgtagagtgcagtacttgaaaatatacaaaacattcatctgtagaacgtggagaaacattaacataaatagaataggcacaattgagattgagtatttcacaattaaagtacatatcattattttttctattgcgtgattcttcataaccgttataacttaaatggtgatggtgggcagctttttaagaacaggttgtttgcaaggcacttacaatccaggcatcccagatacgtcaataaatgatcctcccttaacattcacagtccttattaccaggatccaaagaaataaaacagctttgtagaatctgtagatattaaatccatgagtttatttgttttcattttattaatttttggatgggtagctaacaaccaccagagcttttaatatcaatataataaagagaatcatatatgcatgtaatttccatgggaagcagcctatagatattgtttttctttatttccatttttttaatgtatatatttgtaatggaactgagatgcaccatatgataatgatgtattcacaatttattctggcctccaaagtttttttcatttcttttttttttaactatacttagaatgttcttctctcctgttagattttttaaaaacaatatgtactggttttcttttggcatttttaattttttgtatttttttacaaaactttgacccatttgtagtttattttataggttcagctttatttaatttttacttcatggcttgctagctagctggatcaacaaaacaaaattgtgttttcccaaattactcgaaatgctgttttattatatgttaatttccatatgtacttgaatctcttctcacttttgctctgttctattgacctattggtctctttcttcattgctaaaattatttacttatatttcaatatttctgtgattattatttcttgtattacattttaataactcttatgttgtcaggcaccacattgctattttcattgcagagttattttaactactcttacctgtttgcctgccttatgtgaacacatattttagaagcctatcatatatgcatgtttgtatatataatttttactattagaaagatcactttatcctgctaaccacccaataaatgttgactatatatttgaataatattcattttgaaggaaggtcaagtcaataaatttccaagccaagatgtaaagacaggtattttgtcattaccaaaagacaaaactcttgtgctaatataagaccccatctaataaaaatagcagtgtcattagattttaaagatgaattcagtgcaaatcactgcaactgaccataccgttaacccctttattaatcacaactacctattctagaacaccgtttttaaaagatgaatttattgattcttatagtagggggataaaaattaggatttgggggacatcccaactttatttgataggattatggctaattcctcaagtgtattaggattggaaacaatgaggttttgggccaccgctttaaaattgaactttgtagattatatcaaattctgaaaactctactcaagaaagcaattctcactctcttgagagcagggaattattatcagaaaagtctagcctaatttagggtccatttgcaagaaaaagtggctttcctgataggtatgtctatttggatatatttggactgaccttgtccatgtggcggaaagcacttaaggaaacagcaattccttattgttattactctcggggacttaattgtaaaactaaaacaataacaaactcctgtccaatttggaactaatttactgttttttaagatatataggtaaggtactcaatgcccatctgatgttttcattactttatttggtatgagtatttcctgggaaatctaattttatgtttgcattgctaatgcattttattccaagctgtgtttcgatttttcacactggcaaattttcacacagctatctaaatttcttatttacatgaataactatagaataaagcctaataaaaatattcctgagtacagtatatttcagtgtatagcagaataggaaatagcatttatgaaagagccaccaactgaatttagagaaagggagggttgtgttgtacatacctaggggatggtcaccaaggtgacaacctcttgacctttcttggagttaatggaacaatattgcttcaccttctccatttctgccaaatgtaatatgaccaatttattattcatatattcctttgagatgagggcattcacatttttatgtctttcaaacatttgccaaatgaatatacgccagtgatttctatgcatttttatccaactttataataaagactgaaaacaactagaacaagggaattcaagtcacccagttaatcgaaattcattgttgagggcttccagattctttctactaacctctcactccttgtgaagggattttattgtgagcggttaatattttatgggaaggctgtcagcttcttacagagcccaaaggagttatatatttttctgacatatgatcataattcccatcagtatgtttaatgtcagcatctgtaggattcctttgatttttaaggaggaaaaaaataaagcattccagactcatcaaataagaataactgtacatgcttcaggaaattcttattagtctgggtgaatgcttggggaccagagggacaggtatgcaatggatgcctcttagtgctttgctggttaacctattttcctccacctattgaattgtgccaggaatgagaattttgaggactacttttgtgtacatgctcacacacacacacacacacacacacacacacacagagtttatgctagggcagaactatatatatatatatatacatacacacatatacacacacacacatatatatatataggaatgtatatatatgctacagatcctagagtatattatctagaaatcatgaattaaaaataaaatgaccatttttagttaaaaactcataatgttgaaagttgtggaatgtggatgatgggtgtttctataattattctactaaaaataaaatctctaaagaatactatctatgtcacaaagcaaagatcacaaaagaattttgaaacatgttctttactctgacaagctttaaatcaaccaggatctaatcagattgttttgctaagtaccactattttaaattctttttattagggaccatgggggaaaaaaagcataaaaatgacttctgcagggaaagatgaagttggattgataattaatccttgctacagacagcaaagggtttaataatgaaaaattatcactaagatgagtgactttttaacaaaatcgaatgaatcattcagtttgggtgtcaggtaaacccaggtggtaaacataaactaaattcttgatctactgatggtttttgctattgggaatgcagattttgcctgattcaactttggagatgatcttaacaaatggtttcttctaaaaagcatgtgaaacattaacttatgccaaacttactccatccacaggtagtttcttggccatcaattgtctctgttttcttagaatcggagatttaaagagaaatctcataaatggtatatacatcctagatggaattttgaaatattaagatctaattataaagttgtgatgtggctagggaatcaataaatttgacaggttaatacaaaatagaaattttacggtatgtattagctctacatatgtatagaacctttcatttcattcatttaaagtatttaaaggccatatttaacataagctataacttttgcacagcaacattatttttctatgtaaaagtcctcatttcctgtttgtcatttgataacatgtctcatattgtcaagaagagttttaaattatgaacacgtattttctcataaaggtattatgagacagtagatttgaaagttaaaaaatggaacaactttctaattttttaaaatgtaaaactttagatatttgggcataatgtatttctttggcgtgcttaagatctctattaagccgaagtcaacgccataattaagatgtgaaaaactagtgataattcgattatgaacaacaaaagaaagaaaatgctgtcacaattaatattctgacaatgcaacaagacatgaaatgattatgaagagacaaaattttcattatttgtagacaatgtgattatacaccaagaaaacccaagagaatctgcttaaaaacttttggaattaatgagaaaatttagttaagcattagatgcaagacattgtaagcctgaataattaaaacaattgatagtagcacaaaaatggatagtctgatcattatattaatcccccaaatacgtgtttagcatgttgattttgtattagcttgcattaaaaattaacatgagtaaaataaggaaaaccaaattatttctttttaattatccttttgtaggatcttggacacacagaatttatctgatgataatcttcattcactcatattaatgaacatttactatgtgccaggcactcccctggacatctgaatggcatcaataaaaataatcctcaaaagactctgtccttgtaatttcattaactgcttatgcaaagcccttctgatgtttaattttgttccgttatttcctcttgttttttaaatctcaatcacattgccctccctgcatgggtatccattctaatttctatactgaaaattcttttcatatatctctcataaattgcttgtgtatatataaatataatgtttttgaaaccatgcacagagttcatctatatacatttggtgttaatgtaaccaaatggtattgttataaagataattatctttcttatatttttcattctgtattttatttttaagatgtatagttttggctgcacttctcctggataacattccattatatgtctatgcatataccacatattatttatagagtctcctagtgacagacacctaagctgaatccaacatattctaacattaactctgttatgatgagtagttttctatatatagcatgcccagatggtctgttttgttcacctaagacatacttggtttatgcctgtgtcccagcataatatttcatgtcctcccttcactctcactcagtctctcagaatttccaagggacttctctggagtttataccaatggttggaattacacacctatagtatatacataaaaaatactgcgtttcagaataggttttcaggtttatcttgggttcctttttacctaattatcataaacaattggtatttatgtgtcatttactttctaatagaaatatttgattgacattgtaagttgcattttattcttactagtgaagtagatcatctctctatattctccttactcattgtagcttctcctttcatgtattggttgtgtatgcacatttccttattaacttaaagtctttatttttctattttgtaaatattatatataaaaatcagccctctgttagatttaaaatatcacaaatatctttcccaatttgtcattgatgtcattatattcaaaatccttaacttaaatattatcagttactttaccctattgccacaaaaacatttgcatcattttttaaggtttcaaaccttcacacataggtggaaatttggagcctctttttgtaacagtattagagaatttcctctctgtactgagtcatttattacttgacatcatttagtaaattaacatttacataataatgcatttagatttttaatatcatccctacatcaagttgccttatatgtagaagttggtcttaaggctttttattccattgcactatactgtatgtttttctgcatttgttgcacatatttgtaaatattatacaatgacttggtgttataatatctgttaggaaaaaaataatcaatttttgttattttccaaagttgtttcagccaattatagacctagctgctttcatgtcttttaaaaaaaatcagttgtctagatacaaaaaactctgcaaggattttaaatggagttgaattggatttataaattgatttgatgagaatttacatctttacagtatgtagccatatcatccatgaacaatgtatatctttctacttattcagcacttcttttaagttcatttatgatggccttatgcagttattgttcgattaattcctagataacatatattttgttgttatagtaaatggaatcttattttctattacatcttctaattggtttcgggtgtgattttattttgtaatcttgcaaacttgctgagttctcttattagttctaatgattttaaaatttgttcccttagattttctatgtaagtgaacatataatttacaaaatgaaatgaaacaaagaacagtcatacctctttctgcttagcatttaggcctcctctttcttttctttaccttatttagtaagagagaactcttgagtagcataggaacattgatgttcatcaatcatctttgtcttattctcaaccttcaaagaaacgcatcagaaaatttttctccaaatgtagcatttcctatagaattttttaaaaaacatttttctagtaagaaaaatgctggttttagatttctaaagcttttattttttttattaaaagatatcgttcacgatcctatgttttttgtgtcattccgggtgagaatgtgatggatactttaggtcattaatattttatattgatggatttttcagacattaaataattcttgaagtaaattgtatttactcacactatattggttttaaaacgctattggattacttaatattatgctaaggatttgtataaatatgttttatagttagttataaaactaaattataatcattttccagttcaaggtttacatggtttagattgagggaataatagctccccacatttttttattttttagaacaatttatttaatataaagataacctgttccaaaaatgtcggtaaaacatatctatacaatcttgggaattttgtgaagtatctgggatagtgctttcattgccatttcaaagtctttcatgattaatggtttatttacattcccaatttcttctttttaatttatcatatatattttcccagaaagttatcaattttagctacatatttaaatgtaataatgcctacttggttattcttttattaaataaaatttttacaacatctataaaatttcctattttcctttctgtattttttagtctactcatcttttttccttgtttgcagaaatctgtctttgcaaagcttgtggttttgttaattatttctgtccatttttactctttacatcattaacttttaccgttattgtcttctcctattttctcctatttttcacatctctcaactgttctctctctctctctctttaaatttccttttggtaccttctgagagagttctatggcctgaagtttcagctcattattttttccttcagattaatctgttctgctgttcaacatatacagtgacatttttatttgtcatgatattttatatcctttctctttttaaaaagtaattgttttcttttcagtattttccagttctcctatattcttctgacaatgtttataatgtttcttttatattcttgttatttttctatgttagctctgcttctgctgttataagtaatgatattgtctttcattttcagtgtttgcatttctctagtatctcccactttttgcatttaatgtctcagctttggctagaaatgtctaccctcagagaggtacaaaagactagagtcatttttatcccttccatatgacttaaggtaagaatgggtggcctaaaggaagaatgcctcagacactgcagtccccctaaacttctgtctgcttccctccctctaggaggcttcacaattttaagctgatattttcatatatatgaatctacctgaagagaggaatagctattatcttgcggaaaattattaaatttaatgcatttgcctaaataaactggaaacgtatttgatatttccaaaaaccagcattttttttctatgaattcttccatttttacctccaagcagttttttattcttatttaaacctgatcccatttgctttttgtttttaaactaatataactggtttattaaaaattactgcagaggtctttatgggaaaaaagactgtgatattactttgataaattcagtcattgttttctatctaaaaaataaccttgaagctgaaagattcttaaaatacctgttagtgaattttttttttcctgaaaatgaagaccataacagtactgaattatttacaggaatcatttgccacctattaagattagctaattttcaggtgataaaatatatttaaatatatttaaattgaataaaagagattaagtttttgacaagagaaaagttcaagaagttgagaaagtaccaaataggtataaggcaaacatgaagaaattttgaaaattctaatctcattggaataagaatatagaagtctatataatcatagcatctcaaatgcttttagacaatgctgttttgggaatatgattgaaattgtctaataagaaaataattgaattatgtcaatatttagcaccttaaatcatgatgtttcaaatttaactatataactttatagtagtttgacacaataattttctcctatgatatctgaactgatatatttgaacacaaaatgttctaagacaaagaggtttcagtggatgtgagtcttctttttatcatgcccattgtaatttggtaagtaaaattagaattgtttttaagctagacataaacaagtttgctcgtttatttatctgaaaatgcgtgttgcctatttaccatatactgacattgttctaagtgctgggttaatatcaatgaaaaaacaaaaactgccactctgtcactagcatcataggttaacaaagttatgtaagatagttatgcaacaaagttatctaacatagttatgtaacaaagttatggaacatagctaggtaacaaagttactaatactgtgagtgatttaatttccattttcatagtagcaaaaatgataaagagttctgtaaaaacatatgggattagcaatgaaataaatttacccactctgggtaggcagagaatgcttccctgaaaaagcaaaatttaacctgtgcctgaatgagtagaaggtaagtagatgtttggctagggggcagatagaaagataaactagttttctgactctccttatccatacccctaactgatgtatagaatgaggcccaaatctaaaggaggccatcctttttcttttcttcctagttccagttcttcattgctcatagtgcagtgtgagaagggaaggtgcaattacataggatctaaggcagtctgcaatgaaggagtgaatgaaagccttaggatccccatttgtattggtaggtttaaattgtcattcctgccggctgatgttatggttccctgggtaaagcatttgctgggtaaatgaggtgaagagcatacaccattgcctgtggtctctccactcatactgactgcctcagcaaggaggccagtgattaaaaggatgtagaaatttgctgcttccaaccctgagaaggccctgtgcaataatttgtagcacaatggaatatgctttgccgtcttgttaaactgttatattgggaaataatacctggtccaggctgtctctataccatctctgaaatgcattttaagttaataattataaaaagaggagtagtccatagaggaaatattttctaattgtattattgagctaggcatacgtttttatctgtaggttatttttagtcattcaaataaaaggtttgcaatcaagtagaacatggatgagctgtgccctcatgttatattctcactcggggcacaacttagattgtgatcatgcatttaattaaaatgtagaaattagccttggcattatcttgtgtacagtctggttaaacaatttctaaaagctttatcggaattacagagtgacctgtttaaatggatgaaattcaggacagcaccattctataataatgatggattatatgtaaccaacccctaacttcccaatgtgttaaatgcttgcttcattccagaacattgtcctatataaatattactgctccagctttgccacaaaggttactatcaatgatatttcaagtacatttataaatatagccaaaatatgtgcaaaaatattcattagagaaacaaaaaagaacagaagaaacccactggtttaaggagctttttcaagagatttctagctatatcttcaattggactaaaactactaaaaggtctctaggtttcattttccctctcagtttaaaaaaataaatagttttaatatttgttgctggtaagccacagtattagttttttaaatgattttcattagatatgaaatatttctgggattttacttgaagtatttatttgaagcatttattgtgagatattgtaaccctctagcaaaatgtgatcaatacgactgatcagaattagttgtgcaccaggactctgaattctaaatgtatttgacaggtcattaaaatcagatatgtatgaaactaaacaggcaacattactttgtaaaatatttgatctttaataaaaagtactgctctttccgattgtttcattatccatccattcattcatccatgtgttatttattattgatttgctgtgtgataaaatatttattaaccacttacagtgtgacacattttatgaagatgaacaagtagctaataatcataattgacacatttaacactattttgtgtcaggaacttttaaaatcattttttgtataatacattaaatccaaaattaccatgtaaagcaggcattataattatccccatttttaggtgaggaaccaagggaaagagacataaaatgacttatttagatttacctatttgaaaagtaaggttcaaatcgtctagttgaaaagaggttaagattactatctagcaaaacactgactaagaacattcctaatctttaggctcttctttctctgtggtagacaaatctcaaattttacctaaattatattaccttttaaattaacctaataagaaacacaaatatgtaagttgataattagggttcactgtaattacatctatcataagcaatttctagaaggatggaaaggatacaaaaaccaaagtcagaaatttgtttcagaaagtatgatctcatttggcaaggattctcttccaccaaaaaatgacagtcgtccagttagcaaccaactcttacacatggcattaaaaataaatcacaattttcagatctctttttcttaagggatacaaatgtcttagatttagattttctaccctgactttttttctcactctttaatacttactctagcttgtaaaatatgtcctgtcaaaaatgagcatatattaatattgaaatgcaaatcattaattgtacttacattggttgtttcacaaacatatctttattattgtggctttttatcttaacacagtgtagttattatatgatgtaatattttcagcaggtaaccctcttgctaccattatatgaggacctgtcaataacccatattgttaaaccattacttctagacatcacctactagctgaacagtttgataatcactcactggcttacactgaaggctgaagttttggttgttgcttaactctctctcacttcgtgccatgtaaaaatgttcatcaaccctgctttcaagccaaagaatacaaaacaaacagtatctggaaaggcattgatagcaatgaagctacgattacacacagagaataaaacatcagggaggagttggggagggaggacatttattcagatccagtaaactcaggcaacaagctcttctaatatgtaagcattatgaaggaaaaatatatacttttttccattttaacactcaattttgcaaatgtaaatacatccattatgtaacaaacgagaatctggtgagggctaaattacttatgtgtcatttagaaagttatgtttttaaaaataaggcagtcactttttctatatccaccaattaaataaattcatgttattttattatggaaattatgataatttacatatgctcacaagagtaacactcaataagccctctccaattttaatttaggcatgcaattacatcattacttatccttggttcaagtagaactattttgaagattaaaaaatttaaataaagagctaatttttaacaaacctacattaacccagattcaattgctgagagactgctaagctactttgttccagaaagtattgactctgaggccatatacctcataactggtagaaatacttcacttgtggttgaaaagccaatttatctcttaaaaacaaagcaccaccacggtttttttttttttccctagatgcatggaattagcattttctttaaaataatgaatttaggtacttattatgaaatatgattctgtaaaggaagtccatatttggattgtagtagtgactgggtataacaattattctgaaacatttcgttacctccgctgagaggtatatatccagtaaatcactggccatctttctcctgtattttgtctggcagtgctaatttaccaccttctaacctattatagaattcacttatgttattttgtatttcttttctcccatgagaccattgatctctagttgcatagcttgtcaagtgtctaaaacagtactgggctggaagcggatgctcaataagcactccaaggatgaaatttgttctaataatgccgggcgtggtggctctcacctgtaatcccagcactttgggaggccgaggcgggcggatcacgaggtcaggagacagagaccatcctggctaacacgcagagtctctactaaaagtacaaaaaattagctgggcgtagtggcgggtgcctgcagtcccagctacttgggaagctgaggcaggagaatggcgtgaacccgggaggcggaagttgcagtgagccgagatggcgccactgcactccagcgtgggcgacagagcgagattccgtctcaaaaaaaaaaaaaaaaaaaaaaaaggaaatttgttctaatacgatgacctaatgacctagggtttctatgggttttctttttcaaatataacctcaattatacaaattggtatatagttgtttcagttttcaaatctaccttaataactcgttcatatttctacatgattaatttgtatgaaaagtattcactcattaaataaaaatctttggccaactctacctgagaggactaaaggaaaacatggcacaatataaaaatgaggagttcttgctagagggcattaaaaactcattccagggctattaattttattttatttttctttaacaaatgctgggaagacacatgtttgtggattattgtaatactaaattattaatgcctttcattaagatacattttattagttgtggtttgcaagtaaacaattgatctgtgttttttattagggtaaatctattgtgatttcttgttcagtaaattaggctgtttgctgagtaggatgaagcagtgtaattatttttcattacttagtatctatagagtctcattcaggttcatttctctttcagcagtatcagatagattttctttactttcataggtcttgctaaagttgaaatacaaccttcagcacttcaagtgtctcagtatagtcaagaaaaggaaccaccgcttaagcctaaccactgttacagcctaaccgagggcacaaatgtacaagccttgtttaccaatttatagtgactagccacaagagaagattcccatatgaatccaaagttttgttttgtttttaattttaatctaaattaatttggaatgacatctgatgggaatccttcttgtctcagtgtttgggtagcatttaaaatatgtaagcatgctcaatggtgcatgtttgtgtatatacatatgaaaagtaagatgcatgtgttgggaaacttgtaattctggcttgataaaagcattagtttattgtctttgtttggctagtatttccactatgtaaggtacatgtgtagcagtaacacctcaccatttggttctctatagcctcttctcccatgtaatcaaatggttcagatataggaaacacaattttggatgacaataacctaccttgttctgccagaacaccttttaaatccagtaagaagaacatgaagcactctttaagatttaagacatctttgttaaagtataatatatactgtacctatcaatgtaagcatataaattaaaaacaaacaaatgaaaaccatcaatgtcctctccttttccaaactcaggagtcacagctctaattaatggttcaacagttctcctgaagcagactgctggccaggttactcagcttcttaacttgaccttaacctgtaataggaagctacatcatagtactataacagagaagggaaaaagcaaatactaatctgaattccaaatctcataatcaattttcccattcacttcatttaaaaattctcttttatatgcttttgaagagttttcaatccagcgaacatgtaaattattttacgtcctagaaatatactttctctactaagagcaaataagtgaaattcatcctgaaaggttgcaatttgtatatcaatgcttaattatcaagtcactgaggcatgctgaagcattcaaccaaaatacagaaaaatgtcctctatacaaggatcatatgagaagttaaatgtctaaatatgttgactataaagtggagatgtatttaataatgtgctcatcacttattacctaattttgtcctcccaaatgcaaaaagaaatcctagttatcatagttcagttgaatgatgggagggaggactcaaacagtcactaaatagctgagagatgcaaaagttagtacaggaagagtttgagaaggaaatcaatgacatcaatcatgacttccatcaattcaccaggttaatgcagtggagtggctctataggccaggagtcagttctggtcgttttggtgctactttattcacactgcattttgttcaaaccttccttgttaattttatttgttggttgtcatgtctatgtcttcatgagactgtgagatagcttacgttatagattattatagctttgtatttctgcatcccccacttctagcttaagatctatttggcagacagtaggtacccaataaatgtgtttagtgaataaatatgagataagagattgtgggttaacaagctactctgtgttttgctaaacccacgggaccctacccggctccacgtttactcctattctcctagtgtatactctctgttctagttttccttgactgtatttgcaacaacatgacatacattttttcaccatatcaattacataaacactgtagatatttctctgggagtttgatggaaaataacttatttcttagctgcattttaaatgaagaacatttaggttaatgtgttggtgaagtttaatagtctatactacacacaaaaatatctattcatctacctagtcctttatttccattcatttatttattcattgattgattcaagcagcattcattagatttcctttactatgtactacacatggcattagatgctttggtagatactgagatgaagcaggtaaatccagtttctccaaagaactttcagtcttgcaggcttattcagtttatgactacaaaagccatattattatagaatatatgggtgaaatgtaaagataatcaattagtgcttctagccttttataaggtcaaggatacccttaagattacaatgaaagctgaagattttttcatcataacttctcattgtacaggcacaaaatttgcatcatgcttcccaggatttatagaaaaatggaatgagttcgaggataagaaaaatcctctaatttggtgtaaacccatatattaataaaggttaaaaaagtgacattcagaaaagaaaaagcatcttcttaaaggccatcactgtgaattttaatgtcttacccttcgatggcaacttttataaaaacccctttgatgactctctccttactatttcttagtggtcttagaactggcagaactgtactatctttccctgatagtctatatccttatgatgttccccaaatgttctactcattctaatgtcagttgcctttcctagccctgcatacctgctggactgaataataatagactcagttataatcccatttttctggattaaccctctaacacctccatctcaccaaaataaggagttgttgaaaacccaagcaccatatcttttatttttgtatttacacatataaacttaattgttttaaagaaaatcacaaagtacaaattatatccttaaatgttccaattagaaaaaaaattactttgtcataggatctaaagatatggaaaatctgcattgctaatttttaagattatttttaaataagaccaaaaattacctactgttagatttatacatttttaataaatttcaccaaacggcttagatatttttctaacaagatgtattttgatcttgagatattcatgttccgcacaaatatattgcaattaagatagcagcataaagaaatactgttagcagttagagtgtgtgacagtaatacaaaattaattgatatatgtgttacaaaattacactgcaggttattgcttgaaggcctaatggtgatccccagcttccatcaagtgacagttttaatatttgccggtgatgctctttttatctctagcagctgtttgattctgcttagaggaaggatttgaaaaaataaaacactgggcagtcttaggaataaaagagaaaaaaaataggatagtcagaggaaataagtttttagaaatgtatttatcatagatgtatcatatccatatttttatatggtggaaaagcaaaatacttttaatcagaaaaaataacaattaatctatgtaagtatctccaaataggttgacacttgaatttttaatgctacatttaatcatcctaataaattataaattatattactgtgagtttgcacaatagtggctgtaatattttgactaatcctcacaaatatttgaattgaagttgccatcagttttaagacattctaatttcccaaacaggtaaattaaaatagagggttctcttttcacaagacatacacatctgttaggcacagatttggcagcacatgtgtaggatttgttccattttgtttatatgtgtcctgaagaatccatatcaagcaaattattcattccttctatttctgttttgtaatcattacatatcagatattaaaatgtttatagttttttccttaaaatgtaatcatttagacaataatttatcaactgaggaatcatcatacatttagatctatatgtacatgtatattcatattatatatgttatgaccaaatttgtttttaaatatatatgtctgtgtgtgtgtgtgtgtatacctcactacttaccactttatagccatgtaatacattttgtttttgaattaataaatctcagctttctttcagtaatgtcctaaatttgttttaaaaaataagcttctgtaaaatatgactgcaaaagatgaggtaaataaaatgcttagctatagaactgaagtaacagactttaatccctataccataaattatgttatactgcttcacttattcaacctctcttctatttatatctttttcttgctttctaggcaattttttttcaattatatattaaatgccaccttccctcccctccccccaccaccaccttctgacagtcattaatatgattgagtgtctttcatttgggtgaagaatctctatgcaaatccatgagaatattatgcagaatatttggaaagccctttgtccacactggagttgacagggtgatagtggaactgattcgggctagatgatgtgatttaccagtgataacactgctctgtgtttactgcctggctgactctcacacaagtatttccatcctggacctataaaagatgagtgatttagatcagtacaggtcaaccaaccctggaaaatcaataattttgtgtcccacaagttcagttaatatacaaatgttattccaaagttaatatattttgctgaccccacttaatgtgtacattgctttgactcatcatgtagataatcagaaacattttttatgaactgattaaagaaataatgtggtaacattgtttctatttattcactctcttatgagattcctctatacaatatcaattgatctttatacatccttgactttatatcctaagtctaaggtcttttttcttgtgtatcttctgcaaaaatccacaaatatcacaagtaaatacatccctttcaccttccacctgtcttattcactctgcacttttttgcttgattatggaactatcattctacattgcttcttgagttcactttctcagcgtactgtaaagtttttcttttttcttcatcgtagtcactgaaaagttttccagttatttcctttccaactgtgcaacttctgatcccaatccttcttacccactctgtgaaactggacacttgatagcaccatagtggccctgtccacctgcctttgtcctggaaccacatttctagctgcttttggacatcaatctcagaatctcatatcattgccttcaataacatatgctcaaaacagaactcgttagctttccaactgaaattttatttaccctacctaccttatttaatggtacctccactcagaaaaacacctgcaccagaaacagcttcatttcctgcaaagtttttttactgctttatctggtcccatcagttttacctctgaaatagccactttgtttctatctctcctttcttttcacagtttgagtttagggtctcttcgttatatggctgagaaggtattgtaataccttcttaattagtctgcctgtttttgtcaatattttctatttctgcatcattctccgaagtgttcattaagttctgcagcatagccagatgctgcttctttaaaacattgttttaaacccattttaaaatattcagtgtcttccttcaactggtgaaataaagtcgaaaacgtgagcataccaaatgcagcccttcaaaacataacagtaccatcagtgtccatcctcagttttgaactccctaccaggcacgcctataatcacgtagttttgaaatactcactggagagattgctcagtttttctctaagtgcctttgtgtatactgtttcttctttctgcaatgccctttacttttcctaatcctcttcaagtggtaagttttgcctcttccatcattccctcctatccctaggaaatccatcttcatccttcaaaccccactcaaagatgttctttcttaggcctttccttttctcattttgcctttttctacccttgaaagaaaggaagggtgccctcatctctattcctttagccttttgtacatacttctaataaaacaaccatcaatttatttttttttccgttggctacttattgaatgttttttgtgagttaggagctggagatatgacagcatcatttctaggctaatgactcgctcttggcaatgtgcattgtaattttaatttatgcttaatctcattgctaaattgttattgtcttgaggttactcatgtttggatgaacttggggcaggacttcaagaagctctacaaatgtttattaattaatgaatatactattcctgtcactctgtcactgttttactctgaaatatttttgaaatcttttccctgcaatattcatattgcatttggaattaattcctcatgagccccaagtacattcaagtcctaatattcctgtgttattgatgagaatacaatgacaaagaatagatgtgaaattaataatacactctaagtcagacaaatcttttttcttaccaagtttaaatggtgggattaatttccagcctgatgtctcttatagtttatcaaaacatttaatacgtttagagaggaagaaattatatactttatgttgtagaatctactaagaaattagctatttattaaattattttaaaatttattttagtgaaattaattcagttgatttaactgcaattacatgagaaataataagaaatctcattctaaaaactgtaatactaggtatcttagtacaatattccttgcttttatttccaaatatcatattttcctcttagggagaaaattgctgcctgtatataaagacaggcaattgaaatgaaaaatagtgttagtaacaaaaataaaatatgtagaatttgaggtagaactttgaaataatgaaaaaataatgtggtattttgttctgtgagtagttaaataaaagatacaacttttagaatatacctgcttcattttgtgaaacaaatagagttttagtttgaacaaataattgagacttcatttctacaatcttaactgtaaatgcttgacttgtaaatatttgacaaggttgacttggtttcatggagttagaacaaaaaacaattcttggtagctgatgtataacttatatcttaattattatttacatccaataagtttttgaaaattagactgaggattcttttccacagcattagaatgcctctgtgactgtgattctgcttaggaagctggtggccacagaatgactgaactatttgaatgcatagtcaaaatgttcatcagaataatttcaactttgttaatagtacaaatttttcgagctcgcctaaagacagtttgaaccagagaaaataggtatgtttgtgaaagatgatattgtagttcatttacctcaatttatatactactatttctgcctacttctttgttcatttgttctgttcacttaacaaattgtgtgtgtgtgtgtgtgtgtgtgtgtgtgtgtgtgtgagagagaaagagataggataattattgcccaccaagtagaccaattttcaaggtcaattctaatgtctgaatttgattgaagaaaccgtaattgtacaaatggatcagttcttaagaaaaaaaaaataaatgaaccagagaagaaagattttttaaaaattgagtgatagtcattccaactgtattctcagcaaaggctattatttcttgtataaagaatgtgaaaatgaaaatcctggtcaagactagaaagacatatgagaatgagaaaagaatattacagtgtaaatgtagactaggtatttaccattggtcaaggctccagtactattagagtgaccattgaccagaatttccaatgtagaaaggcattgaactagagaaaaaaacgagaaaagttaggattccttgaacagtgaggcttgagcaatgaaaccactggtgctgtttttagctaatcaaagttaatatgatttaaagaactgaagagaaagcccaattttttgttctgaaataataatattttttgagcgcccccactgtgcatgccacagactataataatttgtatataatactatatgattttctcaacacaacaacaaagcatgctattcctattttatacctgacaaaaactgatatttggaaaatttaaataatttactggagccataaaaatgccccaaatgtctgattccaatgttttaattattatttcagcttctttattccaaaacttaatgagttttatatattcagtatagaatgatgaaaaagacatagttcctaccttcatttaggcttatgttctaggaaaaaaggtagacaattgaaaaatgtgtgagagtaaaccatgatttgaattgtgagaacagaaatacagagagctattgaaaaacacaaagtcagatctcccagaactgacttttaaatggagacataacatagatttggtataagaaaatgagagaagaatgatctaaacagaaggtacagaatctatgtctacaacaaagatctgaaaatcaagttaagaacttttgtcatcttattttaaagttaaatttgctgaagtataatgtatattcatattattttatatatataaagtgactacttttagtccttggatgtgaaaattattttttttagaaattaacaacaattacttggagagcaaagatggataaatgaagtaggtgaaagtaagttgctcaaaggcaagataaggctattaagtaatgaaattaatgcatttaaataaagctaatctagtaaattttcactaaagggaatttcataagaaaagtgtcaaacttttaatattcattccatgtatatgtctacatagcacagtattcaatagcacagtattcaaactacatgagcaccaggagaatttttaagatgcacttagctatgcttagttttctagatgatgtaaatcaggaccaaattcttggagtcacttgttcaggagaaagcatcagagatcagtttgggacccagtgtcttgtcctcttacagttttccttttggttttcagttacaccaaactttcaggaggtcaaatgtattaaattcttgattttaaaatttatgtaaatataaaaatccactgagtttacattttttttccttatttaaactaatgaatcactagtgcaggtgttagctagacttaaattatagactgtcccactgaaagagctatttcaggcactggtaggagtaaggtaaaagaaacacttagttttatttgtcactgcaagttgctgaaataaatatttttaaatagatgataaaaatactttatttctatatgtatttataaggaatcttggaatgtgttctgtgttgagtgatatgctgagagaaggggagatgatttatctattccagggtttagatattatttcatacattcaatttacttttaggtttctcaaatgctaaaaattgcttcgtatagtaaataagaaaggtgggaggtgatgaggttagaaactgtagaaatcaggcaaggcatatataatgcaggctgccagaaatgttagatagccactgggagtgagtcctgttaccaaatgctgtatttttattctattttcttctataagtagtctgcttaaggagaaatttctaaggttacagtttttattagagaaggagcacttactatgatatcaattaagcatataatatgattttaatgaatgagatataagtaaaatagattttatttaaaactgtttacttttagtcttctctgcacataattacctaatattttgctgcttttgtcagtggtgtcattttcattcttttttgttaggggcatttccacacacttcccaacatttgacaaaacccccaaaccatctaaaattatacacttttcctcatgcctttattctaaatctttgaagctacagaaaatgtctgcaatcaaactgggtggaaatcttgaatatttagttgaggcataataaaggatattcatgcactgaacataatcttataaaaggtatttaagacttcgttgaagatagtttcagctaagtaaaaaagaagattcaaaacgggacatgtatatgatccaaatcctattgggggaggtggagaacatataacagataaagccactgaaaaaaaatacgaggtgttcagactttccctctgttccttcttgttttagagtccagaaatctcaaacttgccacttatccattacaaaagtaaaacactgaagacaattatccaccagatttttcatcttcaaatatcagcatgctaagaaaaactttaaatatctctgagtcaacttccatcttcaaatcagaagcaaaggaacaaaatatgctgctagacacaaatttgtcccttgtcagagaatcagaataggagcagcagaatttttttttggaaaatctcatccttaaatattttttcctgtaattcatatttgcgttagttatacgctctttagaacaagaaagagttttttactcacttgagttagctcaagttcatgtggaagtgagagaaataaaaatcttattttgcagctaggccttacaagtatccaggaacaattataaaagtacatttggtggaaacacagaagtgttcaaactgtcttgttaactcagagactagaaattgaggacaaaaactcgctagatatctagtactaatataaattttagtaataatataaatagctaacatataacgatgtcttactctcgcttgatagtaatattaggtcctttatatatcttattctacagtttttgcaaaaattatatgtgctagtaactgttatttccccagttcccagttaggcaactggaagggagcaaagttcagtggctggaccgaggtgatacaattagcaaataactgaatcaacgctcttaccatttgattccaaatctaccctataatttttttttaatttcatagcttttatcccagttattgatttttaaagtccctttttattattccgattaaccagttaacttcccataacagggaagagtaccagatcctactgatgatttactgtcatccctatggggcagagtttttgtattagaccacatcattggctgccttgggtcatgtgcctatccctgatccaatcagctttgactagattgaaggcatcttgtgaaaccagcacgaggtaacttatgaaaaacccacttaaacgacagaaaagatagaaactcctgcaaaggatatgatgattttaggaagcaccctgagtcagctcgcttgagaatattacttattcatcttttctccgttctttatagaaatatctattctcgtaacatctatcctccatccctttagtttctgtattttttaatattgagtgaaattttacagttaggttgaacttcctattatttgttatattctacctgcccatcaaaaaatttaaaattactttatttaaatatttgaatgtttaaattgaattaccacactgctgtcatttaaataatgatagagaaatgtgtttccttggtagcttttcataattttaccataattaataaaaaaatgtgtattgaagatgtctaagatacacaataatattaacataattatgtttatcgttccagatcaaataaacattaaatatccttaagaaacaaaaaaaatgcatataatgaattagattatgcttaaatagattaattttgatgcagtggaaatttcaaagtgtcaaatgaagaaaacactcctttcatttcccatcaaagttgatgctcaaacaatatctaaatactggctatataatgttgcactgcctgttgaagtggcagtcttctgttgtcaattctctggattcctcatgtagaatttcttctgtgtggcattagtcatatgagaagggtatataaatatatgtctaaatattatacgtaaagacataggtgtatatatagatatgtagataaagtatatatatactttatagcaatatttactgtgtatttgtgtatgtggatttttaaagaaagtatgatgaatataaaatgaattctatctttaggatatgccaaaatttgctgtgcctcctgtacctaaattagattaaacttaaatagattaattttgatgcagtggaaatttcaaagtgtcaaatggagaaaacactcatttcccatcaaagttgatgctcaaacaatatctaaatactggctatataatgttccaccatctgttgaaggagtagtctgatgtcaactctctggattcctcatgtagaatttctcctgcttgacattagtcacaggagaaagatcatacctaaggtcttataagtggcctcataatgaaggctgggcagacagaactagggctgggatgcccccaaacagaggaagtattttgacttcccctcctatttaaaaaacataaaggtttacaggatagagtatgttactcataaaaaaattcacattcaaacattttgtaaaactctattagacatttatttcagaagtaaaagggcaaagatatttctaaaaattagccagccacacattaaaagagcatttaggaggataattcaacaaaagaacttctgtctatgaaattgcatatgtagctgcctcagggcagctctgaagctatctttctgagaagtatactgtattttaagaatacactttaagaatgaggtgacatcttatttaaaatctaaattttctcaaaaacaaaagattatttatatgacaggcacaaggatggttgggtctcatagaatttttcctagcatctctcatcaattggatctctcaaaatttgcctgtccttaaaaatgatcacaaagcaagacgaaaatgtttcaggttgacagaaacgcggatatttaaaatgacagaatctcttggactgataaagattttaaaaaataaatgtaggtttgagataaaagtaatgatgcaaggtaaattttgactctatatttggagggcaatttgtctaagtgcataaacattctataaataaattcttttgaaaaatctcacttttactcaattagtaatttatttttaaagtgagacaactgactgaagattactttcagagttattataacttttaattttacctattacctattttttaaaacttctggtcgggcgtggtggctcttgcctgtaatcccagcactttgggaggctgaggtgggcggatcacgaggtcaggagatggagaccatcctggctaacatggtgaaacactgtctctactgaaaatacaaaaagttagccgggcatggtggcgggcacctgtagtcccagctactccggaggctgaggcaggagaatggcgtgaacccaggaggcggagcttgcagtgagccgagatggcgccactgcactccagcctgggggacagagcgagactccgtctcaaaaaaaaaaaaaaaaaaaaaaacttctgaaaagtatggaaaagtcatataatggtctatcatatccttattaaatgtattatatagaactgtatttaccaatatgaaggtaaatttaaaatatttaagtaaaatgggaatatacagaacaatatatattatttttaaaatccctgataatttatatatattttttctatatagaatagtctgcaagaacatatgaaaatgcgatagcagctattacctagaagtggtcaatttcagaagatttgattttttttctttttgattgtcttctatgttcttattttaactaaatataacatagtaattaaagtacccacaaaatttgatcataacactctaattcatagcctggtaatgtgacttaaaattaatatgtgcgttgttaaattacactgtttctcagtaatttctttattatggaaaaatgaacaagcattggtataatgtgggaaaatatgtgcatttatgtcgcttctgaaaacatgaggtttaatttatattcctttgggtccttatggttacctcttctaattttctgttaatattaaaatgttacattaggcctcttctttttaataaactaataattactttgatgagatttcacttaaattctcatgaggtgtctactgtagagaagaacttaattatctgtgtttcttatggttatgtttgggaaacccattgaacttttcgtcatatttcatagctattgaaataacacaggtccacctacctaagacctctgtcccccatcacataaactaataaagaagctcttctcaattgataatttagggttttgatatacatctacaaaaaaagtaaccagcctaggaaaatcactgtctcactatctttttattttctagaggactttcatccattttagagacttatttgatgatacagttgaaataaaaggagatgaagttcatttactccatggctttgattctggagaatactagggaaggagattcttgacaaaatcataaagggtgggcctctagtactccaaactcctttatttttactattcagtctttttatctgtgctacaccttcatgattgcccccatctccgtaaatcccttcctttgatctattattcacaaagctgtaaataaataatagaaaaaggtttactttttttcagagctagttgttaccttttgtactggtctgttttcacactgctacaaagagctccctgagactgggtaatttataaacaaaagagctttaattgactcacagttccgcatgtttggggcggcctcaggaaacttaaaatcatggcaaaaggcaaaggggaagaaaataccttcttcacaaggtggcaggagagagaccgcacagggtaaactaccactttaaaaaccatcggatcttgtgagaactccctcactatctagagaacagcaagagggaaaccattcccatgatacaaccatctcccagcaggtccctccctcgacacattgggattacaattcgagatgagattagggtggggacacagccaaaccatatcacctttgtagagctgaaactcacatacatggatttttaagtatcagtgagcaggtgggaaagatttgaaaagtacaaagcattgaggcctgtttagaaaatgtaaggtttgtgccacatattaatagctttatgcaaggtaagtattaacaatgtttatgccggacgcggtggctcacgcctgtaatcccagcactttggaaggccaaggcgggaggatcacgaggtcaggagatcgagaccacggtgaaaccccgtctctactaaaaaagacaaaaaattagccaggcacggtggcgggcgcctgtagtcccagctactctactcgggaggctgaggcaggagaatggcgtgaacctgggaggcggagcttgcagtgagccgagatcgcgccactgcattccagcctgggtaaaacccagcttgagaaaaattccatgaagggttatgagaacaggctttttgacagatgtgtttttatatcctgatcttgctagttgagtggcattgaaaaagtcatttaactctctaaacagttttacctgatttgttagatgcaaataatacatttttgtaagcattgaataaaatatacaaattgtttaatttagcatgtggcacataatgaacattcaatagctgttatttatctcccacaaaaagttattttcaaaatctaccaacttaaaataatgaaaagtaaaaagcctaactgaatggttacaaaaaggacattaaaatatttcctatattcaagcaaaacaaagggagtatttaaccttatttctaaactaatttctaactatacttagtgtaagtttaaatttaaatttagtccaggccagctcagtggctcacacctgtaatcacagcattttggaaggccaaggcaagcagatcacttgaactcaggagtttgagaccaacctgggcaacatagggagatcccatctctacttaaaaaataaataaataaatatcctgacatggtggtggacacctgtagtcctagctgctccagaggctgacacggaaggattgcttgagcctggagatcaaggctgcagtgaactatgatcttgccaccacactccagcctaggctagaatgagactctgtctcaaaataataacaacagcaaaatcttagttcagcctaaacttagtataatatgaactattatttaatattctcttaacatgccatgtttccctttgtgatttcccttttgttcggtatgctatcctccacctaatcagcttgacaatcttgtattcttttattaaaatgctaaagaaagaccttttcggggatgcttctctgatgactctgtcagttacttctgattgttagtataatcacccaacacacagtgactaaacaataatgatatcattaatatcacccaagacccagatgttgagcactttccacctcctcatcctcactgtgctggccttcatgttctggcatagaatcatgctcccaagatggctatggctgccccagacctgaagtgctcacaatctagagcaatgcaggagagcttctcttcacaagctttttttttcttttttctttttagtagaaaggaaaccacttcccaggagaatcctagataactctttatctcagttgtcattcctcagcactggccacatgtccatgccctatctgtaagagagatggggaaagcaagagagatggggaaagcaagcatacagccttccctgtttccatagtggaaagtggtatttttcaaaatggtgaaaactgctgctgggtaggcaatgaacaatacactctgcacatcttctccttatctgaactcccaacttcagctctgttcacggaatgtgttaatctattttcattgctcttccagcagcactccagatgcacctatattagcacctacctcacgttattgtaagtatttctatttttgcccaccgctttactaaaccatccgcagcttgtaggtggagacccctgttgtcttcatcattatattcttagtgcctactttggttcacagtaaatgagtattaaataaatgagtcagtttaggaccttttaaaatagggaacaaggaattatgatttaaaatatattttaagattaaaataataaggagataaaaaacaattgtagtctttgaagggcctttaatggttaaaacacagcataatagataggagatttcacatcatccctgaaagagccaaagtctaaccatctgcttcatatctcactgtgtctagagatgagaaaaaaatatgtgaattttggtatcccatgggagattggagaaggatcgtgtaggatttagaaaatagagcctgcaaggaagtgtcaataatttaggctttttcttttgcatttacgagggagatgtcaaacttttctccttccttaacatggtagtatatgaaataacttttgctgattcatttgaatgggcttttgaaaaagggcaggttaaaaggaaatagatcatttctactgaaatttcagaaaagaacacacaactgcaaagcattaatccaatgataataaaaactccagtcaaccgtgttgaatgtgtcagctttattccactgaatatatatcctttgtctcttgctaaataaaagacagggtttttactattatctctctctctctctctctctctctctgtgtgtgtgtgtgtgtgtgtgtgtgtgtgtgtgtgtgtatgtattttttggtgaagaagcagttccaaataggtctgtgttgaatgctttgtaatttcctatatcactgtctaaaaaaacacaagaaacctaccagtgtttcaatgattaaggaacaaaatccctacattctccctgaaaattaaatgtcaaattggatttgaaatgtttacagaggtacttttcatttgttcattatgatagaaatgataaatgggcaaagcttcttcctggggataatgtacttcttcaagttttcaattttgtctcggttttatataagatgtttttgtgagtacaaattgccatctgcagctccaaaaacacttggtgcttaataaggcatagaatgattacacatttggtagcatccaatagaaagcataaaaatatactattacttataatttttttggtgaaggacattatcatatttttgtatttttccatctcccaagaataaaaacatgtatacacacttgtacacaaaaatatatacttcccaattcatacatttctcagataccagctacttacaaattattagcaatttataaggtttttcataaaattctgtcatgtgcttctagtcattattgctggccttcatcctgtgccagtgtattgggactgacatttgacatcaaggagaagaaaagccaatttatgtaaaagtagatcatgttgaaactaaaagaaagcgactaaggagaaaaaggcctttaatggtacactagcttgcaacatgcttgtttcttactcattagatgaggcttacacctgtgatgtcttggctgtgacatgaaactgggaaattgttttagtctctctttgctatcgtaacaaattaccacaaattgagggaatcgaagcaatacaaatttctgtcttacagcgtgggagtcagaagcctgaagagtgctcaatgggctgagttcttttggaggctctaggtgatgatccatttccctgtccttcccagctgttagagttagcctacattccttgatgcttggctcccttctcagattacagcttcttctttcctggctcatctacttctttgctctctgatctccccctggcaagcacccttgtgatgatattgggcccactaggataatctaggataatctcccacctcaggatccttcacttaatcacatctgcaaagtccattttactatgtaaggtgacatattcacagattccaggaattaggatgtgatcttctttggggtcccattattcagcctgccatggggctcttattcaattttagtcaatttcaaattttattcttatttggcttgtctctcgatccatcttagtttcaaggatgaatgagctccagctagaattgtacaccaatcttaaaacatgcaaacttgtgtacatattttgtgggtgtacatacacatatgtctgtagagtaagtttctaattattactactgtctcagcatgacaacaaaaattattgattaaaaatcatgttatactattgaaatataaattcttttcattcctcaatgcccgtctaattcaagcctctgctgattttttcaggatgggtttatcatagatgagtgataccatgaattgtaatcttagagtgtctaatagggtttatttttcaataagccacccattttgtaaagaatatctattttctttgcaaaacggaactgtcctagttcaagcatttttggtctacctttccttaacccctagcccctaaaatgtacataatctaaatatatttttctatttctattaattatagacttaagatagtacattttatcctgtgcttacagatgtgatatccctaaaggaattatcttttgcaaaaaactataacatatttggctaagttacaattgcatgccagctattgtaaaagtctgattttcagcagtctttaagagactctggagggtaacactgaatctcaagtttgcctttcagttttcatggttgttataattttatatagtataatccttactattgaggtatttcattttaaccatgggagaacttaattttatcttactgattaactaaaaaagctatttatcatcctgaaaataaaacagaatactagtattgctttggtttttcttttagcccctgtttttgcaaaaataatgtgtaattattggcagaaaatttggtgtttttcactgaagcctttgttatatttttgacatataataattgcatatattcagatagttaatgatgtttccatagatagatatatattgtacagtgatgagatcagggtaattagcatatccatcatttcaaacatttatcatttattggtgttgggaacgtccaatatcctccttcttactatttgaaattatattattgttaatcatagtaattctacagtgatacagaacactagaaattatttctcctatctagatgttattttgtatcctataacaaatttcttcctatccctcctgtcccactatcctttccagcccctagtatcctctgttccactttttacttctataagataaacttttgtagcttccacatatgaatgagaacatgcgatgtttaagatgtttaactttcttttcctggcttatctcaagtaacatagtgtcctgtagccctgaagtgttacgttattgcaaacgtgaagtcttaagacagaaccccttgccctctagaagctcatcacacagtaggtacaattcatacagcaaagtaaaatagaagcttttcggtgttttgagtagacggttgtggatccagtgatagagaaagaaaaagttcactgggaaagttttttgtttttttttttgtttgtttgtttgtttgtttgagatggagtctcactctgtgcctaggctggagtacaatggcgtgatctcagctcactgcaacctccgcctcccgggttcaagtgattctcctccctctgcctcctgagtagctgggatacaggtgtgcaccaccactcctggttaatttttgaatttttagtagaggtggggtttcaccatgttggtcaggctggtctcgaactcctgaccttgtgatccacccgcctcagcctcccaaagtgctgggattacaggcgtgagccaccgcacctggccagaaagtttttattaaaggatctaaaatgccattagacttgagtgaatgattgattagaaatgtgttagataggaaagggcatcccaagcaaaggaatataacagtaaagatacagaaatgttatccaggtgcggtagctcacgcctgtagtcccagtactctgggaggccaaggcgggcagatcacgaggtcaggagatcgagaccatcctggctaacacggtgaaaccccgtctctactaaaaatacaaaaaattagccaggtgtggtggcaggcgcctgtagtcctagctactcgggaggctgaggcaggagaatggagtgaacctgggaggcagaggttgcattgagccaagatcgcaccactgcactacagcctgggtgacagagcaagactccatctcaaaaaaaaaaaaaaaaaaaaaaagatacagaaatgttatatttagggaaagtgaatagaatattaaggagagttaaaagtgcatgttgaattggtaaaatgacagtagaagaaagtatttagaaagaagacctctaaccatgttatgaaaaacaatttaaatggaattctgagcaatttattctttatctacatatgtacatttttctgaggcaggtgaatgtaaaggaaggggattaaggtacttcttgatattttataactaacattgttcttgttacattacatgagttttatcaaaatttgaagttgcatttgtaatactttctgtaggcctctacaagaattctgttctcctggtaatgaattcattgtctgctatatgagacaaaagaaaatataaccatatttctcttttagcagttatgagtgttgtggtatgaatcatcctatgtttaaattagcaatgagatgtagagacaataaataaatatttgatgttaactaaactctgaaaacataagtcacagtgtttccctaatacttagctgttcagaagattgtatctatcctttaatttacctattctttaaaagtatttttaaaccttattatctgagtccctggggatattgctgtttaatgcaagctatccctcctttacatttaatttgtaattagctatcagaatgaatcatttatatttccttaaagtttttctatagtgtccttttatacattcaataggcaatttattaaggtaatattagtatgtacaacattagtataacaagtgaacttttaggaaaaatggcataaaatttttgtaaattaatcatggtaaaatattcaaagagctgggggctacatagttgtgcagtagacccctattgatgatagttttagtatttgacatagtttctgttttctgaaaagatcaaaattagcagttcatcttgattttaaaatgagaaaatataaattagctagtctgtgacagctcatatatatacatttttttcagctatggctatatcaaactttcaaaaatatttattataaatttttattaaaatacataattagatgttttcatgtaagtgcagaagggtaattatactaagcttttctcatgccagggtgaatccaaactgagtaaactgtgtaggctatgcttgtcctaatcttttcatgttttttgattgcaagaatctattattataaaaagatatacatggtactagctttgatcttcttccttaggcatgtaagtgaaaccgccttcacatttccataagctccttgttttaattacagtgtaaaacactatgtttcatataataggaaaacatttaaaataagattaatctgactatctcagaagtgtgggatgaagcattaaataggataaatgaaaaacacacatatatacaacatgtttagcttctgattcaaggaactcaataaagtggatatatttttaagtaatcatcttgaaatactgaaattttttttcatttgactcctataactaatgtttttaaaaactgaatttgaaatggaatatctggttgaaaaatacataggtggtttatatagcaggctatttttaactgagatttcctagagggataatataaaactgtccccaaaacggtaacaatataaattgtctttaaaggttgaaacttgctttagcgagctgataacataggctcgttaggtaaatcccattaagtctatcttattcctgaaaaaaaaaaatgtcatttttgaatcatgatggatttgtgtatatctctatatacatgtgagtattgaggatgggtggtgtatttgtcaggtttctctaaagggacagaactagtaggatacatgtatatataaaggggagtttattaggagatttgattcacacaatcacaaggtgcagtcccacaataggccgtttggaagctgaggagccagaaagccattctgagtccacaaacctcaaaagtagggaagctgatagtgtagcctttcgtctgtggctgacggcctgagagtccctggcaaatcactggtgtaagtccaaaagcccaaaagctgcagaacttggagtctgatgtttgaaggcagaaagcatctagcacaggagaaagatgcaggccagaagactcagccagtctagttcttccaccttcttctgcctgcttttattctagccacgctgacagcagattagatggtgcccacctagactgagggtgggtctgcctctcccaatccactgactcaaatgttaatctcctttggcaaccccctcacagacacacccaggaacaatactttgcatccttcaatgcaatcaagttgacagtattagccatcacagttggtttgcatattttcccaagggattttcttctgagattttcccaaagaattattctgtatctatccctccctataggtgaacatttggacattaaaacaaaataaaatgaagaaaacatccaactgtcaactgcacactttttaaccttagctggatcctcattgctattagaaagttattcttgcacaaattcttagttgattcctttcctaacgctacagcaatcattctaaacctttaccaccctttactgttctactgtgtccagagttggttccttccggtgggttcacggtctcgctgacttcaagcatgaagctacggaccttaatagtgagtgttacagctcttaaagatggcatggacccaaagagtgagtggtagcaaggtttattgttaagagtgaaagcacaaagcttccacagcgtggaacgggatccaaggaggttgctgctgctggctggggtggccagcttttattcccttatttgtcccctcccatgttccgtttttgtcctatcagagtgccctttttttaatcctccctccaagtggctacttttaggatcctgctgattggtgcattttacagagtgctgattggtgcattttacagagcactgattggtgcattttatagagtgctgattggtgcattttacaatcccttgctagctacagagtgctgattggtgcattttacaatcctcttgcaagctacagagcactgattggtgaattttataatcctagctacagagtgctgattggtgcattttacagtcctcttgtacgacagaaaagttctccaagtcctcactcgacccagctggcttcacctctcactaccttcttcaaatttctaaaactaatcctgcttctcagttccttgagaaaacacaaccgactaagactatgttaactttcttccctaccagctaaaaatcaatctatttcatttttccatcctttttcttcagggcaagtgtttctactattgtttcagttcttattccatctctacaagtttttcttgggcacatagctctactttcaccttcttcttgggcctctagtctctcttcctctagtggtatgtttccctcagcctatgagtctactccagatttttagaactcactgtacttgaactttatcatgagtgattcagttatcagaatttcacataactttagtaaatctcctttccccttgcatcctcatcctgtatctgtggctgaactttgtttcctctgcctcactgcctgacctgctcttacctctttgcctcttccttttgaccacctgttcatgccccaccctcttctcactttaatttaatctacacctatttctattcctatagtttttcactaacttcttttagccccagttctcttttgtttccagttttacccagtctcctgaattacagacttaaatatttcactattagatatttcttcttggatgtctccaaaccatcccataatcagtatattttttaaatggttagaaagtcatagatttgggttcaaatatctgaatttaagatgctggcatttattagatggtgaacataatatttgactgcagtttcctctttaaatacagtcttgaaattccattcaaccaacatgtttttccacagtaccatctcctctcacctagatgattgcaataacattctagctgatctccctgcttccaccttcacttcactgcagtatatattctcaacatagtagccaaaatgattctttccaaaagtaagccagatcctgatgagagaggaggaaggaagaaaccactcagtcaggcagttagggcaggtcctcggtagaactccttcaaaccaagaacagcctgaaaatcaagctgtaggccccagataagaaaaagcccacatccctatatggaaacacccactctgtgagcccagatgaagaaaattgactacttttctgggcacatttctctccttttggtgcctttgtcccgttttgtactcttcttcctgattatctcatacctttcatctgttttacatatacctatctttctgtgattggccacaggcaaagtcttaatttgcataaagtgaaatgtcactaaagctctcaattggttgcgggccaagccttcacttctgcctccaattggttctttacactgtcctgtgtcttcctgagacttgtggtttcaaaaatggctcatagaccagtcaacccactcctcctcattctcagtccataaaaaccccaaacctagccccacagccggcaaccctcttttagaccccctcttgctgctgacaccttttctgtcacttaataaatctctgccttagccctctccagtctgtgtgccttattcttggttgtgggacaagaatccagaactctctgaatggcagaagcaaagagctgtaacgctcccacccactgagctgctggctgcaggagtcaatgagctgtaatactccctgtcacttgcagaactacaggagtgaaaaagttgcaacactgttacactcctcagaattttttagtggtcctccatcctgttttttgtttgtttgtttgtttgtttttagtaaaaaaaaaaaacctttatctgatctctggaatcccatattccctgaccacatcttttcctaatttatctttttctgcagccacgttgacctctttagtgttccttaaatttgctgagcaccctcctgcctcaaatccttagcccttgacctttaattcaaatgggtgtcactctcaccttacttcagcttttattcaaatgtcatattctctgtgacatatactctgaccacctatttaaaatgtacctgcctccatactctaaccgtcagtccccatctctgttctatttttctcaataaggtttatcttttaacatgctatacaattggttcatcggttttgtttttgtttctatcctcccattataatgtaagatccatgataacaggaattctggcctatttttatttatttattttcattatcgtatccctagtgcctagaacacagtagaagttcaataatatgtgttgcatagataaatgaacacattgatgtgaggtggtgctttttgtaaaacattctgtaaaactgtaaaacattcactatttattcgtctgttatttctactattattccactccccaccatgagcaggctcacagacacatgtacacatgaacccagtcttttttttttctatctatatatcataagttttatgatgccatccattgtttaagtctatatacttgaagacatattggagcctttcaaatatttagtcaccaattcttaactcatatgtcacatcacttggatcagagtcttcatctaattccccattaccttagtcaaatcatcttgaaatcttctctagagaattgcaagagtctcctaggagatggctttgtagcatgttttattattaattaccttttcttaagtattttccatggcttcaaattataggcaaaatacttctaatggcaatcaagttccttcataactgatcctatgtttttaagatgctctattccaacaccataaatcatttttatggtcttctttactcctttatattttcaacaagtacttatcaattattcactgagtcacacactatggaatgacatttcccctctccacataacaatttgatatggtttgggaggaagggagataaaatctagcatttcaagaccgtagatcaaacgcaaagtagctatagataaaatgaacatccattctgacttttctgggataaacttggtttatacctgttgtcccagtgtaattactaataattactaataattactaataaacctactttcagtctcagaactctctcagcttggtgataaattatatggtctctttatctataagcaaaataatttgaattttattccatgctctttctctacattaacttcaaaagttatgtgacagcctaaagcaaaatgtaagccctcctcctctagcattcaagcatacttataaatatcacacaccactgtttgatggggaaaacccaggtcttataacctgaatgccatttccatttcagtagaaaatgtattttttctcaaatgcactgcaataattattaccttagcaaccatttactctaaatcttacctgaaatgtcctatattccacttatccaaagcccacccatctttagaggaatacagacatcccaaaactatttttttatttgtctcagcctgtctcttcctgtggtttcttcttttaccattttttggagagtgagatctgtagacacaactagtctattggatcctttaagacaaagactggcttctacatcgttgattctacagcaccaagtctgaggccaaatacaaagtatgctcaagcaacttaatgtgaaaaataattatgacagtgatggtgatgagcatgctgttggtggttaacttaataaaaatataataggataaaataaaatgagttgtcacgaaatagctatagtttgagtatggaaaagactactcttataccctacatctgtagattttaaagatatatgtgtttgcaatgcatatttactgaaatttatgctgctggtatcaggcggagggaagttgagggagagtaaggaaatatgtaccatattaaatcaaatctaggataccattgagtgtaagatatagtattattttccatattgctcgggcaaaactgtcaattaagttatggcctaatgctttcatatcacttagaatttttatttgatatttattgaaagagctcaccgagacctatttaatgttggatttttaaaatcttgagttatttttatatacatacaacaaaattaccagtgaaatataatggctaaggtattcccaacacttcttcacattcagagaccatgactgtaagaaacattcctatttcagacatattaagatgtaaagaataattagtttgtaaagggattcacgtgataaaagcaaatatgctgtggaaaacaaacatctgatgagtttgcgaggacttgaggaaaggctgcagatttcaaatatcctgaaacaaaggaaggaaaatagcagacgttttagtcacaaacaactgtagaaaatttgagttagaaaaaaaacctttatggaagtttactatcacttctgccatctagtagcagaagttgtcaccttggaagtcatggaaaaaaaaaagaaaatactgtgatattgggtatccaactcacgtagagacgtgaagccccagtatcaggatggatggttaagaactgaatactcagaaatggatttttaactataatattaatatttaactcaactaattttttctttctctcagagctgagaaagaaactaaaatttctatgctcaagagcctctgctttgattcaacatcttatataaaactaacttgctggaatatctatattccatctttgatccgataaagcccctagtcatgaacaggaacagaatttttaactatttccagaacagatagtgtgaacctataacaaagtcaagtgtattaaaattgtgtgtttcagctgagtggttaaaattaagaaaaataattggtttgtctttgctgccgaacagaaaatgtggatcatattcatgtaccttttatgtattgctttttcacatttcatgtttgtactgctcgttctgcccatgttcagatcattcatattttatttcgaaacattttcattttcagatcagcagttgtgtgatcctggtgaatttctttgccacgatcacgtgacttgtgtctcccagagctggctgtgtgatggggaccctgactgccctgatgattcagacgagtctttagatacctgtgagtagaaaggttctcatgccattcggatttaccttacatgtgaaactaaatgtcagttgttttcacagatgactgctgttctagatgattctttctttctttctttccttctttctttctttctttctttctttctttctttctttctttctttctttctttttctttctttctttcttttttccaaatagcctaagaaacttgaaaccttttgtttgtgtttttttttaaatatgagtatgtgaaggagagcataaaatgcagttttggagtgtgaattaacttatgaaaggaagaaaatgtgaggttaattatttcaatgtgattgtgttaacactagaaaaaaatgacttgagaaaatttaaaatatagcgctaaaagggaaaagaccttccccaataaattatctcacacattttgagacagaaggaatattgaagaaatcaagctttagttcccatgttatttatattaatatctcagggcagtacacaaataattgaacatattttcctttgagactgaaagatagatagaaactttatccattcatagagttaggatctttgtctttataatatcagattcagaaacccttagtatacatgaatcctaatcatagttgtactactataacttggaatccaccgaaggctttttccatattacacataccactataacaaattataaataataatatgaccatagctaaatatggcccactttttttaatacccacttaccataaggggtatgaacagtcccctgaatattgatagtgatatttctagaatttctcatatcaacctgtgctcttcaggcaaccaggtatgctgacatgtcaatatcatccccagagtaaccacatagttgtatgaagctaatgtgaaaaaaaaatccgtcttcattacttgatattgtagaaataacaattattggtttcattttccattttcatctttccatttacaagtcttgcagacagttttgaagaaaaccttgctgttagaggcaaatgcttattaatttcctttatgtttgacgtccttttaaggtttctcaaaaggtgaatacctgaatatttgcaggaattgcttcgctttattttgagccgatcactttttccacaggaagagtttatagtcatttactgctgcatttctaattttcaccagtttcactagttaactcccaaaaacctttcaaaactctttactagattccttatagcatagacaaggttctcagcagataagttaaagataaaaggttcataggaaaaattctaatggataaattgtgataaacccatatagaggaatattatttggtaatgaaaaggaatgaagtactcctacatgctacaacatggatgaacctggaaaacacgctaaggggaagaagctcatcaaaaaagatcacatgttttacgattcccttcatattatacaagatgcaaaataggcaaatctatagagacagaaagtgggagaggggttgccaggggctaggtagggtgggacacaggcaagggaatgaggaatgactgttattgaatatacggtcttttgggggtttataaaaatattcttaaattagattatgatgatgcttgtacaactctgttgatatgttttaaacatgggaatgtacattttaaatgggtgaattatgtcatgtgaattatatcttaaatgtgtttgaaaagggaagataaatctcaatattgtgcatatggatgaagaaatataggaatgtggaaaaacaacaataataaatgctttggccctacattatacaagtagtgagaccgtatttcaacatcccaactctttttaagctttagccctctccttttcaagtggtatctagaaattctctcctctttagctacaaggaaagacttccatagcataatcagagtaagagtcaggttctttaattttggtatagggtcttgcattctgccctgatcctcctgtgaattctgtgatggagaaaataacaaggacatgacacagatttgcagaattcatatgcaggaaagccagggtggaggggaaacaccatagaactgtgtgactggcacaatgcaatagtagttgagaagaaatggtggcatggcacatctaggttggagtctccttcatgccggtgaagaatgatgaacaaggatgttccctttgtgctcaagagggagctcagtggagaaacagactggagagattttgtgtctaaatggggcactagtaacctgtgtagtcagtaggtaaagtccagagagaaaagagacctctcaatgcatgtcgaagtaggtgatgacaaatattctgccatcctcctatgtccactccatgtctctagaaacatggcagatacccagaaggcccacaccagtgtaccaggcctgtatgcaccgaccagtattcaccctgattgattaggcatctactcaaaatggtcaaaatctccactgcaatgctgttaaatatttgaatagccaccctgcccataatgtacataccaccttgaatttgtgtaaaaaggtggtccttcagttcacagagtttaggggcttttagcagatggaggcctcaaattggaaattgcgtgtcagttaattaaaaatagagattgatattctgcttacttagtttgtaaaataaaattcatacctgctcaagatattcttggcagttgtttaaatatacagtcctttcctctccaataacatttgatggatccaaaattaaaatgtttcttcactttggccattcatattttatcctctaacattaaaattgctgaatatccttaaaggcaacactgaaactgctctttattaatcagccacataacaaagacagagaaataactattttttgtacctgttttattcatttaatctgttcaagatatttagatttatatttaattggcttgttccctataaatggtttccatcaataccaattgaaatttggacatgcatagaaaaaaaaagcgttatgaaaatatcagtctttgccaaatttaaatttctcaatccagatgttcaccattatcattttctgtaatcacagtactttgtaatgtgttgttttatgatattcacatgcagtcatcactaatctacataaaataattgcataattttatatgaatgtatacattcgatatgaaagataaatattaacaacggaaaaccttggagactgattcttaggaaggataatttgtgctcagtatatgaacaaaagtatgttaacatctttgctttgaagacaaagtatgttgtatctacaaaatattagataaaaacagccgatgcaatagttatttttttctgaaatccacttagctttaaaatgatagaaagaccactctagcatagaatttattgtgacattgtgaaatctctgaagtgacaaaattctaacaggaattaaatggatattgtttgggaagaagaaaagccttacttataaaatgctttagaaggaaaacatatgtacagaacaataagaaatcctggaaactaaataaaatttagatacttagaaatctgaaagtttatcgagtccatattttccttctcttctgtgtgtgtttgtgcccaggatctagggtattctctagtattcatgaagcaggagttaaaatttagtgataccaatacacatagaaaactgttgtgtgaggttgacttacaaataagctgatttcatgttgggaagaattatctaaaatacacaattggaaaattttaataatttataatcttaccattgtatatggtaaggacttttagtcataaaaatgaaagcctttatttctgcatattatttaaaataatttttcaagtgtctaaataaagactaacaccagttttaggctctatgaggcaatgagaatagaaaatcagggaaatcaccatctttctactcatagctttcaacccaatgttgttagcatagcatgtgatgagaatgaaaataaatagtgaaagtgtttatttagagaatgaaagcttggtaccacctgtagcaggaacgtcttcttgaaaggcacttttattctgaggtattcaagatttaattccttctagaattttctgtggaatgcttaatgatacttccttttcaacacttggctccagctgatgtatgatattttccagaaatctgacatcattatacttaaaactagattatttctttttaagaaaggaaggtattagccatgctattcaaacttcttccctacttcctgcccattccccttcacagaatcattgagtgagttcttcagtcacagatcatgttttgggcataatgactcattgaccaacaaaggagaataaaaatgtcctaagcaatatttgcaagctggactcttctctgtcctgtcctacaagggtcagcatgctttttctgtaaaaagcagatagtaaatatttaggctttaaaggcccatacgatctctgctgcatattctttgtttttatttgtttttcagtttgttttgaaaacctttaaaagggaggaagaaaacaaaatctctcagcttacagtctgtacggtaataggccacaggtcagatttggccagcaggctatataatttgccaaatctttgttgtagtagcgtagctgaaatatatctgctatacagttgaggcaggtctgtgctcaggcactgctgctccatggaacagcataacctcacacaatgaatgcacgaagcacagagttttgtttgcatctaccagtcatggtgccagactgatgcaatatggtgtagtctacatatgctgggttttgtttccttctattttttcatacttccttattggttaggattgcatttgactgcatgttatagaaacagtgacttaactgaataggggttttctttcttcataaaaagttgcaaaagtggataattcagaactgctatgacagattcagaatgacaacaggcttcttctatctttccttactcagtcccatatccacagtatggctgcttctctcctagtagataacctcattttggaaaaccagaaggaaaagagtaaagggaaaaggcaaatgccagttgagcctctctgttaggaaaaggataaattgcacagaaagcaaatgcagtcgatctctttcaccagaatgggttatatggggcatggggcaatgagtattgtcaacaagaccttttgctttccaaaacaatatttggggttctgctagtaaagaaaaggggagaagagatattgggcaggcaaaggaacttggtagtatgtaccacagtgtcccttcactctcctccttggcttctgctgcataggagatggtatgcacagtgcatgatcacagcaactgcttggctccaaggctcagtttttccacgaatatctttgctcttggacaactaatttaaccatattgtgccttcattatcccatctgtacaatggaaatggtagtacctgcctcacagtaaagtgctcagaataagtgcctattccatagtaacattccttctccactctataccccatctgccttccagatgcccagagcaccaatgatgcatcttaccttgaggttcttttgatacacaatctaactgccccctctcggtcgatcctctctcattctttctcaaaacctaactgaaagtcagttctgttccctaaggacatggctgggaagaggtttaatctacatatgctaattcaagttaagttataaataatttttaatgatcagatatattaaattcaaacactgggatacatttggtatagaaattatttgggggcaggtgactttttctaggaactcttccaaaaaccttgatgttgaataattgactaaatttgaaatacatgtattaaaaatacaatagtcaaaaatattaattgacactgaagtcctgaaatgtagataatatctcatttttaaaaaataaagaagttgagtttataatccttctctccccttctatgttagctcttgttagggaaagcagagtatacatttctttgaatttgccctccttttttgaaatactgagataaagcaggatccaattcctaaaagaatccttcaggctacctaatttaaaaatacattgtcatttgaaaattatggaaggccatcccaaaaggattgtttcacactggctttgggagtgatcacttctaattgaacaatgcaataaaaagaacaagtctcttgggtactaggaagagaagcatctatgaaaaatgaaaatgtctataagtcattaggtgagatgtgaatctgcatgaattgaccaatgattctattatgtttccgttgttgtgaaattttaaactttatttaggtagtaggattttaatgaacttcttatattcatacactgacctttccccttggatataagatagaaatccttttataatttccttctgaactttctatctttgacataggtcagagaaataaaatagaattcaggtgggaggttattagcaaacagatactgccctttaaaattatatagtagaataaggcactgaaagtagactatagaaactataaaacagatagaagtatggtccgtgtttctaagtaatggtgatttagaggtcactttgcaatgagctaatatatgagagtcacaaagctaagcttttcgttaggtagaaaagctgaaatgatcttacagattaaagggaaagcatatgagacccatgaggacagtttatgtctctttcaattctttttgttttgttcttcattttattctgagactcctctcttcagcagtagagaggccaaaaagcattgacccttctttaataataaaaagactcccacttaagagttgatatgcaggggggataggaaggtggggatcagtgtaattgtgaattgaaagggcctaacactggtacatttgcccagtacagtggggtcagagtagggggtgacattactcctcattctgctctcacaatgcactaatgggtctctgagagtctgcctctacaattaaaaaaaaaaaaaggtcgattgcaggcataggtgatggaagtacaattcacacaggcatacgagctcagcaatgacaaaagtctcaccttttcactcaagaagtcagtgcttttcggtctcctgatccaagaccacaggtcacagaataaaaggggacacatgtccctcaggcggggctataaactatggggaatgaaaactttgaaatgaggtaaaatagcaggggtgaaatgaaatacaggaattctggaaacaactggtgaaatctccttggcttaaaagacgatgtactgtaaacaaacgatcttgcaggactctacagggacaaagctgaagactgagcaaggagtcttcccagaaactattcaatccatcatttatctacaactaatctagcatttggggttgtggatgaaggcttcttacctttcatgtgtgagcacatttcttcccggaggacgctttattctttatagtcagtgtataaaatttacatttgactttcactcagaagtgcttctaaaatgacatattttgctaaatgaagcactaaaggatgtcgtgttctaagaacttatttttaatggtgatgcctttttttctctctccctctccccatgtcttccatcattctaccctgaaatacctctactctctgcctatggaattttcagtaggacaaagcatctcatcagtttattaattgctatattggccctgttgaagttcaggcaatataactgactttgggttttgtttgtttgtttgtttgtttgtttttctaaaaacttcataacattagcttttctgattttcaggatggcagaaattgctctcaaaggagagaagttcaggcaaagataggtgaagaaggggttgggtaggagggatccaaacctcatagtttctatttttgtactgaagaaagataccttgggagggaaagagtatgctcatactgttcactggtcaaccctgaaagatcagatacaagagaggagaatccctcaaactgagacacattttcctcggtacccagcagcaaagaagaaagcaaaaacacttcccaacacctctgactgagttgccaacagaaaagtaattgttaacacaaaatactcatcttagaattcagcatgaatttagcaagcaggtggccatttacaagcaaacaaaagaggcctcagaggaaaccaaccttgtagatttcttgatcttggacttatggcccccagaactgtaggaaaataaatttctgttgcttaagccatctagtgtatggtattttgttatggcagccctaccagacaaattccacatcttactatatatctattaaaagttgatgtattttaataccagtgtaagaaaaatccagcaattaaaaatttcttaaatttttcttgaagatatatactaaatattactaaattctagagtactaatgttatagacattataagcctgttaaagaaatgtgaaatgaaatcaccagtttctggtggggtaaaggtagttacaaacctttaagaacacctaatgtaattatacagagttactatgcaaatgaaaaagcacttctcattgaaaatccactgaaaaattctgtactgcaaatatatgtctttttcaagtattgatagatgatgggttgctccaaacttttcaaaagtaggtttgtctgagacctgtcctcctggtgatctagcacatgcagatggaagtgcaaataacggctatctttgcaaagctatctcgttacaacacaaaaaacaggccaggtgcagtggttcaaccctgtaatcccagtgtttaaggaagccaaggcaagaggattacttgaacccaagaactcaaggctgcagtgagccatgattgagccactgccctccagcctgggtgatagagcaagatcttgtctctaaaatatatagaaacacacacatgcatgcatatataaacaaacttgtatacttgacctaagtaccattattttctgaggaaaacagtagaaatgtataacagatgcatacgtccaaacatgcatataattaatatactatattaggttataatctgtattagattattgtaattttcaattctgaatcgatcattgggttaggcaataaagcctatgtaatttgacagtaaaaagaaatgtttctttctccacaagggcttttgcagaattttgttacattttgctttcaaatgtgcacgttaggcaattcaattttgaaataaatgatacattattcattttcacttaaatggtgaaaaatattttgtcattgaactacatttctcgtaatatataaatgctttttatttacaaaaactagaaaccattcaatcaatcagcagctatttgttgggggactactgcatcaaggtgcttctgagcacataaaagcaacaatttattccataccttttcatgtgccatagctttaacctatgctagtttttttctcactttatctattctggttaaatgctattctttccatgataaagaagatgatgtttatgataaagattcatgatgattactgacatgaatgaatgattcatatgtgccagatactgtgctgtgaaggttacatggattatctcctttgatcctgacaaaaaccctgagcagagtgtcaggtacagttgctcaggttatccaaggtactggagtgacataaatattgcacatagcatgggtgtatatattttctcacaaatggaaataaattatcttgaagaggaggcaatattttctaatttgcatgaagatgcaataggagatttgtggccctacttatgatagtattcatggtccccttttacaggggatagaaataaagcaaaaggaaatttacttaaagtaattaagtgatagagctaccagtgaacactgcagcatgctatacagcctggagttcaagggattaccaaggtcaacatcttgatgcttagtggagcaagattgtcattcatgcctgtgtcacattgcactcaagtcaacctgctttccatgatgccatacaacctcatgtatatatgctatccagatgtatgtatgttcagccattcattttagacacaacagattttaattgagtgactactatatgacagggcctgtggttgatattgggaataataagataaatatgccaaagacgaaagagagatgtagtaataattggagagaagatttaaattgtttattttccaattagaaaggatatgatcataagagtatatatgttactgtggtaataaatgtataatttatataggttaatatttatatacatatgcacatgaagtttgtgtgtatataaacaaattaatctggaaaaaataagtataacattatcttagcctctctctctgtcatacacacacacacacacacacacagacacactctttaaaaacagattgttaaacgtaacagtgaagtttctggatttttgaatcagtttttttatttttgtgtaataaattaccacaaatttaacatgttgaaacccatttattatttctcagttttgtggttcggaagtgaggagggttcagaagtgaggatccataaggcctcacaaggctgagatcaaggactccctcaggctggggacttatcgagagggtgtgaggaagaatcagcctccaagtttatttagggtcttggctgaattcagtttcttgtggttttaggaccaagggcacattttctttctggttgtcagctgcagccacgctcaacaattaaaagcaatctacatgtcttggcgtgcaacccctccattttcaaaccaagcagtggtgtgtcaaaaccccctcacgtttcatgattcaaatccctggcttccgcttctgtggccaaatggggaaaacactctgtctttaaagacatcatgtgactagaacacttagctatctcccttttgtcacggaatgtgatataatcttaagaatgatatcacattatgctcacagcttctacccacattcaaaagagagagggttagacaagggtgagggtcattgggagacattagaattccaactaacatagcgtattcgtctgcgcgggctgccttaaaaaaacaccacacactgggtggcttacacaaaactcatttatatcctcgtagttctggaggctggaattctgaaatcaaggtctcggtagggttggtttcattctttggcctttctccttggcttgcaggtggctgtcttcatctagtgtcttcacagggttatccctctgagtgtatctgtgtcctagtctcatcttctcacaagggcaccagtcatattggattagggcccacccataaaacctcattttaccttaattacctccttaaaaccctatcttgaaatacagccacattctgaggtactgaagtttaggacttccacatatgaattttgggaggaccaattcagcccataacacacaagataattttgctttttaaaatatattcttttttttttttttttttttttttgagacagagtcttactctgttgccaggctggagtgcagtggcaccatctcggctccctgcaatgtctacctcccgtgttcaagtgatcctcctgcctcagcctcccgagtagctgggactacaggcacccaccaccacgcccagctaatttttgtatttttagtagagacggggtttcatcatgttggccaggatggtctcaatctcttgactgcctgatccacctgcctcggccccccagaagtgctgggattataggcgtgagccaccgtgcctgacctttaaaatatattctaagacgtctttagtcaccagcttatctcataaagattacttgttacttgttttaaaagttgaatttgctccctctgcttttcattgtgaactttaagctgacagaaaaatcagaagaatagtatgataaacacctgtatacactggatttatcaatcattacattttgttgcattttttcttcatctgtctctaatacatatttgtcatgttcacatcacgcatacatttgtatgtttatacatgttttttgccaaaccattttaatacatgcagacatgatgtgtttacacctaaatctttctaggaacaatacatattcttatataacccttacataggtataatattgtataatatctaattcccattcaaacttctccaactgtccccagagtattatttgtaattattttaccgaatccaggatccaaccaaggataatgcattgcctataattgtcataggtttctagtcttctttaatccagaatattttcccgtttctcttgtttattatgatattgatgtttacctatagaatatcacacaatcaaggtttttctggctgttttctgaccaggtaaatattttcccaataatatgccgtaagttatggtacactttcctcattgtgtttaatcaaaagataggttggtttgatgctgcttaatagcttcgtaaccaacattaaattacaacaaaattttttcagaacataaggcatagctgtaaaccttatagctaagtagttcaagatagaaggagtcttgtatggttctaactcttccattaggaaaaggacttagaaaacaataaaacttaagaccttagaatcgagcatatccttatgttatgtgaatttgaaaatatataccaaaagaagaatggggctgataaatttgaactttgcactttttgaattgtgtcactcaccctccctttccaatgcccaaaaccttatattggattttcctagtctagctaaatatgacacacagaataactgttacttctgtttcaaggaacaaatactctgtttccctcatgacactgttagaatccttaaggacagcaatcttttcctctctttgtgtctccatccattgttctgcatacagtgagcagactatacatttttttttgcctgagatttaaaaaataagtccataggcagtttcagatatgatgcagagcacttgaattccctgaagatatatatagttatatatatatatatatatatatatatatatatatatatatgattattttcaaagttaaactttaactggaagtttatttgactaggtaccttctttatagaattcatgagtcacagaattatatccaacatactttaagaaatttacacaattgttttgtgaactttcttcacataaataggaaaaaactcctcgagacacggacagtctaccttttagaattttttcatccaatctttcttttactactgtcaacaagttttttgtgtatatatttaattggttcagcaatgaaacaattgaatgtagtatttcaaaagggaaagtagaccctgaagaaggtttcatttcacacacaaaaaaaaattcctcccaaagatggttgttatgtaaggccctactctttgatggtagtgaaagaaaatatttgaatctgctttacaactgcaaatgcaagagaaaatgtttgcaagttgaggaacctataatatagctgtctctgttatgttgacaactgtcaggatttcagccaaattgagtattgatgactctgcattcctactggaatcttttcacatgtcatacaaagccaaaaaaaaaaaaaaaaagaataaaatgctatctctatgttcagattgaaattgaaggtaaagaataaaagaaagaaaaaagaaatccatactggtcctagttttttttaaaagagcctgcctataatagcatccaaattgaggcaaggcagattagatacattcttacaatcctaaaccagaaagcagtttataaatttaacaagatattaatgataccttcattgctgtagtgatggatatgtgtgtgcaaatagtttaccttcaaggtaagtggattcttgaaggtatgaatgttgaatttctgcactccgattggaaccatgtaattgggttggcattaccacaactatttttctagtaatctttaagtatttctttcattgataaatagaaataaaagtatatagtaagtttggcatttgttttaaacttttgggtattgactgatatttgacagagtgagagaatttgttattcctcaaaaactgatttaacaaattagatatgtgttctaggctcaaggaatcacagtaattggattggctatcaataatatactattaagtagctgagattggcttgtgtttaagatttaacccatgaataaactgaacctctgcaacccactgtgagttgcatcctttgtgatcaagattcagatggccaggttcatgttaaattttgcttaaagattatatatatatatatatatatatatatatatatatatatatattgctcctggttttcattctctatttcttgatagtgaaaagttgatttactgggcacttttagatgcaatgaattaaaactggttcagcctgcatacatgccagaagaaaaaataaaaataaaatactagtgcagtaaggtaaagcaacaggcttaaggacacatagttaataaacatcagaaccgtgactggaattgacatccccttggcttacatcttcttttctgttctttccaatttgtacatgtgccacccagtaatatagttttaaaccttttttgtactgactgcctgtcattatttatcaaaataataacaatggaatcaccacaaacgtggactctgaaataataatttgtaactaaatttctaaacttaaaattaatgtagatgtgtatccctacactaactttggcctttgcttccatcttccctcaagggctgctgtgcacactcacgcatgtgcaaacacacacatgcatgtacacacaacataatatttttttataaagaaaattatctggttacttgatatatgtgtggatttttcatgtgacagcatggagactaggagattatgatcagcataaaaaaaagtataaatggtactcaccttgcttaacttacagaaagatatcctaatataagggataaataactgggcataaaaccattagatcgtactacggtgcttgccaaatagtctttcagactcttttaaacttataaacaacactcaagaaaacactgttgatcaattagcttttcttttacttctcaacaacctaaaaaataatctcttgaaaatcaattaatacaatttacatttaactcaaggtctcattttcaatacttttacaactccattattttcaccacgaggcaaatctgtgatagaaatactgatggaccttaaagagaatatttccaagctctgataaaaataatactaacccaatatagttgtgtgtacctgtcccaaaatgcaatgttccttacactttaaaaacaatctgatgacatttttgacatataatttcctgaggacagttttaagaattattcttttgactttggtcataggactttatttcgttggtactgtggaactataagacatcaattatatactttattaaaatatttttgaagttactggaaaggtgtaaaaaaagtctgttatgtgtggagaatagaaggctgtcattagtaccataccctaaatatcttatgtatcataaaatatacatgttcttatatatatcacatatggtgatcaaagtacttatctgtaatttttaagaaatagtatatcagttatttttcttttattatttatgctcatttgtagaaactcatacctgaagagttgcttcaggtagattttgccaggaactagagcccttcaatctgaacagattttaatcaggtctgacagcaaaagagcttcacctggtattttatttagcttgagatttgtaataaggtgatttgtaagagggatttaggttttacaaaatgtgaggcatttgtcttgatataataataagcctctcctgatatcaaaaataatcaataatttcctgtttacttactgcaaaaatgtgaagatgcaaaggggaagagttttcattagccatgtcctctcatagagacttctatcaaagtcaaaacccattcattcatgagtgtcatgcccacattcaagatgtggggggaaaagttactttctttctagactaaaatattccttctaaggatgggaatttaaaaaaggctgatgattagatgacctaattccaatagtattaataatatgcttgctttcaatgcattttattgtttttaaatttattgtgttattttgtcttaacttttaactcccacaattagatccattacttataaaaaggaaaccaaaactacttagttaacaagttcagtttcgataatattccgacttaattggaataagtaaggataaaaactcctctctatgtacagataaaaaagaaaatgaagagaaaaaagaagggaaatgcatttagattccaaagaagtgcctcagattctaacttaattttaactgatacacgttaaaacaaatataaagtgaagaatttaaagtttcttaaaataaatgatgaaatatttttaatatcaatagcgatattttaataagttgtttatttgccataaaaatagtaattatatattggaaagagttttcatatgctattcgctctaatgaaaaagcaaatgatagtacaatttggaaatttggcagcattaatttttgtataaaaataattctgataactttgagtgatttttaaattataatctattacccttcttttttaaagtgttgggcttatgccacttaaccttggaacctgggaccagataaatctgttatagaaactctcattctagtaatgacatgtttagcctttaggcactatacaaaagtgttcaatgtgtttaagtagtagtagactgttaccctttattccagcaaaaatgtgtttaagtgtaataactgtttctccttagcgttactcataaaacccattgtcatttgaaagcagatggtcttttagaatgaagaacataacactattttaaaaaagcaaaattgtgatttaaaacaagtatttagcgatttcattaagcatgcaacatgaagctattttaatcagcaaaaagatacttgactatgaatagagaaaaaaggaatgtttttttcacaatgtgtaatgtacaaccatgaaataaaagaataacttgctgtaacaagcagaggagtcaaccaaaatgtaatttatcctttttaacaaggcagctgatagcatctaaaatggtagacaagtaaatgatctcttaaaaaccttattcaaaaatttttattattatcaatggactgcctatgaaagacatattataagaatgttttctttttcaagatatttttcttaatctttggaataattgatgatctatttgtcttgaactatttattttcccttttcattgatattatgacataaccagatctaaatttagctaagtggaatgtcattacactattcgttccctgtggtctgagaccacgttggttccctgtggttctgatttgtgtgtcataggatggacctcatagaaatagaaatgaagtgtccagttttacaataactaggaataagtgctatttattttatcttttagggcatagtctttatgaagcattaggaaacttgttagcgattaggaaagtagctaactcagtctattaatattgccccagcacatcatgtatgtctgcagtcaaactatactatacaacacgtgattcattttaattaaataactgactctctgatggagtctttcactggtaatttttcatgatgaaacatatattaacataaatgcagggtccacaagaggttcctttctgtcaccaaacatctgcactttcttttttaagggaatgaaattatggattcataaattattatttcaatagacaagattctgagttttgaatgtcaaaagtatgggtctgagatcaatggctctgtactcatatttacttttcttttttattgttcttagtttatcctttcttattctgccttgcttagttattgacagaagccttccctacattgcattccctatgttgcatttatgttgtattaaatttgtacaatataaacaaagtgaatactagtgatgaaaatggcatttatgaggaggtggaatttttttaagtcttgggattcggcactgataccaaaaaaaaagacttgaaaaatgaatggaatattaattattatgaaaaactgcttcaacaaaatgcaactgccaaacgtgcacttaccgaagttaatggcattttgattcatgggaatctatgtactctctaggaaagcactggaaatcaggaatgtgctaccttagccatgatctactgactagctggatgatcttttgtaagtggacataaccagcatggaacataacataattaattaattaaccattacaatttgaaaactcaagagggcaggactgcttactggctagcatgctgtggctgttgcaaattgttgtgagtgttgtacgtctgctctgtgtgtcctgtctcattggttctcattccacactagttgttaatcatttcgaaaatcacccacagagtgaagaaagaggtgttgcaacctcaatgtcaatttggaattttcctaaatgtgccaaattaaaatgaagataaaggaacaattgcaaatattaggcactactaaagtctgatctctaattgtttggttaataagttaacaatccagcaaaaatgttaaaagatatatttaatttgaaatgtacatgatgtttattatgaacaaaatagtaagaaaaagtttttaaatacttatctactcttttgaaatacattcccaggttgtgtgtgtgtgtatatagctcaatccatataaatagagcactgaaaaagttggaaaaaagtggtttttcagtttttgtctttggcatttataaaggtgaacaaatactgtactcatctatatatgtatatgttttagtacaatttcataattttctaaatttctttgtgaatgcaattctctctttttactatttttcatgtaagttttttgtttaagacactttattgcttgtggtgtcaggaattttttagccaaaatgcttcagaattgctttagtaaaaattatattcttgatagagataaaaatatcaaaaataattaaaagattactttttaaaaaaacagaacttcacttactagcaattttataccatttaaaaagatggggttcagaaaatttactgatgtatgtcaagtttactgtagcaccaacttctgtattctttttaactttaacatctatttgtaatgcatataacattagtagccttaaatcttctagaattgtatttctatacaacaaaaaaatatgaaatgctttgttaccaaggaactcattaccaccaatttctgtgttctttttaactttaacgtctatttgtaatgcatataacattagtagccttaaaatttctagaatcatttttctatacaacaacaaaaaaatatggactggtttgttaccatggaactcattaccatagtttgtaagatagattttttattacaaaaggcagttaatgagggagaatgtaggatggtgctgctggagactcaacttccaaaatattatttaagccaagaaacatttttcactttttaatggtgattcccactacataaattagataaaatcctgactactgttgttcaagctgggtagaaatgagggcacctgaacagttgccacctacctaccctccaccccacagcagcctccagggaaccttttcagaattcccagggcacaatagaacacagcttgaaacaactgctctgaagtatatctgagatcagaaaaattatatataatataattaattatttgtggagttttttttttctaaaatgcttaaatacaaatgaaatctaagaatgtatattgtagggttatttctatccattaaaagaatacatttattttaattaagtaactgaacctctactggagtaaagactggtaatttttcatgataaaacatacttgaagataaattgcaaagtttatctccagggacaaactatgcatcaataacaatgaggtaatgattcaaacggtgtgtgtccaaggcattaacacctgaaaaatgaatctgaacaagcagtaggaggacgttgttaatgtggaaaactactaggcttaaactctttctttattcctaacttgaatcctctaatggaccttagccattcaacttcagggactatagagtgcttgaagctataatgtaacatatcgacgctggttaagtcatcaataaaagggaaaaatgaaggacatttggagtccttttagtctcctctaagtagaagacacttatttgaggaagatcggagggaaactgcataactttgaaaatatttagaaaattattagaccacctcattgcaaaattgacacaggtttccttggccctactcaccttaccaatactaccacatgagctattcttacattctttcttcttcccactaaatgaaactggaaagtataaacagctctctagcagccaaaacactgacatccttataaaagcaatttctgttccatatgaatttttttaatgaaaagaaaaacataaaggaaagttggtgtgtttcttactaatccaaggcatgattgtatcagatcatcttggtggtttctttggaacctgaaacctaaacttaaggtttgcaatcactaacaagcttacatgttgttaatatggtcaataaaacaacaacaaaactacttctcttatttttcttgacaagtggtatgtgggctgtttttgctgttggcgttgtggttgatagtattatttttatttatagctaaaatttcttgagttctcgtcatgtgaagatatggtactaagagtgatactaaaatgttttatcattttgtaacaatgctgtaagtattaggagagtttcaattagaaaactggacacccccctcctataaaacatctagttttcttcaatccttatccagaagccgtatattaaatttttctaaagaataatacactgttggtgggactgtaaactagttcaaccattgtggaagtcagtgtggcgattcctcagggatctagaactagaaacaccatttgacccaggcatcccattactgggtatatacccaaaggattataaatcatgctgctataaagacacatgcacacatatgtttattgtggcactattcacaatagcaaagacttggaaccaaatgtccaacaatgatagactggattaagaaaatgtggcacatatacaccatggaatactatgcagccataaaaaatgataagttcatgtcctttgtagggacatggatgaagctggaaaccatcattcttagcaaactgtcgcaagggcaaaaaaacaaacaccgcatgttctcgctcataggtgggaattgaacagtgagaacacatggacacaggaaggggaacatcacacaccagagcctgttgtggggtgggggtggggggaaggggaagggatagcattaggagatataccaaatgttaaatgatgagttaacaggtgcagcacaccaacatggcacatgtatacatatgtaactaacctgcacattgtgcacatgtaccctaaaacttaaagtataataaaaataaaatttaattagaaatgaataaaaaagaataatagtacaattaggagcaaccattcaatgagtgctaagttccagatgttattgcaatattttacacagcttctaataatatcatagaattgttcatatatggtaaatacaagacatcagcagtgtttctgtaattcctgctttcaaacaatccagtttatgggactctagcagaaacatgcaatagaatagctcacaaaatcttcccaggttaggaatcatcacttcagttttagggagctcaacaattccaagaaggttttcataaaatgatttcagacggtgtgtagctcaaatcctaggtttgttgcaagcaacaaaaagctactagttttatctttctttggagatttataaatatgggcctgtcacataaatcttgtagaggcagatgtgttatactgaagagtgtttgtctaaggaaagcttacttctatctcagagattaggtacttcctaccagttatgaaaaactaaccaaataataagtcttcaatagcacagagttaggacagaattctattcctttatacatttttgagagtgttccatcaatatatgatgataaaattggttagaatgttagccataaataaacttatggaaaagtaaaaagagacatatggagaaaaagattttaatgagaaaggctactatattttcattagaaattagtagtttaaagatgagcaacattgtaagtatatgtagccaagtatagtactcacatcatttggaaaatcagtggttttttttttaagaagttaattttattgaggtataatttatgtacagtaaaaaaacttttagtataaaggtttgataaatgcctactattgtggaacatcaagtaaatcaagagttagaaaattctctttatcccaagaagttgtttttttttctatttgtagtcaactccttcctcgacctttgatccctgacactgatctgtattttgtccttattattttattttttctagtatgacactaagtggattcatacaatgggtagcctttggtgtctggcttctttcacacagcataatgcatttgagattaatctatgtgattgcatatatcagtagctaattctttgtattgatgaattgtattctattgtgtagctgtatcacagttttctgatacattcactggttgaaaagcatttgggttgtttccagtttggtgcgactatgaatacagctgctatataatttcatgaacagattttgtgttaacataagtttgcttttctcttgattgaacttctaggagtggaatttataggtcatgtaagaaaatacataaatttatgagaaacttccatacagttttctaaaatagctgtaccattttgtattcctactagcaatgtgtgagagttccagttgttttgcatctttaccagcacttgatattatccctaatgaaagagacctagaaatcatcaaccaaatattagtgaatttaatacaaaaggatataaaatgcataacattgtaacatgaccaagtgatgttgatactggaaatattggattgtttcaatattaaaaatcactcaatataattcaccatatcaaaatactaaaggagaaaaactatatagtcatctcaatgtatgcagcgaaggcatttggcaaaattcaacatgtattaatgatgaagaactctaagaaagatagaaattaaaggaaatttcctcagcatgtaaaaagacatttttaaaagtcctacagccaatatcatcattaatggtgagaggttccgtgctttttttggttgatcaagaacaagacaaggatgtctgctctccctactccagttcaatctcataccagtggtcctagccagtccaataagacaagcaaaggaaatcaaaggcagacatgttggaaagaaagaaacacaattatctgtgttttctggtagcttgatattataggtagaaaaatcatcaaatatattacacagaaaaaagctagcagtacttgtaagtgaatttaggaaggctataagatacaagaacaatatacaaaaatcaatctcattttcatattcaaattggttttcggctttcaaaaccatactagccttctctattggaacaaacaagtacagaatatatctggttcttagacttttactctttccacagttctcctttctctataatccccatagcagaagcacaaagacacagttgaggatactcaaatatgtcagttataatccagtagttaatactgaaggcttccactttccttttattgtagaaaaaataagatgtgtttaattaaaagttgccatcataagtgccacttatttataccatttgttttcttctttcacatgaatataattgagtgattatacagtggaaaagtatcggaataattcttagaatactttcattgccagatgaaaggcaaattttagctatcccctttatagaggttatgagaaaatgccatgcatctcactccatcatctccaaaacaataatgtggtggctcacttagaatttttaatttgcaaatattagtgaattgcatttactgtagttgtcatataaatttaatcttctttaagtctctgaagccacctcaaaattctgttctttctttctccttggaattcatattttaatatgaatggactattaggtagagtcaaaactgattccacagtgtgaaatctttatctgcccttttcccaaaggcaaacattatgttgattatcatatatggaccttggactctatcagttccaagaatagaaagaactatatacggagaaggccaagtaatttctgctccgtctctcctaaaggcacataagcacactagatgtgaaggaaaatatatcttttccgttttttggacatgctaacactctgaccatctttactactgccatcattaggatggagtgatacttcatcttaagggcttgtttagtcctttcacatctcttatacatagttgtgattatgaaccacattttgacacatggaaaagagtcacctaaaatcttttaacagtttcctttccagagccaatgcagtgatcatacaactgtatgttaagttcggcttcttgctatcacacatttctcacagatggtcacagatgtgtcagccaggatatgcaattactaagtgctgcaacagataaactctgagactgagcaacttagttatttcttgctgacatgaagtctgatgactcttagctgacaaccttctccatctgatgactctgtttcatgatattgccatctctgcatatggtttccaaggtcatcactgtaggggaaaaaaggaatatggaaatggcagactgatcattttgagccagaagtgatatgtgtcatttggcagactagtcatgtgtctctgctgaaaagcaaaggtgctgagaaaggtttttttcctgtgaagttaggagggagaaggaaatcagaaatggatgatgactagaagtctctagtatgccagagaactcctcacctatttgatctcttaaggggttaccactgccatatctatccacctatcggtaacttgactatctgcatgtatctccaaattcatatgtaggacttgaggaaaaccaaaggtagtacacagtccgtaaaagaaattgggcaagaattaagaaaacattgactgttatcggtgccaaacaaaaagtggtataagagaccattttggagtgtcatgttattaatacacatattataaattaccatgttctatttaagagacgggaggggaaattgcttattatataatgcacatgtcttcattacttaagttgaggaagggaaaggggtgacaaattgaacaatcagggattcagttccctggggtaaggaaaacatatttctggcttttgttgtctctacaagtcagactagattctagagtggttagatacaggcttttgaagatcagtcaaagataacagtttcaaaaaccccacttcttatatggaaatgttattggttatgcttgtatatataatactcttattggaataactaggttaaataatttataactagcgttgtagagccgagacctatatgttcacacaaattttcagtaaaatatctattccacagtgtacagaaatgtgatttttctcatatatcctacgcaaagaaaacttaaaagtatatatgcataccatatataggtttgacctgattactatataaatactaaatgtcttgcccatatttatctgaaagtcttctttctaccaccagtatatgtaattatttccactttgggggaaaaaaggtagcagataaaattagttatattgttatttgttgcagtttcattttaccttgtatatctgtcaaggatagtttttgtaatttcttacatgtaaaaccacacataatcacttttaaagtaccaacaaatgcgatcacttaaaaaagtaaactagaactgaataaagagattgattttatcacagtaattgtgttgaccctatattagagagtcttagtagctaattttcaagagattgactttttaaacaagcccattaatgaaatgccaaaagagtaaatacttgtctaatatatcctcagaaaaataacactgaagataatttacaaatctttaatcaatatatttgtaattaccatcttattggtaattgatatgttattagtaattgaatgtttttcattttagtaccaaatctaatcctgagggaatatcaacattatctgctatataataatataatatttaatcaaatttatcacattatttcaatatgaaaaatgaaatattttcttagggatgctggagaatttatattacttaatatgctgctgaaagtttcaaataacacaatattccttgactaggtaaaatcataaagagataacactaaataaataaattttgagatgagaaaaataatgagatacaagcagtagttgtagttatgttaggaatagagctgggtgtattaggaagagattcagcatgtgaaacttgttgttccaaatatgcagtcaaggaaattttcaatgtgatgagagagactacgttcatgtattttgactgtaaggtctttggataagtaagatctttgattaagattatattactattgaattatttcttctttttaccttggttctacccagcaagcccataaatgaactcctctctctctgatcttctatttgagtaatatttcaagtcacagagttgcctaatttaaagaaaatgtactcatactttgtgcacctaagagcaggagagtgctaatgggtggctggggatacggtaaattatctgtgcagtatgggctgactgtatctctcagccatttgctaccataccatgttttgctttgcacaaatcctaacacataagcaatgcccaatgaatatttgttgaatatctaagtgaatgaatgaatggatgaagacatgaactaagctacatctccatttctccacaggcttaacattctctgattctatgattgtttgagaaagaacactgacttctgaacatttactcttacctagttttcatcttctcctgtttacatcctccctaaaagaaaaagcatccccagctcttctcagaaaggcttttctaacacagtgccttacacagagtaaacatacaataaaatttattgatctgaattgaaatgtgggggaaaaaaagcttctgtgaaaagctgacagtgcaattactttacctagatcacacattcctcattgaccatatgctcaatgatcatgaacatatgttatgtttgtttttagtaattttacttgctaactattgcacgatggtgagtttcacacaaaccctatatgatcagtgtctaaaacactctagttcttcctctttgtctttttttaatgagtgttagttaccccagttacagagctgaatatcatttagagcattatgctaccaaaaaaaaaaaaaaaaaaaggaaaatagaacatgcaaagaaatgtgttacaaaccaaaacaattgaactttgcaagcataaaaatgattaaattctagtcttagataatggaggttaaatgagtagaagacaatgtaattttgtcaaaaacatgcataagcgggaagggggcaaagttttattaattgggaatgaatctgtggtaaaatccattactattacttagaagatgagagaattcagtctaaaattctatcctctagaaaatttgaagacacttttaagagatatacttcaaaaaaacaatctgtacctatggcattaaaagcatctttcaatcatgtctggcaagtacatcatgttggtaaagaacccagtgggaatggcgtactggtgctgtaactcactgcagcatttttctagctgaataatttaatatttaagtatcacaagacaagccaaaaactacaattaggcaatattcctcagtcttgaggtgttttttgtatggtaaaataggtcagagaccaacttccaaagaacaaaattatgaaagtgaaagaaaatagtcgctcagagagctaaaaagagaacattttattttatgagatttgtgggaaaacgctttaagaaatcagatgaagaaaaaggtcattaacatcttcttcatcatcatcatcatctttgttctcatgatcccactgaaagcaacttacttgttggaaagaatggtttccctagctctctcagaaaatttttatcttggaaaatgtgcatacatgtcttttatctatgtctgtgtaactccaaagagtcttcctaaatttggaataaagccagctagtgctatttgtaatctgcaagaagggaaatttaaattaaataatttattaaaatcaaatgacatactcctctgccgaagttcaaacaaatgctgctttccatttttgttttctgatttttaatggagttttgttgaccaaacctgggaagagagtgaaaaaattgtgtgactttcactagcagctagagtgctcctttatttttgcattgggtttcaattttggccacagaagatgctaactcatagagactgccacagaaaatccagctggcttagtaaaaagcaaaagtagttaactaagtatatagtgaagaaacatatttgatggaatttcttcaaatttgttttttgcacgactagggtttaataattttgacatcattttaactataacatcatgcctaattggcctattttacagttttgttttaatccctgtgcatctagttaccataccttgtctcaaaaataaggatcatttaaaaatatagtgctcactgggtgcagggcttacctcccaatggcttgtggatgaagacctgagcattggaatttgagttctaggaaaaatggagaaataggcagaaatagatttttaatactatctgctttcctctctacaagtgccgcattctcctctctgggtctctattctcttatgttctccacatcctaccctcatgcctacatcccatttcctcattctagcctgcccttccacagagacttgcaatcgaaaataataaatttgaattgctacctatctcatcttctcaattcaaaatacctattacctaaataaatatcctactaatgttaaacaaaatgacttgagtgtctgaaaaagtaatccatggtaaggtaaaatgactaatgaaggtaaataaagtctagggatatttcatttgcagtgctattgttctttgctaattcaaatgaatctctaatatagttcacagaatgataaaacaattgcattataaggttcatctaaagaatgctgttgcttccccagggtgaatgtagtaggtggctggacccggctcataatggcttgggaaagagggctgtgtgtagctcttccaagtccagttcagtgatgccacgcgatagcttaaaatagcccgtggtgggagaatttacaccatcaagattcagaaatgctaaaaatcgctgatttttttcctggacaattggttgataagcatttatcaggacatcactgattgaattaaataatagaatacatttttatattgttgggggagtattgtagtactggtgaagaatcagagtgtcataaaatcccaaagggaaatagctctcccacccatccaaaaacattttatttctacacaaaatttcattttaaaaaagaatcatactgccaaaaaaaatgtttaaaactactactttttaacatctctgaaaagtgattccctatccccattgtttgacattttcctataattgacacatttggataaatgacttttaaaacattcttcttttttttatattgtctcatagtgttagtatttatatgatttattaatatttatttattaatatgttttcattacattgcatttggaaatccacttgttcttttgtttatatgcaaattatctagtatggggaagagagattaattctaggtttataatctttaatttctagaaatattgtgaagcatgaccaaagacagtgacttgggaaaagaaataccaggagggacataatagaagttttaaatgatagaagtaggaatagtataaaataatcaatttaggtaaataatagactgtaacaagtggtagcaatgtagcatagtgaaaatatcagtgacctttggaatcagagacatctgggttgaaaaacaaatatctttatatactagctgtgtgattgtaatcaagttttttaacctccctgaggttcaatttcctatctatacaatggaaacaatacctagaacagtaggttgtttctaggacaaaataaaaggatatatgaaaagtatgtagtattggcatgtaataatggaataaccattttaaaagttttaaaagaggcgaaaccccatctttactaaaaatacaaaaattagctgggcgtggtggtgggcgcctataattccagctacttgggaggctgaggcagcagaatcgcttgaacctgggcagaggttgcagtgagctgagattgctccacttcatgccagcctggacagaaaagcgaaaccctgtctcaaaaaaaaaaaaaaaaaagtttttattttgaacatatttgtctataatcacattacattttgataatgcagtatatcttttttaaaagtctttctagagggaaatcatttgaaggtagttaatctgaagcaacaacaccatctggctcagagactgacacataataggaaagcatttcatggagacagggaattttagaaccaggattcttagaaaacaactaatccaatcatttgacatctgaagacccaggaagttaaggaattaatccacataaatacaaatctaggttaagtgatttggctttcaacgtgttatataacctctctgaattcaattttctctttagtaaaagtgggaataaatcccacagcactggcttatttctcagattaaatgagataatataaatggttaagtagaccacagccctgagaacctggcgtactgaggtatagtaagacataatggctatgaaatctttttccctacctgtccacccactcttagtgattctatacatcctggacttctgcttagtaatttacttctaaagcattaaacagcgaaagcattcttataaatgatgatgtggttgctatataaatatagctcctatctctctgtgtattgcttttctatgctgcaaggaaagaaaaaaaagtgtctgtcttcactatctcaaaggctgctagagcaaggaagagaagttccaagtgtgtaggaggcaaaataatgtgtgtctgcattttctgccccattacattttgtagttcatggtcataccatacatttgttttgaaacgtattacacacaccatggtggaaaatgcagtcagctctttggtgttctgagataggaaatggctgtgacttaccacaaagttctgaataaatacagttagtttccactttgcctgtgaagcactactcccagcaattcaacagctgtctgcctatctctgagctgcaggcagtttagtgagagagcagatacgctgtctagaaggaggagagtctaccataaataggactattttgagtgcaaagatttcaaaagcatatctgctgcttgcctgacccttcaaaatctctgaaaatcctcaaaatttctaagatagttcatgaacatgcagagatcatatgtctaagaattcaggaatcacatttaatctaatgtatggaaaatggatgcaggcgaatcagatgcagtctaatcacctattcttattcatcctagtgggatttctgcctaatagtctctttagaatatatcaacaatattaatattaataacagcaaacttaaatacagaatgaaaacataatagttcccaactctcccaatgctatttggttttccaaaatgatctcacttcttctgactctaccacaactgatttgtattcagcttacttatcattgcatgtaactgtgtagttgaatgtgttatgctatatctatacaaatagaatacatagatttgcatacattttatttttcatgtatgctctatgaatagatttaaattttgttcactggaaattttggatatttattaaaaaaaacaattacatcataaaagtaaacgaacttccatttttgaatatcaagtctttagcctcaatagtcaagcgctgtgtttcaagaatagcccagtaagattatggaaggttctaattgcccttcagaactcatgcttacctgtttttaaaagtcattttggctgggcgcggtggctcacgactgtaatcccagcaatttgggaggccgagatgggtggatcacctgaggtcaggagtttgagactagcctggccaacatggtgaaactccgtctctactaaaaatacaaaataagccgggtgtggtggcccacacctgtaatcccatctacttgggaggctgagacaggagaatctcttgaacccgggaggcggaggctgcagtgagccgagactgcgccaccatactccagcctgggcgagagagtgagactccatctcaaaaaaaaataaagaaatacatttaaaaataaataaaagtcatttgcagattcaccttttataaattggaccaaactctttttgttctactctaatttcctacttcatcatattttggcataacatatttcatagcttctctatctgctatttgaagttggattttctttattcattttaaaattactttgcccacatgtcaaaaggtgcccctcatcctactagttcaggatttaatgaacaaatccatgttcaccatatctgtactgtttgtgattaaataaatggcaatcatgtcttatagcctctgctactccaaagtctttttgtcagctttcactcttgttgtcctagcagtcctaacccccacctccactttatttatcagaaaagttaaacttctctgaatattttgaactccactcttggttttagagatgacaaaaattgtgttcaataacccatgcaaaaacaatgtagttagattcttaacagaaccccaaataatcatactgataatacataatttaaaaaaatatgtggtggtctctggcacaaagtaaatagccagtaaatggaagctgttataatctattattagttatcattgattaggtcttattgttctccagatatttcatatatgcatttcatttaatcaggcacttcaagtatagcatctcatttaatcttcttaccatccctctagatactgtttaaagagatgatgcttaaatcacatagctagtaagtgtcaaattttgaacatgatcatcctgatgcccaaagttcaaacagtgctcttttttatgaagccatcatcactatggcaatactgataccactaatgagtcaatcaaactggtattactgatcaccttccatgttgtgtaatccagtttaaaaaagggtgatatttcctctactgttcaggaacatagagcttaatgaggccatggaataacatccacaaaacaatatcatattaatataagctctgcgtgatgtgaagcatctatgatatggactctgagtgtcgcagcacttagcaagaatatatggagtggctctcgccaaaatgcctcatgcaatatggacttaagggagaaaaacaagttaattgcccatcttcatatttttcctttccagagttctttcagtcaacaactctttggaagaaaacaacactgacatataacattaacactttcgttacctgagaactaaaaattttggaatcaagacggcaagccttagatagcaaatgaggcaaaaatataggaaaacttggcggggctggtggctcatgcctgtaatcccagcactttgggaggccaaggcaggcagatcatgaggtcaggagatcgagaccatcctggctaacatggtgaaaccccgtctctactaaaaatacaaaaaaaaaattaacctggcgtgatgacgggcacctgtagtcccagctacttgggaggctgaggcaggagaatggtgtgaacccaggaggcggagcttgcagtgagccaagattgcgccactgcactccagcctgggtgacagagcaagactccgtctcagaaaaaaaaaaaaaaaaggaaaacctgatgagtacatccataaatacatatttcagtatctcaattctatattaaaatatttgtacagtttttagagaagagtttttagaataattaaaaggacaattatgtaattaagaaaaataacagtaagtctttttgagattcctttatttttctaacacatcctgtctatctttaatgctagtaccatttgttgacatgagttcactccactctgccaccaggtaataaccctcaagtgcacctatatttcaatctgtgaggcaatgatttctgtgttagctggtatttagcaaaaggagtgttaaatatttctttacaaagatataatcatgactcttgtactgatgaacaatgaatacatgtcaaagattttatttaactaattagttactgagctaccagtaagaagttacaactggttcaggggaaattcaaagaaccacacatatatatgaaaataaggaaagctgaagtaaatttacaaatgtatgcaaaataagcctttctacagggcaaaaatcaattgctttccacacagctaatttgcatgtctgtgaacaaggatcatttgcattattattaattttctacaatttacagagctgtgaaatagctccaagacaatgaaaagttgagataacccacgagtatgtgctaggcacaatactcaggaatcttctttcagtccattgcaatgtatttgcatttatcttctgcaggagtgatggggaaggactcctacatgttatgtgattttcaacatagcacagatattaagactgtcattcaggtgtcataaagctagcacaaaccaaaatgaggtttgcttctgaacactttttttccattagaatcaggtttatttttgagagataaagaattggaaaagaatatgtatcttaaagatgtagtatgaatgaaagagaatggaagagaatcaatgtacttgagtcgccatggctgcagctaaaactaagtcaagatagcagtgagggtcagatcactcccctgggtctctctgagaagattcttctggttttatcaagaacattttctttggaagatctatgaaaggttactgcctggtagcagaggttggatggactaatgtctacatattttaagtaaggtagcatttgaagggacggtgtttccaaaagttctgtactgtaaacagttgagtactttccagttatccagaagaaaaatgtgtggtttaatatatatgactatactatatttattatgtattgtttgcatattggtttccttcaaatctcatgttgtaatgtaattcccagtgttggaggtggagtatggtaggaggtgatggaatcatgggagcagatccctcatgaatggcccagcaccatccccgcggtgattgagtgaggtctcattagtgcacacaagatctggccatttaaaagggtctgggacctcccctctctctcgccatgtaatatgctagttcctcttcaccttctatcatgattctaagtttctggagggcctcaccagaagtagatgccaacaccacacttcctatatagcctgcagaaacatgagccaaaataaaccttttgtccttgtaaattacccagcctcaggtatttatttatagcaatcaaaaacagcctgaaacatccagctatctttttgtactcaaaattagccctttcatcctcatgagcaaagatttatattaaactcttaaaatgtgattttaattgtgatttctgccaaagtggtgaaaatgttgtaagttcttggaaaaaagagatgcatgataaaattgatatgtcagccatcacgagttgttgttgttgttttaactcctgtgtttctggtacatttttgagaaaagcaaaaggcatagagttctggacataaacactgatacctgcgtttttatttttcacttttgatttaaggcagcaaagtttaagctacttccacctgatttgttttgtttttcaatattctttgtttctacttgattgcacacgcataacccaccatcatgcttttgtatttcaagtacttggcaaaaaccttttcctctatagatgtaggttgttttgttttgttttgttttcctcaagacttcagtccaaagaagagtttaaagtcttccaattaaacactctctggctgataacttgagcagacctgtgcttttgggagttagcagaggcagaagcctaagggcaatgccaagaaaccttctaaaagaggtgccatgtcttgagtttacaccagcttgtgctagcctttctcattccacagatgtccttaggtattcaccttgtcctctgatcctttgctactttgtagtgataaataatcttcctcatttggggtcccctgaagctttaagattcttgacttttcttgcaggaaaccgtacttgaccttgcttctgctcctgcagcatttggcattgcaattggctaccttttgataggctaagtaaatctagggcagtaagggtttaatgatgtattccccagaattttaaatttcattaacaagttaaatttttaaaaaattaaaagaaactttggtacagatagaaaggattgtctacttttaattgtgtcaaattaggacttaaaatcagccctaaatcatgcaatctccataatgtcataatatgaaggacagttaaacacatagaagaagaagtcatctaacttcacaactagaaaataactgaagatagttagtcttttaaattaaatacaaatttatctggggaaaaatcttaactatttcttaatttactctagtttaatatattacccccacccagttagagtttgtatatcaatagctgcttttcaaggcatttacatcagagatgtcttttaacaaaagaggaggaagggtaacacaaggagacaggagaactgtgggctcccttaagtcaagctagtaaggccagccctgacgggtagaaagaactgagaagccttcttgaagtttcacgcctaagaacatgcaggggcagaaaaggagtggatgaatatgcccagggcttccaggaacccagtgtgaagcagcagaatcccaccaaacattcctaggtatcttatcactctgctctgaaccccagggctatgagtattccagattgagagactggggattattcaaacattttatatgagtagcttgttcgtgctctgcaaatttaaaagacaaaaatccctctgaagcagtgattctcaaactttagcatgcggtgtaatcaactggaggtcttgtgaatccaccagcgccggaccctatcccagagttactgattcactgggtcttgggaagcgcctgggaatttgcatttttaacaaattctatgtgatgctgatgctgtggatcagggaatgccacactttgggaatactctcattttatcaaatattttattctagtacaagcctagaattttgtatattctgagacacaagttggtgaaagtatatttgttttggtggagaaataggaacaaattaagattaatagttttcctagtcagtttgggatgctataacaggataccataggttgggtggcttaaacaaaagaaatatatttctcacagttttggaagctgagatgtccaagatcggggtgcaggcagattcagtgttgagtgaaagccctcttcccggtttgctgacagctgtcttcattgtatcctcacatggtagaaagagagatcatcggccgggcatggtggtaatcccagcactttgggagtcccagtcaggtggatcacgaggtcaggagtttgagacaacctcgccaacatggtgaaaccccgtctctactacaaatacaaaaattagccaggcgtggtggcaggcacctataatcccagctactcgggaggctgaggcaggagaattgcttgaaataggaaggcagagattacagtgagccgagaacgcaccactgcactccagcctgggcaacaagagcaaaacttcatcgcaaaaacaacaacaacaaaaacaaacaaacaacaaaaaagcaagagatcatctttcttatgtctctcaatataagaacaccaattccttttgtaagagctccacacttatcacatacttatcttctatagtccccactttcaaataccattacgttggggattaggacttcaacatatgactgttgaggggacacaaacattcagttcatagcaatagggaataaaatcaatttcttaaaaaaaggtcctagaattatgcaacctccttctaaagtaaacaatgtttatatttccagattgttttctgatttttccaatgcaattttagttcactgtctaaatgggttagacttctcttatacttaggaataagagttttatgcatggttaaaatccccactggaaaagactgttaacagattaacagaccaagtgacttgggtggatttaatacatgtaaaagccaattagattcatgtaaaattctaagaatatcatcattttccagtcaagccctgacactttggggcagttaggtacctgccttgttcatatccaactagttttttttggctaattaagtaataataatcaaaacacttaaggttttaaaggatgaatgaccagttgagagttacttcttatttgctcctaaatccaatatatttcctgatcagtcaataacacttagaacatctagttataattggtaatacaattgtttaaaaaatgataattaaaaggactaagactatatatggtcttttgaggggataacaattgaattatttaaacaaagtatattaggataataaaacacgagaagtcagtccagtggttcaatccatttttcagaatttcattctgtttataattaagcaacagtgaccttcaggttagtcttccttagctgttaacaaccagctggagaagctgagggctatttttgcaattataatctgtgaagattgaaaaacgttaagataaataacgtgtccaccttattaacaggcaactcatttccacacttgaatacatatcaataggggttccaagttcaatctccctcaccgacctcttctaactctttaaagacagcgcctgtagggaggtggcgcctcactgcactctctactgggcattgcaatctactttcaagaggctgggggagggtgatggttgttgaaataatagcacaatactaaaagctttcaaatccttttggaaagagaacatgttcagagaaagacaaaatgcatttctggcaataaaaaagagaacgcttctctatatttatagctgtggcagtcagttatgacgctgtttgtagccagcagtctaggtattagtgaaatgactcagggtatgaccttcagtagatcaaaattagttcacaattattaaatactcatggggagcatgacatttgtcaaatacaagaaatattctcatgtctcagctttgatgtgatataatgtccaattctcttagattaaccattaaagtgagaataatgatatttattgtgtaatgatctgacagatttttagaaatgaggatttaaaatcagattaagaagatccataaataagggaagtgcataagagaaagcatagatgcaaaatgcaaaaaaggcacatgtctatatgcacagagctattgtgaaaaaaaaaaagaaaagtagccagcatttctggtaaataaagttgaaattggagtaggagggagccagaaccaatcagaaatcaattgaatcagtatgatgttttaggaccgaatttcctttttgtccccgctctcatgccgtcctttaataggtcatactaactctttgtaagtggtcttcaacagagaggaattggatacaggtactctaaggcattttgccaataagtctctgggtaacttgagactcttcacttaacctctcttagcattaacttcagagctgggccatgaaaggaatgagactaggtaattttcaaggttccatctagctctaacagtccctgtctcagtaaccccagcgtatagtaagaattgagaggctgaaagacagcatctcagaaagttcaaaatgcagttccaatggaaaggtcattagtaggaaatgccaattatgcagctatgaaaacatatctactttacctttctaagattcggtgtagaagttgacagtgatcatggttgttccagcatcatttctaacatcagttcagagtccatttgccctaaccatccagaaccacctgttgttgtattccacctgggacctgatgtcccgtgtaatgtgccaagttccctattgccctaaatctttcctctgattcgaaccaacaccacacctgtaccatttctttggagcactgttctctgtctggtaagaactacagaatcttagaagcaaatatctgttgacttttttccttctctgagaaaacatatgctaatttttataaagggcttttaaagtctgtcttaactgcaagggattacagtggcattaatggtgggaattgtgattagcattacagaataatgcagaaattgtttgcacagtggagcagactgatacccctctattgcccttcaattcatgaagtttaaatgatcacccactctgtttatattttatgttaggtgtaattcttaccacatgagacttgcattacccagcagaaacaaaatggataaaatgtggacactagaataaggtgctctgggtttggaatctcatcttcacctataagagtcatgtgactttgaattacagatagttgtcatctctcatctgtataatatttcatggtttcctcatctgcaaaatgggaataataattgtctctaccacttaggatttgggagagaattaaatgacatagatagataaatagaaagataaatagataggtacatatatacatatatattaaatgaccacacatgcacacacacacacacatatctgtatctcttaatacagtgatacctactataaccctaggtattaatataataactatataactataaccctagttattagtataatataattcttactgcagccaaatatatagactagaaatgttagaattaattttcaattaaaatcaaatattatgaaggaggctttcctctatgaagtacttgacttcaaggctttcctcttgaagtactcaatttgatttttcctctgggcagacaaagccaactgtttgagcatactcatgattagccatggatagttttcagtggatgcaaaatggtaaccattctttaacagagagcaataatttaaattctccttatttcccaaccactgggaaatcaactaataaaaatatgacctaatacaaagtaatgaaattaaaaaaccctttaaaacttatactggaaatgccacttttaaaataaatgaatgaaaaacaaatgaaattctaagttgcatatgtcagtaattaataagagataatgagatataatattgagaattcagaaaaaggctcaagaacgaaaagagctgcctgaaaaatctctcatttagatccaagtataaatactaaggaataatttctagaacaaaacaataacaacaaaacagatctgtatgataagccattgaaggctaaagtgcatggaaagaatattaatattcttcattatgtaggaagttgtgaaacttgtcattgacacaatgcacacgatcttattttgaggctccttacatcctgaggatatttaatttgatatttattggattatttacaactagctttcataatatactgggataagcatctcaagaagatcagaaagttatattgtcccccagattcttctttttcatggtttcccggcttgtgggttattgtcttcttttgattttgtgaacagaataaccagccatgcaaatgattactgaacatgtgccagtttgggccccacagaagtttaacaaattagcttcttttgattcaatgcaaattgccatggaacagaaaaatgtgaggtatttgcacccagagagtgaaatttctgtttaattttcttgctcctgtggattgaacttgaaataggggaaaatatgttttctcaattctctggctcccacaggctatgagtttaatgtcagacttgcctgtccatatattgaactcacactgttatccaaacagaccattctcagaatctcagcatacaactctttattttatatttagcaacctgagggaaagagtgagtgatagaataaagctataaaattaagagcaggatagaaagtactgcaactcctgagggaaagaaatgaacggtctattcatcaaatctgacaaatgtataagtcctaagagaagataaaaatatgaattcacttgaggagagttaagcgacatagataatttgacctgaacctatccaataactttagtaattacatgctttctcctgcttggttaagaagtggctgcagacagaatccacaggtttttgaatggaagtgcttatgtaagctatctcttaaaataaaaatggtgactcatgcaactttgcttaatactttagctccttatactttccttgcatagctttccttcaccatctagccagatactaaaggatgaagacatggattcccccagattcctgtggtcagttttctccctgagtcaaaagctggtgggttgtttactgttgggtgcatgacattctttgttctatcacggctttttgcctgaaagctttattatttctatagcctatctctaggagattttctgtccattattttcttttaggtaaagtccaactaagaataataaaaaattgttatgttctctccttttgtataagatttgtgcaaagaggtaaattattaatcaaactgtattagaggggtttattttcttcccctctctatgaggttcaaacaattgggataggttggacaggaggatcaaacatagcatatgtacaaggctataagccttcctgttgtcatggtagttgctatatggttaaaagaaattgtagaagagacggataatgactttcctactattggagaaaagaaagacagaaagatgggaaagacattcacacagagccaaaaggattttctgtgccatgattgaagcctcttgtaatcatccaagcaggtcttcataaaggcactttcctccatcctattgtgcattagttttgatttgcctctctccattttctgttggagagaagtgtctctgctcttgaggactcttgaagagaaactgaaagactgctatcatttttgccatgaagatgagttttaaataaagtgctctagaaagctagttcctgctttctgctcagatccttctaagctaaccacttcaaatgacttttagtgatgaggacattagctgtaataagatactagccttgaaaatgcagctgcacccattgaaaggtagcgtctgttacagagcagcttgttgtgtgaccagagaatcattggagatttcacacaatctggaacacacagatgacacgtttttgtatcctatccattgaaatttgtacaatcaatttcacccaaatctgctgcttatcctaggtttttcctatttttcttatcttcaagtagtctgaccatgtttaagctgcctgaaaatctatacttctctaatattttcttattatttcttgacaatcctttctattcttaaaaaacagctccagctaattacccatagtttaattttgtgcttataaatgtaaaaaagaaatcaataagcaactgagggcatggtatagaaatggagaggaaacaaaagcaatggggtgatttttttcacgtgctccttttacagtagatatttggctccctgaaaatgacattaactcggtacatcataaacttgaatgtacagcagaatcatctggaaagtgctggaccctaaccccagagtttttgagtttcgaagtcagaggtagagttcaataatttgtatttgtaacaagttctgaggagatgctattgctgagaatcactgaaataaggagaaaaaggaatcatcagttataaattccacctgaagacaagatgctctataagcgacctttgctccctttgaaactgaacagcttggatggtgctgaaaaagggtttatgtgtgtagaagtttctttccgggcaaaatggcaactcttctgccaaaatgtcagatatatccattatttcacttttaattagtttcagggatgtgttatgaaatttagctaattttttttccagatatcacttagaattttacctggtctctgttggtattgctactacttgctgtcagcaggttccaggtgctttggaagccaagattgagcaatctggcctcaattaagcttgataaattgtttctgaattaaactgagaaagtttgagacaatacctataagtgaaaaaaaaactaagctagctatttatgaatgaaaaaccttttatctaaaacaatgttaatacctgagaacataaaatattcagaagattataattctgcttttagctctattgtttttaaaacttggatgatttattttaaaatatcttaaatgtattgtcttgttcttgtcaggctgattattaaccatttacactgtttacggatctctgcttctctcaggttatactaaattatttttgccacttgtgaagaaaaacctacttgcgaattctttccctgtttgtttgtttgtttgtttgtatgaaatggcagccttggcctcattctttcaggcaggactcatgtcttattactaaagagctttcccaagaaactcattttatcatcgtcaataggatttggacagcttgcagccagcttcaataatattagttatcctctggcaccaatttaaaaaataatattatagataaaacaaacagtatgggaaaacagaaaaaataggaaactgatctgataaaatattttctgttatatatttgtgctcttgatcttgttgcgttataagtatgcacactattttgtgtgtgaattttttttcacttaagttcattataaggtttcgttgtctatcatagttataaacattttggttaaacaaactgtattattaagctcaggctcccataaaaaaaaattccatagactgagtgtcctaaatgtattgtctcacagttttagaagctggaaatccaagatcagggtgtcagcagggttgggttccaccaaggcctctctttttggcttgtagagggctgtgttcttgctgtgtcctcatgtgaccttttctctgtgagcacatgggagagatctttggtgtttcttcctcttcttaaaaagacactgtcttgtgcctggcgcggtggctcacgcctgtaatcccagcactttgggaggccgaggcaggtggatcacgaggtcaggagatcaagaccatcctgactaacatggtgaaacaccgtctctactaaacaaaatacaaaaattagctggatgtggtggcgggcgcctgtagtcccagctacttggaaggctgaggcaggagaatggcgtgaacccgggaggcggagcttgcagtgagccgagatcgccccactgcactccagcctgggcgtgagagcaaaactctgtctcaaaaaaaaaagacaccatcttgtcagacagagccccattcctatgacttcatttaaccttaattacctctttaaaggtcctgtccttaattactgtcatattagaggttagggcttcaacatccgaattttcggatgacatattcagtccagaacactaatttaagaacttttatcttattataaaagtaatacatgctagccatggaaaatttcaaaacttctgaaaaagtgtgaattagcaaattgcaataatctgtattaccatcacccagaggttaccattgttgatatattattctcttccttcaggattatcaagcatattcactttttatatacttgaaatcattttgcctaaatgtagatattccttcctatggttttaccattatatattcttatctttaatattaaacttctggcttttaaaatgttacttttgcaattatatttggtgttgtaatgaacatcttctgcatctgactatttctttaagatatattctgaaattggttgctcaaaattataaaaacactatttttcttacaccagcaatatataaaattgtacaccatactgaaacctggccatcatgtcgtagtttcataacaaacaaaacattaacaaaaaacttaccatcactgaccgtcattaaggctacattaatttaattgagatagagatacttgtgttctgttttttgaggattttgttttgtttcttctttgaaagttttatactgtcgggggagcattcagcctgagagcttctttttaatgtaatctatatttactaacttttaaaaatatatatttttattttaagcccaataatctctttcagaaaatttcttagtataggtttgagctttcaacatcaacatttaaatcaaatttttaagttaaatattgtattgtaacattaaatcaagttgggcatactaggtttaaaggtactctgaactcacccaccaccaggttatacatactctcactcaatcatgtaaagaattgaattctttatttgtgataatcataagcatggctattctatatttctatccagaaaggcaattttctcctattatcggttttgttcttctcttatacacaacaacatgaattctattgcatgaaagggctacaaatatacatttagccaagcagaatacacagataatttgctttacaacttgcacctaagatgtcagtacacgtagctggttcattaattgtcatagcaatttggggctaatgcccaagctatgcatagcagttcacattttcaaacctcatatagaaagagagattgggatgtgacctggtaactaaattcctgtgaagcctatctcagttacaaataaatccatttactaacttttaaatatttttctctatatatgtcccattagctgaatttctagagaagagaacttaaagaaaaacactatagtcacgcaagtaatgacccttcttatcctcaacccccagcatatatgcacaaggacaaacagtatacatacaatctcacctgagagacgtcctcagacttgtgttgaaaccttatcatgctgcattatctcccttacaacatccttcctgccttgtttctcattttcacactatacggagtaaaaaaatatacaatttctatatattatatatataacctccatatattttatactatttcatatttttatactatcagattaatgttttatattttatctatcattttaaatatgctatgtaaagcatctacaaaattggtcaccattcctatgggaagtatctgcagaactctagaaatgaattcatcttttgcttacccctccctttttgaggggacagggactttcttcttttccctcatcttcatcttctcccgtggcatcatccattatgcatcattcattttttttccctgctccctatggtctttgcttattgaaatactcaacagtggccaatttattggaattgaaaggctgctaaaatacatcatctcacagagaaaatgtcatttatttttcctacttttttctctcatagtgtcagcttcacccaatcagtggataaccaaattatttttaactaaatataaaagaaaaaaaaaagacaataaccataaagaaaacaccttgattaaagcattttagacatgaagaaaagattgctgtgaaaatcttcttttcagagagtttgattttatgaccttagaatacagatgatagccatgatttccagtctgtgtaccatggaatcctggagcactgagcaaactcatgagatactctgggatattttaaatgttgaaggaaaacatagcaatactagacagatgtcatacacagtgcaaactactagcttgaggtagttcacagtttcaatattagattggcctgcatattccttttgatgatatcttatctttttgaagctgggtttttggcatttttttatgacaaaaagcacaggctgcctgaaaatgtggcttaggaataaagtgatgcattcagtcagattccaaggattgagatgctgttcagtgtccaacaggtatgcaaataaaaataaaatttaaaagtaaaataaatttttaagtattggtggctgcctctaaatttctaatagcacatctcaagcttttcctttgtatcattattttgtcattatttttaagcaaatttttaattgtggaagaaattaaaatttttttcttatagtgtatttgtgttatttttcaaatgatttctatgttgcttgatataaatatttattaagttatttgtacttctacataataaactagacttcaatgtattttttttttttgacttaggattgctgagggaaaattcctgaggcattaaataaaggatatatgaacaaagagttttggaacctctgggcaatgtactgcaatttcttcccaaacacactgaccagatttaatggaaaaaaaatagttttcactcaggtgccagaaattggatcaactgataatagataagcaatctctttttacagaaacacaaatatcactgaacttaatgaagagtgtttcctaacaatgaggttaaccatcttgtattcctatgcaatatttcagcattataaaacgtacatgctcatgttacagatttcaggatcactcagtctgtcaaccccatactccgtaaataaaataataaaagaacagaggtgctaaacagaaaatgtgcccacaaatatagctaacttaaacatttttagggtaattgaaagatgttttgctaaagtaaagtggggagagtaataattttctaaaagttgggataatctttcttatgtgataaatggtgtgtaaaggccatgaaagcaccatgttacaagtgactctaatatgttagccatcgtctgtaagaatcttcacagttttgtgcactgtgttgattttctttgagtgtccttatttttgcttccaatataaatccatcacgtagtgttcttgtatgaaacaatgaatacaaaatatttctgaaattgaaaactctgtaacaatccatgacccaaccttaaaaagattttgctttcttttgttaagtgtatagtccagtaaaatatacatctttattgttgtatataagttgcactaaatatatgctgtctcaatgctcttttaaaataacattttgttgagcagcttgttttacataccataaaataataaatttctttaaatattttgaacaaatatgtttttgtttgagaaaataaaggtcactcgtaatcacccatctgtaaattaacattaataacttatgaatacatctattatgacattttcacacaaacataagatgaatcctaatgaagatgtgtttttttacttaacaatgacttatgagcatttcacatcatttttcatatcgtcttagtattccatcaaatggttgtaccatcacttattttactcacaacttatggatgaagactgggtttctttccagttttggttatcaatttcataatgaacattacaagagatgtatttttgcattaacacatgatagtttttgaaacaattctgaaaagtagaactactacatcaaacggaagtaaatttccacaagtagtgatagatgttgccaacttgacattgaggcagtggttctcctgcctcagcctcccgagtagctgggattatagacgcacgcaaccacgcccggctaatttttgtattttagtagagacaggttacgccatgttggccaggctgctctcaaactcctgacctcaggtgatctacccgcctcggcctaccaaagtgctgggattacaggtgcctcgccaatattcaagtatatttttccattgcttttgacatgtaatgtggctgcctctaaagttctcagacaatgtctccccctcaaagatctaaacatctttctcaattgtagtctcaataatattttaaaagaccatccattatattttcttccaccttgttgatttgcttgtttattttttctatctagagataaacagttttctttctcctgatacttcccatggtacgtctaagactggttatctgttcaatgatttagcgtataacatgttaggctcttttaatcacagatttattttggtaaagttttgataaatattcttctattatatctttgaatatttccactttctaatatgcttaatcatttctttaaaaatgctaatgatccacaagttgcattccctatccctatatttcatagctgtcatctatcatctacttcctcaatttatttttcatcttaccactcttgactctgcattctaatagcacatctcaaggttttcctttgtatcgttattttgtcattatgcaatataataaatgttgcccttctatcagggcaaatgagttctatcattctgcaaatgagtttagagcttccttgtattctttgtaattttattcttactactttccatctgttcatatgaactttttatctcagtctctttttatgtcatggctttctgtggtccaaaagtctatagtctatagattctttcattctactggggattgaaaacatttttcagaggactttattttttgtcattttttagagtgatgatacatttctttgaatgacttttgcatttttttcccaaagccttctccttttatttttatcaacgtgtttaaaaatcatgatttggctttccacaacagaggattgtcttaaatcttactatttgaacatttgattcatgaaaatatactttggttttctagattgaaatttgaaggacagaataattttatcagcactcctttacaattaattaactaaggagtatttagtacttttcttcaaaatattttaaatgagacactttttaatgatcacatagaaataaaaggaaagtataactgaataaaaacaaaagttaaacatcaaataaaacaaaaatttactttgcactagagtataaatttcctaatggcaagagttttcctttttgtcccatttttatatatcctgtgcctagtagagttatctagattgtaacaagcaatcaatactctaagtaaatacataccttgttaaatcattattgagttttgttcaagattttgtttagtgattacctattaatttcctatgttttatcccattctttatgtattattcataatactttgagcatgttagctattcagtacatatatatgtatatattttatttattgacacataaatgacgtttagaatggactcatgcagaacttaagatttagttaaataaaaaatacattttgacattcaacattgaatgttctacccaactgtgagatttttatatgcaatactgaaatgataagaattactgaggccaaaatagcatgaattaataaattggattatacaaagcagtatgtgatgtttttatctgaaaaaatacaataaagcatattaagttgttacaaatttaatactcctatgatatttggagtggggggaagagaaaagataaattttgctcctctctgtgtatggaattcccaagcaactcatgtaggttaatgatacacttaaggggcctacatatgatttgcataaactacagctgtcgaatttgcataatttgtaaatgcagctacgcataacctgttttgtctgttttctggttctagacaaggttaagtccacctcaaaatttatcttcttgaatttttcctattaagttttttgcattcaccattgttatttctgctgtatcttgcaaaggctggaaaaacgctgaattaataagctatggggctctgtttaggaagaaaaactgagttagaattagttaaagaggctaggtgtagtggctcacaccagtgatcccagcattttgagaggccagtgtgggaggatcacttgagcccaggagtatgagatcagcctgggcaatgtagtgagacccccatctctataaaaaaaaattaaaaattagctggacatattggcatgcacctgtagtcccggctatttgggagattgaggcaggagtttgaggttgcagtgaactatgatcataccactgcattccatcctgggtgacagagcaagattgtctcaaaaaaaattagttatagtttgattactcctcaaccaataaatgcacaaaagcttatgcacttatggatcttaaattttatttattatcatcattatttcttcctctcattttgtattactcaaacattagtgtgcatataattcttctaaggatcttataaaatgcagattctgattcagtaggaaagagatgaggcctgagattgtgcatctctcacacaagctcccaggagctaggaatggtactaataagggaaccagtcagaatagcaaggttctaggtcatgtgaaatgtggcatcaaattaccaatgacttgtaagtgatttttatttgaaatcgataagaagagtattcaaaaattattttttaaattaagtggacttaaaaaaatttctactgctaattgttgctgcttttcatctatcatttaatgagtatgaaggttatgtgacataacttacaggtttgtatttataaaatcaaggctagaaaatgtacaaatattaaacctttagaagcatttaaagataatgcttctaaaggcaaaaataatagttttcttattccattcacactgagaaatgactacatatttgtgtgtatttgcatatgtgtatgtgtgtatagatatatatttttatatatgtatatacagttatgtgtcactcaataacaagaatatgttgtgagaaatgtgttgatttcatcactgtggaaacatcatagagtacgcttacacaaacctagatggtataccccactacatacctaggctatatggtatagcctattgctcctagggtatgaacctagacagcatgttactgtactgaacactgtaggcagctgtaacacaatgtaagtatttgtgtatgggaacatgtctaaatataaaaagatacagtaaaaatgcagtattctaatcttatgggacctccattctctatgttttccaacaatgtttcaaatgttatttggcataagattgtgtgtgtgtgtgtgtgtgtgtgtgtgtgtgtgtgtgtaatttgagagatttaatcatgatttaagagttaataaaatattttaagcttataacctttcttattgcaacttgatttagttaaataaattgaaacttaaccctcaaataataagtcctggatgaatgtttttgggaaattggacttaattcctgttgaattcaatatatttttcaattgcatggtgctggtcaaatcatttaatttgaactcattaaagtcaagaacccttctattggggaaagctggctggttgggttgttaggaaaacagaacataacttaaacggccacaatttaataattcagctaaacttgttttcaaatatcaacatactgattaaaacacttgacatttgtggaaacattaataatcttgaagtttctggcaaaagggatgcagaagaaggtaagagggagacaataattaatagggaatttgggaggtgataggttttgttgactaatagctatttgttccaattataaataacatggagaaaagtcatgaataaaaatttaaatgtcatatacgtctacttttgtttactttatcttttttctgtgcaaacctatttgtgtgaacaacactattttatatattttaaaaataatggtagagtatatgctgtatttaccttttttaaagtttagacctatgtgatttcccagattgttaaattactaaagagtcagtaaatatataaatctacacttcagcttgcactctggattctaccctataggtagagtaggggttattcagccagttacatatatctggatattccaatttgttgcaatttttattattatgaaaagttctgaagttaacattcttgtacaacatccttttgtatatacttccatattaccttaaaataaaatcttaataacatttgtagtttaaaaattatagcattttaacattattaaacatattgctgacttgttgccctccaaaaggtttttacctcgtgacctctttagcagtaaacatgatttttctctatagccttgccaagactgagtagtaatattaaagtatttattttcatttttgccattatgatatttgaactagtaacatatggttgtattaatttgccttttttgattattagtttaagctaatttttttcctcataggtatgtggtctatgtgtatttcttttgatttaaggtttttgatgattttcaattggggtatgtaaattggaatattatgatattggtttataagaacctattgtacattagggattctaacttccatatcttttagacagtctctaataatattttgcctgtttatcatttgccttttaaagcaatttatggtgttttaccatgtgatattttaaaactacatgaattaaactctcagaatcttcttcactatggttgctttcctctaaaagtttcctttcagaaatgagaaattataattcccaatatgaggaatgatcctattgcaaccattgcactaatttgaaatgagggacagtttacctaccctctgctgtttttccttttatatatatataagaggatagcagagtttggtatgggttatcttatatcaaaataatccaaatcttctttaggaactattcatttattcctggaaattagatattttggaggaaatcctactagccttaaaattggaatcaaacacctcctagaatatttatcatatcatctgtcaagatatatgatttcataatttattagtttaagtttcatccctattaaatctgaatagctaggaggaaaaaaggcaattgcatggttgagttactgacattttcgtctagtccaatttggtcacagctattgggttaagaggtcatatttagcaccactaaagggagggacagttattttggctccatatctctggagaaactttggtaaactgcgtcaacaggaatatgtttaaaggacaaggagggagttttatactgaaaccaatttgcatacacatacctatatgttggttgccactgaatggcgttctaaacttacactaaatatggtattattatgcattggtaagtaggtattttaagaaatacataaatgtcttctacttgtctagatatcaatccattccctgaaatattgatttcttgaattatacactgctgactaaaataatccatgcatttccaaatctgtaatatttttaaaattacttaaagtgagtaacttgctcacctggaaaaataatagtgccttgttaactctcaattatccatgctaatggaaagcaatctgtccaaggattttttttttcattgccgtagaaatgttagaggtcaaaaatgagagagcctgaggacagtctgcaagaaatgagattctcaggaagactctagggatatgccttatgaattaagtttcttattttgcatgcatggataagaatgagaagcagaagaattctggacatattctctgatgaccaacagataactatgttttcaatagtacagggcatgctagtgcagctacaactagatagctatgacctggtatggggaagtctgaaatcagagtgacttcttccatttggcaaatatcagttaaaatatctactgtgtgcatgtacactcctgggtattagggttacaagataaatgagctggacacggtacctgaaattctattgatgagaccaaaaaaacccaagcaaagtgagtaaaaaatatttatttaaggaaaagtactatgaagaaaatagggtgattttatatagtgtaattgcactgaggggcaactttagccagtagatcggagaaagtatcctatgcagtgctgtcgaattgagatcttggtggaaagtcattggagaggtttcaataacgaagtgacttgatgttgttttcatataaaaatgtgaatcaggctactgtgtgggaaatggctagagagggaaatagtgaaagaaaggcaagctaccaggctatagcattccattcgtacaaagaaaataaatccagtgagaaggaagtcagctgttcttatgggcctaataagcaatggccagccaagtctaatacgcacaccctcgggagtggacagcgtgagcatttaggtacaaactggtgggcccattgtggctacagatgagaacatgaagcaggttatagatttggtggagaatacaactggaacaggagaaataaaaacaaaggaaaataaaacgtctatggctgtgatactgaagtttggctgcacatgggaatcatctgggatatatatatatatatatatggagagagagagagagtgtgtgtgtttggctcttgttgcccaggctggagtgcaatggtgcaatctgggctcaccgcaacctccccctcccaggttcaagcgattctcctgcctcagcctcccgagtagctgggattacaggcatatgccaccatgcccagctaattttatatttttaatacagaaggcatttttccatgttggttaggctggtcttgaactcctgacctcaggtgatccacctgcctcggcctcccaatgtgctgggattacaggtgttcgagccaccgcacccagcataattttttttttttttttctgagacagggtctcagtctgtcacccaggctggagttcagtggcatgatcacgactcattgtaggctcaacctcccgggctcaagtgatcctcccatctcagcctcccaagcaagtcgcagggaccacaggcatgcaccaccaaaaccagctaattttttgtgcttttgtggagacagggtttctccatgttgcccaggctggatatttttttaaatactgatggctgacccacctcgcctccccaccctccttaccatcaccacaactataaacacacacacacacacacaccacccaagattttgatttatttggtttgaagtgtgatctgaacagtgagttcttaaaagctacccaggtcattccaatccatggctacctttgagaaccaccggttttggcagagccctaagcagaccacaggagttagtggatagtgaggaagaaaataagctaaatgtgcatctaggtagtggtacccaaaagagcatcatcgagtatggaaagtctttcaggacagccttcagatgtgtaattcttaggaggaatcctaattccttagtatgccaggcctccagagtcaagcaaatgtttgaaattccttatgagagatttctccactttaggggcttttacatttatgtaaatagcacctttaaattctcttctgcccatttaaaattctccgtgtacttaaaaatgcatttgtaactacagcacagaaaattaaacttcctgcataaagacatttatagatgccattaaatataaaattagtattgatttgtaaatacttaggtcaagactagtactagtataaaaacaaattatagtcctctattacatataaaataccagctaaatttcattttcactgtgattaatgtatattgggaaaagtcataatctgtaatttagatttttctaaatttataaagcccgttttaatccgttacaaagattgctgtttattgtggtgtttgaaaatgttggaacagagatgaccatgttctaaatataaaagttaatttgaaacaatttaaaagcacacacaagaaactgctcttaaaataaaaaaaaatcagtcatactagatatgaaaatatgaaactattatattcttaattttcaaggctatgaaaataccatgcttagatgctttctagcacacatttaaatcctttttctcttcttaaattatttatgtttgtttttgagatgagctttgaataaataggttgtttatgtattttcctcttctggatagtctgttcaggagtaattgaccatgaaaatgctttggagtgaggtggggacaaagacagagaatccttcttgtgatatagttagatttaagttctgccatgactagtttgctctgcttactagtttatgaagcagacttccaatcagcacagttgtcactcataacctccaggccttggagatattctatatgccttcctgaagttggtaaattttttatcacaacacatttattttggcatacaacatattctgacttcactgatccaaaaatatcttaagattttaaaaaaactacagtaaagatgaattcatagcattctttttaaatttcatttttaatattttaaacatagttattcagttgtattttccagaattggctttttttctgaaatttttaaattctacaaattcaaacagtaactgtgtaatacattcaccaatacctttattgatttaatttctaaataaaggaacccaaagacagtatattgagtttatttcctgatgtgttttatttgttaactttttcctccagtatatcttctattcttttgaatagaaatacaaaaataaataaagcttttttttctctgcagaaagggagagttaaaaatagtatcctttttatatatatacttaaatgtttaaaattttaataactggtgaataatcttgagattaatgagtatactaaaatgtaataattcctggagcaaggagatacatactgtaaaggttttatcatgaaattcattcaaaaagtttgaaaatgctgcctactcttttcagctcaataaatctatttttattttgatccatgaattctgtctttctaatgaatctttttcaatgacactgatttttcttttacattttctataaagaatatagataaaaggagaatcctaaaattcctaacattattctcattttgggtaccatcatacaacataattttaaaagcttcactgtttcaataaaaaaactaatataatcatgtttatctgacagacccattgctttattcattataatcaaatagaagaagaggaaatttatggtgttttgagaatgcatgcaggttttctttttgttttttcttttgaggtgtgaatacagtaataaaatactgactaatgcttgaaaggcttgaagaaaggactagcggtggagtccaaggacaagaagagatgagaagcttttttttcttttcttttccttttggtttcagagggaagaagctatgtaaattggactgggaattaatatccagcttcagtcagagaataagaaatagcttgaaagtacagagattgctgatgtcacctgaaacttacttttaatcaaaagcatctttctagaaatagaagggcaattatcacaggtggatctggggtatctttcccttggcctgagtgtgaacatcaaagttagagaaaagaagttcccaatgaagacctcctcaagttgttatacatttggggattccatgaaaggagatggtgcttcgctctggaaattggtaattaacactatatatctctactgagaaatataccagacatgtatagctgctcctcagaatcagtaaaaaccataaagacattatcatcccctcactgagcactcactggctattgatttgctaaactggtctttagtttgccaatgcttagcttccttccggttactagttcaagatcctgctgttgcagggaagctccatttcatatctttatagcagtgaaaagtatcacctaactacttcctggttcagatagtgatgggtgtttcaagcatccaggcattattatcaccttcaatccccaggatattttacagcaagtaaagccatacctcacaggaggttcataatttagagcctcatttagttaaccatttccctgttacatacatatgtatatggaccagagctctcttcatagactccattcttctttaatctgactcagttctattctccttagtatcctctcatgccttctccccttacctaactaatctaaataaaattgccctgtgtagacactaattgaagatatataaacatgtcttaaaaatcaagatactgaactcttttcctggtccccatttttgtgtaatggtatcattcaagtttaggtttgatgaaagtattcctatcattagattcagacatgacctatagttatttacctactaaataatcaccaatagtgccatttctttcctgggtgaaaacaggcctcaggcaaatcagacagcactcttgacttgtgttgtttctgtctctaaagttggggttaattttcattcttaaattaatctgattacgtcaataaagagactcaaaataaatctaggacaatagggtgcccttagtaaattattacacacttgtctattagaaaatattaaaagtttacaaggtcttgttttccatatcaagcatgaataggaatcaagattttaatattcattttgataatttcccatctgtataatgagggaataaaaatataattctttctctggaatatttggggagtttattataaagggccaattttgtttcatgtaaaataaaattagttattttctaaattcgttttataaaaatatctccatcccattcttagattgattacagatttagacaaataaaattaagtctgaagattttaataaagggcttgaaaattcatgtctgtattgagactattccttctttctagaagagtatagcagccccttagcagctataaaagccactgtttctgggagataatgaattgttggatcaaggcagaagtgatttcagcaatttgttccattcccagaagtcagagcttttaaaagctttgcatgtttgcgtctatttgaaggtctacagcccagagccttctgctttggaagaggccagagtgtttctaccacagaaacctagtatatcttccatgttcatgataaagcagcacatgcaaaatgaaactcacaccagcacatatgaacttgttccagggatgctacagaaaaccaaattataaagactacactatagaataatatcaaaagcacagtacctggggtgagttcagtaagaccatcaggtttcttctgtcacagaccatctatatctggctgtgttcagatgtagtgccttgcccagaggcacttgataatgagcgcttgcccagaggaagaagctacacttattatcttccatccgtgtcctataatagagaaacaattaaattgggaaacttgtgctagaaaatatatttagggttagagataaaatatttttcccatacaacttaacaacaacaataatgatgaatgcttatagtcattaatctaggccttttatatatatgatttctaatcatcacaaaaattctataaaatacatgttatttttacttttagatgaggaattactactcattgatattacataatttacccaaggtcacactgctagaattgtactagtaccttggcaataagttgctagttatctcagcctataaaatgtagggcatatggacattaagattataaattagctttggtgtaatcaaattttataatttgtaaactggactatgttgtgcatcctttcatagtttaggatgattaagagtttggaccttataagtaaactgccacattttgaatcataggccccaactgggtactactagtgaattctcagagtcattaatctagattgtttcatgcctctccttatcttcatctataaaaatggataataggactaactgcttcacaatctctttgccttgaattaggtgagataatgcaagaagaacaacaaataccatacatgtgatagtcattaataaatttgagttgttattatctaattattaaggagaatttagaaaattcataaaagcaaatgaagaaataaatcattccttgcctattacccaaacacaatgttatcaaggtcttgtaatattacctttaaagtgattttagaaggcttatttaatctaattagatttatttatttatttagagtctcgctctgtcacccagtacagtcgggatatcatagcacactgcagcttcaaagtcctgggcccaagcagtcctcctgcctcagcctcctgagtagctaggactacaggtgcatgccaccatgtcaagctagcaagcttcttttaaaagatcacatatttgcagagttgtaatcatagtcacatgtacagtttactacccaaattgatattactacctgagcatttttcattttcttacataatcttccaaaacattcattttatctaccacaaaatattaaattgaataaaacatttttgctgaatttgtggagctgggcttttagaccggttttaacatttcagtgtaatatgtaatgcagctcaaaagctttgtgcaagtggtttctggatttaggatgtagttttctttgaccccatatcaacttgtggtaattgatcttaaggattctgtttgtgtggtttttaaaagaatattctctccagtcaattttggttccacttattatttaataaaatcgtttgtaatattctagcctgactcagctgtgccaaggacaaataaggggaagaggtttcccttccttgggatagacttttacaaatctttggcttttcagattttttttaacatgaaggacgctcatcaaaattattttcgatgcttttaagcaaactctgatgccgttagagtcattgttatttgcaagcattgagggaatatcacttgcatctatatgtattttagcggccacaccttaaggatattaataccacataggtaatatcacctaataccataagggtattaatatgacatttaatcttattttgggcttttaagtttagtttattggcattttttaaagttataattcaaaatgggggtggagcaagatggcctatcccatgcccctggacaggaacaccaaatttaacaactatctatatcttgtgaaggtgttttttttttctgcatagaaaccaaaaatcaggtgtgcactcacagtacctggttttaacttcatgtgtctgaaagcagcactgaagaggttagaaaagaccatcttgatctgaggatgccacccctctcccatctcccagcagcagccacgtggcatggagagaatctgtgtgctagggagagggacagcacagtgattgtgagatactgctttgaactcagtgctgccctgtcacagctgaaagcaaaactgggctgaactcagccagcacccatccacacagggagcatttagatgagctctagccagagaggaatcgcccatcccagcagtctgaatatgagttccagcaagccccgtcactgtgggctaaattgctccaagaccttaaataaacttgaaaggcagtctaggccataaagactacaacccctagacatgtcctagtgctgagctgggcttggagccagtggacttgggggcacgctacctactgagacacaaatggaggtggctaagggagtgcttgtactaccccttccccaaccccagggaacgcagctcctgactccaaaagagacccttccttcctcttggggagaggagggagaagagtaaagaggactttgtcttgcattgaagtcctctttgatgagtggggattcctagctcccagaaaccatttttagaaacaccctgggccagaagggaacctgctgccatgaaggaaaggacccagtccttgcggaatacgtcacctgctgactaaagatcccttgggccttgaataaccagcagcaatatccaagtagtataccatgggccttgggtgagactctgagactttctggctccaggtgagacccagcatattgccagctgtggtggctatagtgagagacttcttctgcttgagaaaagctgaaggaaaaataaagcagtatttgccttgtaccttagctactaaattaaccacagttggggagggcaccaagcaggatcttggagtacccagttccaggccttgactcttggatggcatttctggacttgccctgggccagaaggaagctcactgccctgaatggagagttccaggcctggcagcattcaccacaaactgactaaagaggccctgggcctgaagtgaacatcagtggtagtctggcagtattccttatggacctgtggtggtggtggccatagggtgaggctcctctgccagtggaagggggagggaagagtaggaaggactgcatcttgtagtttaagttccagctcagatgcagtaaaatagagcatgccggtagatttctaatatttttcacttcagtccctggctcctggaaagacccacttggggcatgggggaattcactgccataaagggaaagacaggagtctagctgactttgccacttgctgattgtagagccctggggtcttgaacataggtggtagccaggtagtggttatagtgggccttgggtgagacccagtgctatactggcttcaggtcagactcagagcagtctcattagtggtggtcacaggggtgtttatgtcatcccatccctggctccaggcagcttagcacagacaaagaggctccatttgtttgggagaaagtaagagaaaagaactagggtctctgcctggtaatccacagaattcttgtagatattttccaagatcaccaagtagtacctctacgagtcaacaacaactacagtattactgggcttaagatgtgctttaatgcaaatacggcttagatcacaatacccaagtgcttttgaatacctgaaaagccttcccaagaaggatgggtacaaacaagcccagactgtgaagactacaataaatacctaactcttcaatgcccaaacaacaatgaacatgcacaagcatcaagaccatccaggaaaacatgacctcaccaaacgaactaaataaggcactagagtccaatcccggagagacagagatgtatgaccttttagacagaaaattcaaaatagcaaatattattagagctagagagagagataatagcttgtgacttcaccccactttcagcattggacagatagatttttccagagagaaaatcagcaaagaaacattgggtgtaatctgcactgtagaccaaatggacctaatagatatttacaaagcattttatccaatgactgcagaatacacattctttacctcagcacatggatcattctcaagaatagaccatatgttaggccacacaacaagtcataaaacattccaaaaaataaaaataaaataatagcaagcattttctctgatcacagtggaatataactagaggaataataggaattttggaaactatacaaacacatggaagttaaacagtatgctcctgaatgacaagtagatcaatgaaaaaagaaaaaaactgaaaaatttcttgaaacaaatgacaatgaaagcacaacatactaaaatctatgggatacactgaaagcagtactaaaaaagaagtttatggctatggtgcctaaatcaggacagaagaaaaactccaaataaataatgaggcatcttaaaaaactagaaaagccagagcaaactaaactgaaaataaatagaagaaaagaaataataaagatcagagtagaaataaatgaaattgaaataaaacaatataaagaatcaaacaaaaagttggtttattggaaaaataaacaaaactgacaaagctttagccagactaagaaaaaaagagacaaaacctaaataaataaattaaaagatgaaaaaagaggcattacaactgacaccacagaaactaaaaggatccttagtgggcactatgatcaactttatgccaacaaattggagaaatctagaaaaaatgcagaaattcctagacacgtgcaacataccaagattgagccatgagaaactccaaaaccagaacattttattacggctttagtgttgttgcttgctattgaacagaccagtaacaagtaataacattaaacccacaataaaaagttttccagcaaagaaaagcctgggacccagtggcatcattgctgaattctaccaaacatttaaagcaaaaccagtagcaactctactcaaactaatcaaaaaaaaaaaaaaaagaaaaaaaaaaaaaagaaaaaagcagaggagagaatacttacttccaaactcattctaggaggccagtgttaccctgataccaaaagcagacaaagacacattaaagagaaaactacagaccaatatttctgatgaatattcatgcaaaaatcctcaacaaaatcctaacaaatctaattcaacaacacattacaaagataattcatcatggccaagtgggtttatcccaaggatacaagggtgattcaacatttgtaaattaatcggtgtgataatcatgtcaacagaatgaaggacaaacaccatatgattatttcaattaatgttgaaacagcatttgataaaattcaacatcccttcatgataacaatcctcccacatagctataacaatcatccaagcaaaagaaataaggggcatccacagttgaatggaagaagtcaaattatctttgtttgcagatgatatgatcttatatttggaaagacctaaggaccaccgaaaaactgttagaactgttaaattcagtaaagttgcaggatacaaaatcaacatacaaaaatcagtaacatttctatatgccaacaatgaataatttgaaaaagaaatcaagaaattaatccctttataatagctgcaaataaaataactagaattagtttaaccagagaaatgaaagcttgtacaatgaaaactatcaaatatcattctagaaactgaagaggacaccaaaaagtgggaagatattccatgtcatggatttgaagaaacaatattgttaaaatgtccatactacccaaagcaatctacagattcaatcaattcccagcaaaataccaatgacattcttcacagaaatcaaaaaaaaatcctaaaatgtatatggaatcacaaaagactcaaaatagctaaagctttactgagcaaatgctaaggacagaactggaggccaggcgtggtggctcatacctctaatcccagcactttgggaggctgaggtgggtgaatcacctgaggtcaggagttcgagaccagcctggccaaaatgatgataccctgcctctactaaaaagacaaaaaaattagcggggcatggtgtcatgtgcctgtaatcccagctactcgagaggctgaggcaggagaattgctttaacctgggaggcggccgtgtcagtgagtcgagattgcaccactacactccagcctaggcaacagagcaagactccttctcaaaaaaaaaaaaaagaaagaaagaaaaaaaaaactggaggaatcacattacctgacttcaagttatactacagagctatagtaactacgatggcatggtactggcataaaaacagacacatagaccagtggaacagaatatagaaaacataaataaatccagacatctacagtgaactcatttttgacaaaggtgtcaagaacatacattagggaaaggacagtctcttcaatcaatgttgcagggaaaactggatattcatatgcagaagaatgaagctagacgcctatcatttgccatatacaaaatcaaatcaaaatgtattaaagacttaaatctaagatctcaaaccatgagactactgaaagaaagcaatggagaaactccccaggatattggagttgtcaaagatttcttgcgcaatatcccacaagcacaggagaccaaagcaaaaatggacaaagaagatcatatcaagttaaaaagcttctgcagagcaaaggaaataattaacaaagtgaagaggtaaactacagaatgggagaaattattggcaaactacccatctgacgagattaataaccagaatatgtaaggaactcaaacaactaaataaaataaactaataatctgatttaaaaatgggcaaaagatctgtatagacacttctcaaaagaagacatacaaatggcaaacaggaatatgaaaaggtgctcaataccactgatcatcagagaaatgcaaatcaaaactacaataagatatctcaccagttaaaatgcattttatgcaaaagacaggcaataacaaatgctggcaaggaagtggagaaaagggaatgcttgtacactattggtaggaatgtaaatttgtagaaccactttatagaacagtttggaggctcctcaaaaaaactaaaattagagctaccatattctccagtaatgtctagtaatcctactcctagatatatactaaaaaaaaaaaaaaaaaaaaaaaaaaaaaaggaaatcagtatactgaagagataactgcacgcctgtgtttattacaacactatttaaaatggccaagatttggaagcaacctcagtgtccatcaacagatgagttgataaagaacatgtggcacttatacaccatggagtactattcagccataaagagagaatgagatcctgtcatttgcagcatggatggaactggcaattattaggttaagtgaaataaggcaggcgcaaaaagacaagcttcacattttctcacatatttctgggacctaaacattttaacaattgaactcacggaggtagaaagtagaaggctggtttaccagaaactagagagagtagtgggttggggggtagggggatgaggatggttaatgggtacaaaaaaggaaaaaaacatggacatcctccacattttcaatctgatttgctccatgcagacttgtggattaagagccagaggcttccgaggccagtgctctagctggtggcatggtatctatgttaacagaacgtctccaatgccttcagagtccacagccacaattctgtcacttagcaattgctagaaagaatgaataagacctcgtatttggtagcagaacagggcgactatagtaaaaaataatttatgtgtatatttttaaataactgaaagagtataattggacagtttgtaacacaaaggatgaattcttgaggtaatggatgccctgtttaccctcgtgattattacacattgcatgcctatatcaaaatatctcttgtaactgacaaaatatatacctactatgtacccacaaaaattaaaaataatgttaaaagttacaattatattattaagtacactggcttttgccccagtgttatttgcacatttgattagcatattttctatattcccaaccatgttattaataagtatattacactgattagactaaagtgtaaaaccattaagtgcacctacttgggaggccccctgccattgtaagctgctagccaatgtttattaaccttgtgataaagattacacaggagaatttattgaatatcttattgaaataaaaatataacaaaatttgtcacgtctatgatctagaggtgcaattatgctatcaaaatggagatagcattagattgatctattatcacttaatgaaacaatgatggttttgagtagctaaaattccctcttccaaggattcgcaaacctcttattaatttttgttttattttttctttattattctatcttacctcttttcaacattgatttgtggtacattttaaaagttatctcatcatgtaacttctaggaatgttgtcataatgatttgatatatagtatttaatctggacagatatcataaagaaaataagtcttgaactatgctttgaggaggaaaaggcatatggtttgctcagcagtcagaaaaagatatttcagggtgaacaatatggatttggctgagtccatgcatgtgggtgaataccttattttaaagaaactgttgcatatcttttattcattggtattgatcaaagcttttatattaatggtggcaaaaaaaaaaaaacaaccagtagataatatctaattatgctaacaactttctttctattattagtttagttctttaaacaacttcgcaagtgaagacaatatttgacctcatttttcagatgaagaaatggaagtagaggtagactaagctatttgctgggagtcaaagtggtagtagagacaagaaacagaattgaaaaccacttctgactccctgcacgacactgtctttttttacaaaacaatatccaggtgttcgtcttctgaaataagatcacgaatccccatttttcttcttgtagagatgtatctttgtgtgcttatttattcatttatttattttgggtttaagtattgtttggtttttcagtacttcttgaggttttgtttaatgaaatgtttagcaaagtagagtaagcactgtactgccaacctcccaggagattattgatctgattagcacttaaagaaaaagaggataacagaataaaaaacaaactttaaaactttattgttaccttcaaacaccattaatatttttaaggttaatttaatcttcccctaaggtttttattttctccattttgcatcagggtaacatattttagctttttgcttttgttgctccttagaactctgagtaggaagtaaatgttcatttacattcctgctttatgtgagtgtacatacgttagtgttgaataaaatattttgcaatgtgtctgtgtggatatatgtgtaataacaatcctatgttgtaattgtttatttcaaactgaaaaaatattaaagcagaccctgttgccttttacatattttattcttgcttttttacaaatgtgggcatttcctaatcacatgcaatttgaataagattgaatataactgaggtgagaaggtcaatatttttctttagacatctttacagctgtagccatttagcagttttatacgaaagagactgcttatcaagcgacaaaacacaaaacgatcaagtctacttatcctggttgggaatggattttctaattaaatctaactttaaccatgaaaactgatatttaaactaacttaaactaacttcaaaggtgtatcatgaatttgtgtcaattctaaacaaagataagattcatctgtgttttctccttttttgttcatatatgtatatcacggggccaatgtatcctacttacttgtcgcatgctgttcaacagaaagcgataccattttcagggactctaatgagaatgacataattctggaattgtacagtgtataacctgttcaactgtgcagctgtacatggagcactgcattgtgtatgtgtgtgtcttacaaataagttttctgatgttacctgatgattacagcatttagatttttgtgaaagttgaaagtatttctctattgggagagaaggagatacagaaataaaaatagtccatttgtataagagtcgggcttaggcatgatgtaatttttttctttaatttttataactattaaatatatgggctaatattatagaaatctgtaatgttctcatatgtacagagtgtagctttctatttcctgaagcatactatgataggtagtactgatctgtggataatattgtgcacagcacaatttttttttttcctggagattgcatgtggctcagcaagagaggatcaacgagtaaaatggagcaattacaacagttcttctaactgaattttaaaactagattaaagacgtggctagttcagatatattgataggacagcaaatactctatcatgatgactcaaaacagtagggcttctatggaaactaaaaagaaatgagattttaagataggtgttccctactaagaagtcttagtgaaacactggaagaaaaaagcatttctgaggatgcttaatatgcaccaatatcaataactggagcaacacttgcatcagccagaagagctctacctaacatgatttacaagcaatccactattctgtgagtgtgagaaagcaagaggcaaaatctcaggttgccaaaaaattgtgtaatcccatgccccttagttttcctatctctaacatgatggggtaaacaagatcaatctgagctgacataattatatgcaattacaatgcagtttttttccctgaaggcaataatttattatatttcttgaacttgaaaactgttttgtattttaagaatgcctcctccagtctcctgatgaggatttctctgcagctcttgtttaagaagctctgtatgctagtaagcaccaagtcttttgtaagtcagcactgggctgtaggcaacttccgcttttttgttgtttgtttgctttttctgagacagagttttgctctgttgtccagcctggagtgcagtggcgtgatcttggctcactgcaacctccacttcccaggttcaagcaattctcctgccttggcctcccaagtagctgggattacaggcatgtgccaccatgcctagctaatttttgtgtttttagtagagacagggtttcaccatgttggccaggctggtctcaaattcctcacctcatgatccacctgcctaagcctcccaaagtgttgggattacaggtgtgaaccaccgtgcctggcccgacttccacatttagaaaagtctacccaccaaagggagaacatggttttcttcctacctaagagaagactggcctttggtatgattttattgcagacttcatcactctgagaggccagaggaaatctaagttccctttctaagctgcacttactattctgcgtctcataagtcttcattagaaagaatgtttctctcctgtttgggggtcatcccttcttatgataattgcaagatatcccctgaagtcactggaatttatgagtcccctttgaagaagggagatgccttaactgctaccaacctgagaaaaggtgatgcaaatgactcctgggaagttcaaagttcaaagatgatcatctgcttatctctgctgccactgtagtgacttgctgttggcactgtgatgaggttggcatctgcgttgcttttctagagctgctgtttaagccactacacattgggtggcttaacagaatgtactgtctcactgttctggtagccccaagcacaccttggcttgtgacagcatactttgagtctcggccactagcttcatgtggccatcttccacctgtctctgtgtcttcacatgatgttctcatatttatgtgtctctgtgtccaaatttctctcttcttataagggcactggtcatactgaattagggtcaactcgaatgacctcatcttaattacatctgcaataacactatttttaaataaggttatattcacaagtaccagggcttcttcagacttcaacatgtcttgttggagggacacagttcaacccatgatagcatccaggagcttcattcacttctgtggccacagatgcatattacaagcccatccagagccattatgaagagaaagtggcaattttattctcagcctgagaaatccacaccaatttagtctgggtttccaagggtctgccgtttaagtcacttagcctctattctttctgggaacaacctgcccctagagagagtgggtgagaattgttcccagtgtctccagcatcacaaacccagttgccctgttccctttcagtctttgacttgagaaagaagctcatgtataactatcatctgtttcaaccatcacataatttaatgcaagttaattttacaaagaacaaacagagtttctctactgaccttgattccagccaaaagttagcatacctttttttcaaacagctcctatgtttaagcaccatcttggccttctgagtcagcagctaagtctagatcaagctgacatgctgctcttgctaggtttctaaaattcttggatgttcggaagaatggaaattaagatttctaaatataatatccacatgtacccaccccaccataaataaagctctgcagaagagaaaaaagttctacctcactgaataccttgctatatgaaattctaaatagattagtaacagtgatcacattttacttctatcttccactgggcagtaatggagggctctcagtcaatgttctctataaattgcagttcttaagctttgaaacagcctatccctcccccctcccaaaaaaaaaacatgtttgctgctgatcttactcaaatctttgccttgatttgcttatagttccatcttctattggaaaatgtgtgaatcctgttgacaaaactcttcgtaatctcttacccgggctttccttgtgggcctaatgagaccgggcaagtccccctttagggtcttccctcagtgatttctccatgctgacctctaactgttttacttattcatctcttatgccatgccatctatatttcctttccacaccccttcttctgaatattacatcccaacagatctgtctttctatttttgtgtctggctttgtctttcagatgtatcattttcaaacaaacaaacaaacaaacaaacaaacaaaaaacaaaatgaaacaaaaccctccaagcataggggagaaaatgatttttaaagcttctccaaggacaaactcttcctacttacaatggtatatagctggagtaggattagctatactataagattttcaatattcaaatggctgttgagggaaagcaccatatttcaatggttataatttaaattaattcaattttacaaaaacaaacaaacacaatgtctctacagacttcagttctggccaaaagttagcatcctttcttttcaaacggctccagttgaagaactagagtgcaggtgcttaataacatattcataaggactccctggtctctatctttgttattataaaatgctttcatttgctgtttgtgcaattctaaggcccattcacctgcagtttgcagcacttcttatcatccaaagtgctctcaggagcattcataatgccaaggagacaggcagagaggcccttaaaaattattttaaaaaataggagaactgaaacttacatacaaatgcgcagaaaccaaaagaaaacttaatgtcatttaaaaaattatgattttattaaaaataattgccaggctagagcatattgacaaaagaaattcacttttaatggtttttcttaaacatctttttgttttgctctcactctctcattctctctctcactctctctctctatctctccctgtgtgtttttcatagaatgttttaaatattatttatatggaaagagattctttagtggtgataagataaacataactgctaattacagaatcatgaatctgaacaatttatatagcttaaacattgatttcacttaattaaatttattgctattcttgttagtgtttatttcagtttactagatttccaaagttgattatattattagaatttttattcactgcacttattttccccctctattctcctccaagataatctagagattaattcgtcaattaattacaatggattcagtgttgcccttggcttatagtaagcacttaataaaggttaattttttttaatttcaagatctaattgccaaccaccttagttatttaatcagtcaacaaatactaagtgcctatcatagaccaaatattatgataggtatgagactataaagatgaagaagacatagtcactaaactcagtgagattatagtctaataaaggcaggtatatacagtaataagtgcaattaaacattataggttctataataattatgtacatacatcacagaagtggaaaaactaatattcttatagtggtatattcaagaaacacttgatagtagtctgaactatcacaataagactagaacactgatttgattttaggcaggcagaaaagaaggaaggccaattctagcagtaggaaccgtactctcaaagcatggagttgtgaaaagcagaatctatttgaggacctccatgtaagacaactatgatgatgtgggcattatctcaatagataaaactgaaaacgtaagcaatagatggatcaggaagagccttgagcccagctaagcaatttaaactttattctgtaggcagcggggagacattaaaggaatttaagcaagtacataaaatgacaagatttgcatatgaaggtcatctgaaagcattgtggatgatggattaaaggatgtaagaccacagacaagaagctggaaggctataatagtcaggtgagagatgctaaacccgagcgaagtttatccagtgtatcagagtgatagttttgtgatgcataatgaaagtctacaggattggtgcatttctctgtgggcacacacttacaggaagaccaatcgtaattcaaacattaattcaaaacaaaagatttaattcaggcaactggaaccttgtggtatcatgaccaaatcattctcttgccatagaagaaaacacaaatgaaaatcagactattgatctggaattagaataagtggaactaaaataatagaatgtttaatagcttcaggcaaacatagcctgatacaaccatctttgatagggttggtcttgccaaaggtatcagaatacttaaagcccttggctagaaccccaccattgatcctcacattaggcacagctttgccattggaactagaatataaaatattctaggctgcctgctgaggctctgcttttttgaatagtatgtgatcagtgatgccaagattcctcactttgacatttttccatttttcctctgcttcctttgcttctcaatctattttataattgacaaattattttctttagttacttccgtagtcaatcaagttacaactaaacttatagtctatgcggtttaagatgattttatacatttctgctacaaggggtataatattttctgcctcataataatgggtgccttattttaaaatttctgaggaaaattctatggctatctttcttccttcctcttcaaattctaccaagctactcacgatcattttctggtgaaatctgtgtgtgtgtttcttactgatatttctgcggatcgactgcaagcagaaattagttataggggtaagctacttgaactaaatataaaacctcagttgatgatgtttaaacagcatttgtccaaaaatactccagcctacagaaagacgaagggttggtgaaaccagacttttgatgaatcagatgaaaatttgtccaccgtaattttagcatcatgtaatggacttgttactgtgttaaatgaactagaagcatgtctctcccacatttaaaaaaaaatggaaaaaaactattttcataaatgcagatatattatattttaggaatctgggtgatttctatgtcctactatctactccagagggaacagttacagatttttttaaatcataatttcgtagtaattccccaacgttgtagctaccaactatttactgaaatacaggatagaagcagggttagcagaaagaataaaaatttcagacgttccttagtaagatggatagttgcctctgaaattcaggtgatatgagaaggtcattaccatttaggtagttgatgaggttaccttgaaaaataccatattggatgggtgaatggaggcggagaacccttccctccaaaaacattgggaatagatactgagaaagatgggagatgagctgggatagagtggtgtcatatgaattagaggaatagagaatccttcaaaagggaaatagacaaccttctcaaatgccataggaaagtcaccatctacattgaagagtgcagtgagaaaaacagtagtgtgggcagacaccaacttaagatctttatgtgtgtaataacccttccctacaacaacctaatgaggttagtgtccacatttcatagataaggaaagcaagatacagaagagttaagtaattttctccaaggtcatgaagttggtagatggtggagtctggctttgaactggatagtctagctcgagaggctggaaaccagaatgtaatgctggaaaggctgtgaaatagcatgtgcttccgaacaaagaagtaatgggcctggctgctgtgaaagtgtaagacaaagcttctcttttcctctgagctttaggaaaaaaatatgtggctttatacgctgactcggaaaaatatgaaggcaaacaatggagcaataaatggaggtaacttttacctgcatcttcaatttttacatctaattaaaagacaagtggaacaggaatcatggagagccacggaggacataggagattctcagacagggcctaagccagcagctgtaacccttatccttacccgcaaatgtgtctctgagccttctgaaggcattttcaaaagattcaagcaggcccagacactgtgcctggaaattccgagtcagtgtgggatagggcccgggaaattttaatttgggggccatgctccaggtaacattgaagtcctctcttgtttaaaaaccactgcatacataacccaatgataccatgttctgtattatgaaaataaaggaggacccttagcaaatggtctttgtttggggcagcctcccacttttccaatctgtgccataatctcctgttcccaaccacatttctccccacaccccccgttgggagtcaccacactatacctggttcttgccttgaagttattgtttcgtaattccggattggctattagatgataacgtaaagactggcccctttaggagtatttacatgccaaaaaggagtctttatacacaggaaactgtggggttccccaaataaaccacttctgtccagtgaagaatatgaagcttagtattcagggtggggagtatggatttcagcttagatcacagggtgtaggcagccatctatgagtacaatgatttctgaggataaccttctgaatcaaaaaactgcataatttaggcaagctttttttatcacccttaataatgaaacaaacgtttcctctgactcataaatactacaattagtaatatcattttcaggcataaattgtgcccataaaaactgattttcaactagtataataggtagctggagatggagggacaacaagaatgccagaaacatctgacttggacaagaaattcaaaaaggggtagccttcaaatgtagacaagtaagcacgtatcatggcattcaatgggttaaagtagcattttccagtagtttatcaagcaaagctctttttttcctttttctccctggtgttcagatgtgattcaaatctgtggacgtctcagcttcttctcttggcagctcctcagtactcctcaatgcagtttgaatcagtaatgatgatgacagcgaggatgtgcctgacattctgtgcccaaaccctggtccacactcagccaattaaaagactgttccatttggagaccagactccctcttctccgtctcttgcacagtatggtggctgagactgaggctggactctgtgggcttcagcttctactacgaaagccaaaactggctaagccacatgatgtttgacaaaaattgactcagctggaaattgatcttcacatgtttttcaaatgctcgcccacagttccgtgagacagttttgcctttgtgtctgttggggggcttcaacagacttccaacctcaaataaataaaaatgctttgatttaatgcacactctcaaccagacctttctgcttattctgtgaaataacacaacttgggcccattcagctctttgcaggttatcagactcttgctctatcagatcccatgtaaagaatttctaaggattattttctatagaaatgggttcttcaccccactgttttactccacctacagtactactcaaatgtgaacagaataggaatagaaaatgaaagcaataaaatatgttcaaagagcattttaaaaatgtaaatccattttaggaaaatgtctgaacctgagataaaagatgaaagcaatttagatcattattttattggttggcacaggctagcctgcaccaagccctttacaaaatgtggatttctcttccttaaaccgtcttgtccatcagacttccttgaaaatgatattgttagccaatatgtagcacatcctgggttgtacttccactaatgtacagtctaaccccctgatgtataatttctgattttagctcttcatacaatagctcacagaacttaaattggctctccttggtaaaatgtgataatctttaaagtctgcctgctaagacccttcttcaaaaccagtaatacctaagccaggatgttgataattactaaaacatttttgaattcaaaataacgtccaaagactaaaaaaaaagaatagcatagcataagcatttttgtttgaagtttcaagtatcactgtgtctggctgatgcccccaaggaagtcctgtggtaaagctgtcaggggaagctgtaggtaagcacttgaaaaacatggtaaaaacaggttccagctgaggcagtcttaacacagctcctaatggccaggctccctttggctcaccttgttaagcatctgcctgaagcccacaaagaacccagtttgaggctcagctgctgtaataagcggaatgaacacatggagactccaactagcagatggggacttgctgattgagagagactgatctagtgtctggccacctgttggcagacacagcactcctggcacccccctctccacctagcaaattcagacagaagggagacaggaagagaactgatttcttaaaggaatagatgcaagaaaaacatttgttaagccaaacatcacgtgtgagagcggatagagtcaatcaatgatgttgttttcgtcacagcatatgggagtatgagtctttccagaataaagggaagcaacacttatcagcatgtctataatatttgaaatgtgaatttagtgtgctgaccaggaatggctttttaatagtgatgctactaggaggcccaaagtattacattgctacagtcaaatgagcttccgaatagccagtggatgcaaaagtcaaatttcaggaataagtctgtggatctctctgacttattcccgtggtgattcagtctacagttttttgtaactttacagcaacaggaacaattagcttaacttgcattttattcttcctcaaagccctggatttgtacttgcattaaaaaaaagtaaaatagaaaggaatcattccctagactctctcttcctttattaggagcttgtggaggcccctgattgaagtcagggctcacagttggagggcgagatcatgcccaagggaggcacggctgctctgggattgtcactcctcacaacaaagaaagagggccaggcatttatgtcagctacgcctcatactcaagcccttttgaagaatgagtgagaatcttaaacttgaacagaatactatgcagagaggtgctagagaactgaggtgacctttgctttgcaagttcttctctcctttctctctacactcttctttgcaagttcctcttccttattttctctccagcggaacatttcaccctcagtagctgttacacctcatgaaaaatactgctactctctgaaatacgggcttctctttccccctcattatagcgctaaaagtactgtcctttggggaaaaaaatcacatagtagatgtttcagaataagaaagcgcttaccaaaaacaaaagaacaacaaaaacaaaacacaacagaatcctcctcctctttggtcctctcttactatggtaacttggaagtttttgcacaacttgaggagatactctgtgagatatatatatgtgtgtgtatatatatatagagagattgatatatagatagattttatatatatacacacatataaaatatatatgttgctttttaaacctttcccagaactctcatgacacatttcaaaagctgcttaaagatatatgaatattggctgtgaggcaagggtcatctattagacttggaaagaatagtagaatttattccattctctttattttaaggacatgataactaagaccagatttcaattaaatggctagaccaaggtcacatatcttgaatgtgggataaccaggattgaaatccaaattcaatgtcagactccttaaatcatgctgtcccaatcaatttggcttctaaattgtactggagaagtagtgggcaggttggatagtgagtcagactgccaacctgtgtcatattgctgcagcacagtgtgaaaagttatagaaatctgatgtaaggaaagcattccaggtaaaccagattttggctctgcctcttaatgcgtgaccttggggcaattatttaatatgtttctgttctccaaggtcgtcatctgtgaaatggagagatataacccacagggcctctctgaggattgatgggcccatataggtgtggttcttaaggtacttaacctattatctgctattacttttctctaaagaatagctaagattttttcccctcaagatctcttttccttgtttcttcttcaaaataacaaattttagcccattaaataatctccttacattagtggctttgcatgggtaatttttttttcctgtgtcagttataaggattttcaaattagtatacttttttctttttaaaatgaactagttattacccaattctagatcacaaaccagatgtaaaatcagagtattctaaattagaatacatgctagttttaccaaatacctgctcatccttcaaaatcctttcaaggattattactcttcatcttcaatttgtcaggcagcagattgcatccacttcaactttgaatcaattctatgaacaaactttataagttatcccatcacatgctttgtttaacattgttcttgtaatctgataatactgttattccactgggggaaataatctattgaatttgactggttgggtttattttttataagccaccagactttattgcttttgattccagtactctctggatagttacaaattcttctgtctaacttatattaatataccaaggattgatgttactggggagtaatttccagtcttgctcttttaataatctttaaaatggattacaatgtttggcttcacatgttaccccaattcactataacttcaagaataataaatagtatttccaaattaaccaactgttatgccccctagaatgcacattgtaggaaatgacatttcagaagcccgattttagaaagaataaaatttattatgttttcttgttagaaaaaattatatatgtttaaattataatttggaaaatcaaaataatttttttttaaaattacctcttacccagagattataataattaacattttttggttcaaatcttgtcaagtatatgtatatgtttataaattttttatgatgatgggattgtactatacatatattttatataattatttacctaaaaatatattatgaatatattttcatgccatttattattacatgacttttaatgcctatataatattctattgtacagaagtcatacttaaataatttgtattttctaattttttcttttaaaaaaatcacattttttataataaattttaaaggaatcttaatccgtatacaaaagagtaatgagttgtttttattgagcatctgttatatgccagccaattgacatacaaataccttattttacatatgtttctcaatttgcaaagtagaaattattgccttcttattacagggtggaaacatattacagatttttaaaaacagattttttttttcaaaattatcaatgccaaatatctaaaaactagagtagttagaattcagaaccaggtacactgatgcaaagccctgtgttctctcagctacatcctcttagcccgtagactaaattcttcaaagtaaaataacgatttcaaagagaaaatccattctaaatcatttgctatattgtgccaaccaaaaagactacttgtattctttttaaaattttaatttatttatgtattcctatatgtattcaaaagactgatttttaaaaaatccttcccaaattgcaaaatacccacaacgactaataaaattcaaaatattttattattattacttgttgcaactttaataagtcactacattttaacaacatttgatgaaaactttctcttgatcaatgacacttctgaaacatctaccattttgatctctgatgaccttttaatcagtgagcatttcacacttgataacacttgattactacttggacaaattattgatacaatgacctggaaattcacaagatttctcctcaaatttgaagaagtcgagtttatttttgaaaggtttatttatagtttactttaaaaattacatttaatctcataaaaaatgtggtaagatagaatatcatggaatttgagctttttgttttgatgagcagtctcaactcacatatctatactaatgcaagtaaaatacaccttacaaagttcaaaaattcccaattacatatatttaacttaggaatgaactatgtgatacttgtgccatattgcccttataattatatttttcttacactaaatttaacttaattttaattgctatacctaatgaccaggagacataaaaggcgggattgggaagggcagtttctatacctgtgaattattcaccaatattggttagaaatataattaatttaaaattacttagtaagttttagattttaatgtaacttaatgtaattttaattgaaaataagggcacttcagaatgtggaatacaaatgcataattttcaaaacagattattttgcagataagattattgttctgatgaacacaaaatagtcaatgtagaataactggaattctttccttctcgttatcatttttactttccttctccccaccttgtcaccatttaatggtttaaatgaaaacaaaacaaacaaaaacactgatagtcaattttcccacagctgcagagcaaagagcatcagccttatgttattagtcttaaaggtcagatttaactttggttaaaatttgcctggcgtagagtatctctatgagttttagatatcatctgtattgtaataattggtctcccctggcacagaacaggcactagataaatgttgaagaaatatagcattacgaagaaatgaagactttcatttattttgatttttggtgttctaagttccacatccctttcatacttaaaaattcaattcatgaatttttgtttgccctcttttaccagcagctacatggtggtaggaattacaccaaatcaaaccttgcagaaaataatttaattagaagagattctgtttccaaataagatgaggtaattttatcaccaacttacatgaatccttatatgtagtttgttttctgcttgtatatatctatgagctaagaaaaaacatttgaaaatatacactaatttcataaacaaatctcatgaatgatgctactggggagtaatttgaagtttaagtcaatttgcaaaatctgattgagtcatcaaggtacagactatttattttctttcttatctggtacaggtcttatcaatactaaatctttccagtaatcatttaactttatcgttttccctttctgggaaaaatgaggattagccataactggaaacattacaaagtaagataaacttattgcatcacttggcctgattagtgttgacatttttggtgaattttaagtggattgagtaagaatatatatatatatatttttccttttgattttagtgttcacttatattttacgacatttctgaaatggcctggtgatgataatttgagaagagacactaggtcatgaaatataattatttttaaaaatgcagttttatctacagaagaattgaagagttatatcaatttttatcaatatctctttctgcaagccatttaaataataatacttttaagaaacaaagatctttaaaataataaacaaaggcaaggtcacccttaatataaaagatagcaacatatacagttacctcaaaatataaatgccctgccttttctcttcattctctgatgcttatgaataaatacttcattttagttgtaacaatatttatatatttttctgaagaatgttatttatgcagttctatagctataccctaatgaacccaaagaattaagtaaatttgcatctgtacaacatgtgaggcaactataatttttcttttctttcaactatattaaattaatatatattaaattatattaaagcctcataaactgaatttttaagatataaatacctcaataaaacagcagaaaataatattaatgggagttcacagtgaaaaaaacaaaagaaacaatatgagaaagcctatgaaaagatactgtcaaccttgtcaggggaatatgaactaaaacaataatgaaatcttttttccctcaaaatcagactgggagagcactgagggccaaggtcaacaacgattttgaaaagcatgctggcaatgcttataaaactgtaaatatgtgaaatctctgaccaatactgtgacagctctattatataaataaaatgcaagtaggcaataataaatgtaccatgtttattacagtactattcatactggcaaaaacacgcaagccaccaaaatattcatcaatgtaagactggacgaatatggtaatctgcatcatggctacagctactaaaggaattgggtccacatacgcttacttggatgaataagcccatgatgtaaaacttaaacaagaaacaagccaataataccaaaaccaatacagaaccatattcctgtacaggtgatagattgatctatctatctatctatctatctatctatctatctatctatctatctatgtatctatctgcctgtctatctgtcttatatgtagagagagaaatatgtgaaaaaataaaaggttaacttgagagacgccatgtgacagtgggcaatgggagagggacaggtgagggaaattaataagttttgcttaatacattatttacatagttttatcagttacagcaaacatttattattctacatagaaaataggaaagatcaccaataaattaacacagacacataacaatcagcttagtgtaaattagttgtactaatgtgctctaaattatgcaccaaagatatctaaccgcagggcccttctgcatgaagggactgagactcttcagaccattttttccccccaagatggagtctcactctgtcaaccaagctgtagtgcagtggcgccatcttggctcactgcaacctccacctcccaggttcaagcgattctcgtgccttagcgtcctgagcagccgtgattacaggtgcccaccaccatgcccacctaatttttgtatttttaatagagatggggtttcaccatgttggccaggttggcctcgaactcctgacatcaggtggtccacctgtctaggcctaccaaagtgctgagattagaggcatgagccaccatgcccgccctcagaccatttttaaagaaagcatgatgttccagcatttgtggaaaactacagaagacatttgagcatcctctagtaacttgggttttacctaaagattagaggaggaaactatttttaaatgcaagtaaaaccacagaaacagattctatggggttttaacctactagggtctgtttctggtctgctggatcagggaataaaaggtctggtttggtcgttttaatggtctggataaaggatgcagttgatacaggagatggccatatacattttggtggttcagggtattttgctaccatacgaataatttttcacaattttctgcaccagaaaaacttggtaatctcagatcagttcagtgtttgcacaacagttttgccacataatttatttttaacaagtatatcgttttgcttaatcttcctgaagaacaaagttctctaatcttagaaaaatagcaaaaagtcatgttttaaagatttttctctaaattttgttattttagatgaaaaattactttcattgtaaatggaatacattaatctgaattaaaaactattatgaagtttttaaaaattaggtagaaatcaatgaaaatatgcaacatattgtgtagagtacaaaaaaacctaatatcttgacaaccttcttccaggggctttttacaatctgcttgacaggtaagaggtcgatagtacgaattcaaccactattagcaaattaatacaagcaacaacagtttatctagaaataagagtactcaaatgcttctttaagaagaaaatataagagcaataacaccatcaaatgattttttaaggatatttcaaaaaccagtcaagcacacttttgaataaaaactttgcaaattggaattaaataaaggaacatgatatagaaaacatcaacaagaaacttaccccatgaaggtttgtttatagtcagtttcagcatcccctttgcttgtgaaggatgagtgactattgggtatatctcaatgccatatgtattattgaataggtttgttacagttttatcagagggaaattctatgaatggcagccagtgcataccttgaatgattgaacaaccaaagcatcctcctagaaggaaagtgtcaaaaagaacatcctcttgattatctttcaatgatcttaatgcaataattaaagtattaagttcacagatatgcattaccaaccagtagaaatgcattggaaatactcttccaactcatggttgatttagtactttcctagtgggaaaggattgtttgtatttaaaagttggataaataaatacatttatagttcgtgataaaagttgactcatttagtagacctttcttttcaagacaatcacaactaaatcaacaacttgaagccaaaattctgatgatgaaaagactgtaatgaaaatgcagcttgagagctgggtgaagaggtcacggattttatgaatcatatcacactattatttacatgtgattagaattaatgacgatgttaaaataaggaaaaacataaagttagtcatctcttcatactgaagagtcttctgatgaaatacttcctgaagctgtaaaaggtgcaagatgatggattagagacattttctgtctactatatgaggatagcagcaacctcatttcttagtaataaactacttaaaattgccagcaaaagtaatattgaaaatgttataccattcattttaccatatattcaggtcatctctactcagtgacatatgttacaaagttttaaaagatacattgttgccacttacatccatgtatttatgtaaaccaaagttctagaagaactataaaaagaagcagagaaattatctagaccttcactctagtcttcagtaacagctttctttaatccagcagggtttgctaaaattgacctgttcagcacagatagatgacaattccttttaatagaggtaatgccaaacattgtttttatacaccaacatattgtgaatggagaaaaatgtaaattttgtttgaagatatcaaagcatatttattgatctctctctttatgcttctttaatgaataccttttaaaacaatttcaacttttattttagatgcaaggatacatgtccaggtttgttgcatgggtatatttcatgatgctgaggattggggtatgattgatcccatcacctaggtagtgagcatattactcaatggttaatttctcaacctttccccaactctagtagtccccagtatctatggttaccctctttgcataagtgaaaattgttatcctttgcataagtgaaaatatgcagtatttggttttctgttcctgtgttaattattttataatcatctccaggtgcatccatgtggctacaaaagacatggcttcattttttacagctgtgtagtattccatggggtatatgtaccacattttctttatccaatgcattgttggtggatacattctatctatttatgtctagtctttacccttctcctcccctccaaaatcattttgagtctcctacaccattagagatttattaataaaaatgcttgacaaatattgttatagttctcattaaccttttatgagtgggcaaaatgaagcttatagaagcaaaatgacttatctaaaacttaataatcagctagttgttgagttggaaccctattacatatttactgacctacctgagcttcctattacattgcaattctgtcttggtcttgatataaatagtaactaaccagtaaggctaaatgaactttcaagaaactaaaactaaaagttattgaataacatgccaagaaacagcaataaatagatgggattgcattgagattgttaactgttgaaagtgctccttctaaactgacttcaaaactatacaactcttccaattacaccttgtatcactagatttaatattagagatgatagtaatgcctgtctgaggtaatattcagcaagtctatttttctcactgacaagactgctcataaaaactcaagaaaatcttggtgggggggaaagtcagaatttctgtttattattacactcactttgaaacttgcattaaatttgctttgatttctttaaaaccccaggcaaaatacccagtacttatttttagaattttcattataatagaaatatttgctcttcagtcattgacaagattaaccttttaacttttggtttttggtttttgcttttatcctcactttcttctgacgaaggtaggcaaattattgaattcctgttcctagaactaattgacaggatgtgaaatatttcttcagttcttatcacactccagtcttctgttcctttactagaaattaagtgtacacagactaacgttttaaatgcttaacgggatgttctttattttatttctcaacctttcataccattgctgtagtacgtaaaacataatgatagcattttggacatcatatgtccatgattcatactgttgatacagatgttttggccctcactatgaagacgaacaaaaaatatttcaataaatgccattaagtacctgagagtaccaataaaatcttcacttgttttttaaatattacaggcatgtagggtcattcctagatggattccaaaacccaggaccaggggactttatgagtttggaggtagagaaacaaaagcatcctttttaaaatgtatatttagtgccatgaacaatgctgagcacattagattgaggatcttatacctaacaaacatggtttaagctattgccaacggcagtgaggcaaggggaaagaatagccaggtaggtcatgaaaaaaatgccaatcagtctgaggtcgagggaggaaagagagagaaaactaccccatgacagtttataagtttgctgtcaatggagcatgtttctgctttcaccctgaaaagctccagctgtgtgcaaagagtctttctctcctctggcaagccctgcctcctgtccagaaaaaaatgcatagctggatttgtgacttgcaagatctgataattgcacagaccaactcctttgcaacattttagccatggccacagtggccattctctatgcaaagccctgggagggctacaaatgtcagtgtatcctccttcatcctcatttatttgtcttattttcatcttctctactctcagctacacttggatagttgtttaatgtggctaaaattactctgtctcatagaaggagcaagataagatcatttacactattgttttaacattagtaatgattgtatcttgtccttgaaatctttacttattccaaaatttaaagtatcattctcaatagcagcagtagactgtattcttttgcttattaattaatgatatacagataggtcagaagaaaatcaaactgaacaaatgtcccatgactggggtaagtgcgttgatctgcttttcctttcagagagaaaaatctgtctttattcctaaaccaaggtgacatttagcaccagcagattcctttattgacagtctcagaagaacagccctagattgaatcagctttaactgttgtttccattaaagatgcattgagttatattggcaagccaaggtggcaagaactgatgctgccactaagtgtggcacctgatatttggaaaacactggagttctgccactgaatcagtcaatttagcaccactggtcaacttgaagtgcattaagaggaaaaacatattttcaagtataaagagcagttatttgacataatagcaatcatgcaggtaaactagtattacccatcacatttgactttttcagcaactcaaattaaaaagggctgtcttggtacagaatcatattaatatgtagttaataaatagttaaaaattagttgctgagagaaaattgctttctggactattaaaatagagaaggtccttttgggttagtgctgggcaagagattaatttttactgacatttatatcatacctctgagctttagaaaaataaaagtggaatcaaatcaggtcaagcaagtacaaatgagaagatattgctgagaactgcatgagcacctcaacacctaaacccaaattaaacaggagcaactctgaattgcgacccccccctgtggatcatgctgggggagaaaatacagagggtttatttagaaagtcttggcagtaggcaagtatggaaaaaaaggttcaaaattgctaatttattttgctaaggagctcatcaagactagtagacacaggaaagatttcagagtgtctcataaagtggcttacaatcaattgcagagctagacatattagtctagaatcaacacgttattgcttttagtcactgaacataactgagcacagcatgctatagaaagattgcaggccgccaaagctgttggctttagcagatttatttatttttttagcttttgcaagtgacaaaaacatatgcagagcagtggccttctttgagcatgtttggtgagctgatcaccttaaattgcaacttaaaactttgctacttaaatggtttattttcttctttatccctcctaaatttctctgtcattactttaaatgatgtatttctcaccaagtatcatatttatgctagagttctagcactaaaaaaagagtcattcctctgaaaaaaatatatatacatattgtcacttttgcaaaagaatttttcattaaaacactagcatccgtgactctcaaaagtgaaataaagtataatgcttgctaaggtataaaaagacccattctccaaattacaggacttgagcactacaattttgctgctgtggctgttgaacattttaaggagtgtttctaatgccctttatagcttctgtgctgaatgcagaaacactgttctctggtgacagagtgatgttagaagtgttaaaaagtgctagttggcttttgcaaggttatagagagctttgtgaacctcatcttttattatgctgtgtcctacctgaaagagatgtacactttacctgcattggttgaggggtccatatataattctagctgaaatccccattgctaaaggcaagatatggtgttctatctgaattccagtcccttgactttgactatcaacaaatagtccctagttagccctatattcccatacaaaaaggtaaacttgtcacattttcataatgctattttagcaaccacagtctttgaaacaattactaggtttttgtttgtttctgcactgaggtaggctatttttgtttgtttgtttgttagtttctgagacggagtttcactcttgtcacccaggctggagtgcaatgacgcgatcttggctcactacaacctctgcctcccaggttcaagtgattctcctgcctcagcctcctgagtagctgggattataggcacccaccacaatgcccagctaatttttgtatttttagtagagttggggtttcaccatgttggtcaggctggtctcaaactcctggcctcaggtgatccggctgcctcagcctcccaaagcgctgggattacaggtgtgagccaccacaactggccggctgttttcttataaatgaagaaaccacagaaattgctaactttattaatatatttattttgagatagggtcttgctctgtcacctggactggagtgcagtggcacaatcagggctcactgcagccttgacttccctggctctagtgatcctctcaccttggcctcctgagtagctggaacaacaggcacatacccccacatcaggctgattttttgacttttgtttgaagagatagggtctcactatattgcccaggctggtgtcgaactcctgggctcaagtgatcttcccaccttggcttcccaaagggctgggattacaggtatgagtcaccacgcccggcaaaattgctaactttaatgttcattttgagtcaagcaggaataatacctctgaaacactctacctgtacactttgtttggtttctattacaaagagagtgtgatttcagaaccaaacttgggtcattctagtccaatatcattgatctcaatgaagcttttggtgaacgaatgcctggaaaaaattagtataaagcaaaaatcataatcatatcattacaataataaaacatctttatctttttttctattcaagcttgttggagcttctagctgtttctctaaataaaacaaaacaagacaaaacttatcagccctctccatgtacatctgaacccatcccattattctgcatctttctaatcttattctgatttagaaaaaagcaaacctgcttttctctctttgttgacattctagatgatttggaccctgtcctacttggcctgtctgaaagttgtcttaagtttcctctgttccaactctgaaccctgctcagaatgcagcttcctgccaggtcatgcgtttctaacagtctctgcctacagcaacttgtctgaggcctgaagcaacaacttggaaatttctttgaagagagaaaattataaatcaataggtacattcagatcaaaaggaagtgaggaatctgcaaaggaaaagccatttgaaccttttaatatgaacttccaaaacctaaaaaaaaaaaaaaaatacttaaaatataggaaaaaaaaaaaagagcctacagagacaagttgcttcaaggttaactttttttgagaaaaccaaaaaacatcattcacagctgaagcaaattaaacagcatcacacattttgttttgagtgttgtggttagcagcaatagcattcattgatacatccactcatctagtcatttgacagatgcttgttaagaacagtttctcacatgttatttcatttagtgcttccaagtataatgagttaaacatagatccagaaaaccaaaatcacatacttgaagtttttcatattaaagagtgagctgctttcagtctacttcttaaccccctttccactaactttattccaatctttggtgatgttatgagttcacaggcagttgcagatgaaaaaaagaaggaaagatactggaataaacataaagtaatgactggaaatagactgtagcactcagctgataagtatcactgctcagtgtaaaagacagcaaatcaggtaggaaatcactattactgaatacatttggcagatctgggtgccaacattgctctatagcttatgatgctaagatgggaaaaagacgcggtgtgtgattgagaatgatccattaattgatcacttgactgatcttcaagcagggaatgaaacaaatacttgaggtaattacaaatattttccaaagattcataataatatgactcatatgagaaaaatacataatgcattttaaatatatattaattctgtttttatattatgacatctcattctgttcaattgttcaatttaaatttgaatgttatttgggtggctttattctaacaatttggcaatttactagggtaataaaagaattcattttaactaataagtgctcacaaaaagctttgtatattagagttaagttttattgaatttgaacctggtctggcattacattgctatttaacagataccgcatttatcatgttatattatattcattgcctgtgcattagcctcaccgtttcctcaaatgcactttggaaaagtatttaaaggagtgttcatttggataaaatgcatgtttatttcattaatagctttgtcactgaattaaaactacattttaaaatacatataaacttaaggacgatgtggctattttgcaaaatggcctttggacttaagattcagaagcaattaaaagctggattaagatctccctctttttaggactccttcatttctctatcttatgtgatgtttagaaaggcctttaaaaaattcacaatgaagtccaggcatggtggctcacacccctaatcccagcactttgggaggccaaggtgggtagaccactgacagagtgagaccctgtctcaaaaaaaaaaaaaatgaaattattttaaaataacatttgcagtaggacttatttgtacatgttcaatggaggttaggataatatctgtctaatgtacttgtatacttgaagatatataataattggctggacgtcgtggctcacacctgtaatcccagatctttgggaggctgaggcaggcaggtcatgaggtcaggagttagagaccagcctggccaacatggtgacaccccatctctactaaaaaaaaaaaaaaaaaaaaaaattagctgggcatggtggcaggcacctgtaattctagctactagggaggctgaggcaggagattcagttgaatccaggaggcggaggttgcagtgagccaagatcacaccactgtactctagccggggcaacaagagtgaaactccgtctcaaaacaaaagaaaaaaaaggacagataataataatagttaatgtttactgagcactcagtatgtgaaaacaactctgttttgtgactttacattgtctgatttaatctatattatatcacaatgagatagatatcattgttttgcccattttataagtcagagcactgagatataaagggagatcaatggtggcttgctcaggatcccacggccactcctttgggctaaagataacatgacctatacttggaataatcatacattatataattaataactaggtctgtggctttttttgtttttttttagacagggtctcagttctgtcacccaggctggagtacagttgacgtgatactggttctgtggcatttttaaagtaacattttattaaactaaaaaggcactattttaaggtagtaacccacctagatgagtcccaatgatcataaatttttctgttacaaattttctgagttccaattggcattacattaaacattaatgttcccaaattgggaaagttaattgtcatattaattagaacacattgaaaataaacactatttatatacatttgattttcaagtgaatttggctgtcctccctttttgtgtgggtggggtaagcaacttcgtatatcatattgcatgaactcaagggagctaattagggctcattttccccacagttctcaaagtgtatgaagttgtgtgtgtgtgtgtgtgtgtgtctgtgtgtgttcatatttatgacagagagagaaaaagaagagggagagacagaaaaactccagttaaaaagcaaatgcccttgagacggatctagttagctgaaagtcacatgaagctgtatgtgtctgtggatggagtgtgttgtaactggaggaaagttgaactgaaccatatgtccctatcagggtaggaagatccaaagggaaatcagaaaactgtgagtaggactttagtgcctgagagtaagggagcctgtgaatgtaactaaggacttttgtgaattttatattttatgtaagtttaacatctatattaaagggaattttattttaaagcatcaggggtattgctagaaatgcaagaaagaacagatgcattttttgatagcctcaaaccagcaactagggaactgtcatttgctgaggcagctactttctccatggctcttgctgtctcatgctcactctctagctctcttctaatgtctctacatggtatctcctctatgcctttctctgcaattcagcttcatcctttgtactcttcagttccttttctctgcttctgcacatttgatagccaaactaatctaactacagatttcattattggtctagttgaactacttgacttctcctggttcgaattccaatattccctggagagaatgtggttggatagctagagtcagatgtatgctacctgccaagtcagctctggttgggttggcacaccatacatgggtggtaccagggaccacccataaggagtttcaagtatggttttgcattagggttaatgtcctgaccaaatcacaggactaaataagagaaagtaaaattaggggaactgacagacactgtaattgtcctaaagaccagggatgaaagggggagaataatttctagaacactggcagaagcaatggaattaacaaggcatacataaggctagaaatatattttcccaggttactcctggaacaaataaaagaagaaaataatgatacaaaatcaatctaatgtaggaaaggatgtattctaacttcgatgatactttattgatacaaaacaagtgacagtgatcattaaatcaggtcagtgttaccttggctaagctctcaagttaatgaatgtcgagatgacctgtttgtagcaataaccaaaggtcactttcaggtgaattccacatcctccatgacctgtatttgtggttctaaatcttagttggagaatcttttcactgtattttacttttccttttatatctgaatctctgaatttcagtagtttcaagtgaagctttatttcggaaatcattagtacttcctctatgaaacagatctttttgcagtatccagaatggctcttgtcctggctattatttcaacccctatagatagagcaacaggtgatgcacttgagtggaagaacctaatcctgaaatgtatcacatttccatgctcaaaagcccactgaaattctgtaatttactgtgacaatcacagggtagctgctctttactctttaattattgaaggtgttttgtcaagataaataatgataatgttaataattgctgatagtatagttcctgctagcttttcccaacaaaaaaaaatcagtattcatcctcctgaatatatttaaaagacaatgtagaaggaaaatttttttaaaacctgacattttgagagtaaagaataggaaaatacacaataggtaaaggagggttgtgatagtaaaaaagaatagtattcaatttaaattttagaaatagtagtcatacaaaggcaatgctggttgctatagactaaatgtgtactcctaaaattcatatgttgaagcttaatcccccagtgtaatggtatttagatttgggggcctttgggaggtgactgggtcatgagagtggagcccttataatgggattaatacccgtataaaattgaccccaaagaactcccttgtacttcaaccatgtgaggacaccaagaaaacacagctgtcaatgaatcaggaaacaggccctcacaagacactgactctgccagtatcttgatcttgcacttccagcctccagatctgtgagaaataactttctgttacttataagccagccaatctctggtattccatagcaacacaaagaaactaagacaccgatcttattaaaacccatctggttgtcagaattcaccttctagcccttagccatctctttttcccttggagcccctttgcccacacaccacgtatagtgatggctttgtgtccttattttatcaatctactctcagaaaagattctgataatctgatgtacacatttctaacttactcatacgtcttaatactttttctatctcaatacatttcaataaacagcaaactctaaaaccaaacaaagaaattcaaaacttggagtctaataaattctttaaggcatcattagtacttcctcggtatctttacaaaatgcatcgctgcccatttttaatcagagccatagttgggatgaggacagtctggcccagagcacattctccaaaaggggttattttattttattttattttattttatttattttcttttattttttgagatggaatctcactctgttgcccaggctggagtgcaatggtgcagtcttggctcactgcaacttctgcctcccaggttcaggcaattctcctgcctcagcctcctgagtagctgggactacaggcacatgccaccacaactggctaatttttgtattttttgtagagacggggtttcaccatattgctcaggctggtcttgaactcctgaccttgtgatctgcctgcgtcggcctcccaaagtactgtgattacaagcacgagccaccacacctgtccccaaaaggggtcattttttaaaagactataaaagttatatgttgataggataatgtattaatttgctaaggctgccataatgatatgccacagactgggtaccaagcaacagaaatttattctctcacaagtctaggggctggaagtccaagatcaaggtattagcaggtttgttttcttctgaggcctctctccttggcttgcagatggctgctgcttgctgtggcctcacatgtagccttttctttgtgcatgcatctctgatccaaatttcttcttataacaacacggtcggattagattagagcccaccctaaaggcttcatttgaatttggtcacctctttaaagaccctatgtccaacaacagttacattctgatgcataaaaatacaaattttggggagacacaattcagttcatcacaggtggtcattaagactataatgaagagtcattagaaaaagcagtatagaatatttaaaatatcagcaggaggaattgttggaagtttggggaaagtggtccaaaaactgcatcttttattatttgtattaattatttaaaaatagattgtaagcatgtgtcggtatgtgtgtgcttgcaccatcataggtgagtcccttttctcctgtcctgctctcaagacctcctattcctaaagggaaaaaccaactctgtctgctgctcatttgacccctgttaaaagtagcctgcaagaaggaggtgctgtctggcatccagaagacatctgtgttgttctatcacccctttgatatcattacactatctaggggtgaatacattttacataaatagatttaattttgttttttttttaatttattttatattaagtcctgggatacatgtgcggacgtgcaggtttgttacataggtaaacgtgtgccattaatttggaatggggatagttctaggaaatatcagcagagcaagtgggaaataattatattttcttttgtcctttactccccatcattttcttaacatcagagttttgaaagttgcctaaactaatgtgccacttagaaggcacttttctttgatatttcaaaactgctgattgaagcaacacaaagatgctataaatgtaaaaagaatctgtggcaaacgttagaagatttccagtttctaatttaaaaaaattcttagtacacaaatgtaacacctagaacaatgcctatcaagttgttgggtcttaatagatacctgttgctgagtgaatctggcaggctgtctcctgctcccacggtgttttacacctgcctcttttattgcagtcattgttggcatgataatcacgtgttcttacatttgtcactctaactagactgcacagtcagtttatttctgcctctgcaggatataacaaagtgcttgacacgtggcagacactgaataaatttgttttgaccaaagaacataaagaacatgtattttcaacagtggtgcagacacaactagcatttcacagccctgtgtgtgcagtaattgcaggagtgcctctagaaacttgccacaacatttctctgatgccccaaatcccttaaatagaggatttctaatattcatctgaggtgaatctcaagggccaaatgttcccaggagtgataatactacaaattcacaatacagtatggagaattggtatcagatccttcctaggaatggatttttatggctgaatcaaggatgctgagaacagtaggaccttttgttcatagttattgggtattcaggatgaggaatagaaaagagagatccctggcaaatcgtgacatttgcctctctcactgctgctgtgagatttagcctgggtgaatctggtaatggcgtatataagggatagtgaacaagaaacaaaaccgtcacacattccagaaggtaaagtcatagtccatatacctatggtcattaatgtgaatgcacttaaattacactgattttcctaatgccggtagacattcagagacctaaaacttattacttcttcatgtttgctcagcctctgtatttcttttgtggcctgtattaggtaatttgattgtctattgataaggagatagaggaataaattgaaataatgtacagtatataccttggctgataaaagttctggtgataacatggctttttgcctaagatagaaattagaaattatcagtagagtagaatcaaatattactagtttttaagtagtaattagaactaaatattagtattaatttgtagatgtaatgaattttgaagtgattaaaaatatatgtttcttaattttgtgaggctatgaaaattttacataatccatacttttttggcctaacgagatattaagagagaatatcgaagaattaaaatatcacatttgtgtgttctgaagatcacattgctttctgcctttgaatactttccttctgtatagcaatgccaaggatcagctctaattattttcagtaagaaatggaggaaaacatgatttaattgattttcttcagtctgccagaggacttggaagcaggttggtgtaacaggatactcaccacactgagagttgagttgtagaatttagtccagttctgtcactgcttagtaactacagtcaatgcatttgattgaacacaaaaatgtttactgaggatttcctacacaccttatgtagtgttaggttctgaaaacataaagatgaatgagacacagtctctcttctgtgcctcgttgtctgccttcttgaagaatgtaagcaatttacatggcggagaagacaatccaatcaaaaggcacagcatgagcaaggtcataaacacttgaaagtgtcctaatttattcctcagcgttgaggtaaagtaagtgttccactgagaatgaaagatggcatacattagaaaagattgcattggagggaagcatgatagcatgaagggtctccagagtcatcctgaagattttgggctttattcatgcgagcttacctaaatttccatataggtttataggaatggaagcatgaatgtttcctgattatacttagtcgtgttctatttaaacagaaacaaatttttgtcgaatggtgaagtcgaatctattatactaattaaaagaaaaataaatctggaaatgtgggttgggggcagaatatgataatcattgaatggcatgctatggaataactatttaggaacagaaaagtcatgattagctcaggggaactatcataaatatgagggatatttaaaaccttggcatctgtttggagttaaatagacctgcatttcaatacttgctcccctacctaccagtatcattggaatactagcaagagacacttcaattccttaggcctttgcagctcatctgtgaaatgaaaataaagtctgagttcgtgaatagtatccagaacacagtaagcactgactaaatggtagttacaatttttagtttattctttgtggaagagtaaccatggaaatgaaaggaattcgtagaataatgtttacagcactagcattagcacaatgtgttagtaaacaggtttgagttagaaaaagcaatcattaagcactacctacatttaaaggtagagtgacctaccttcatgattttcccagtactcaggagattctgggacatggaacatttattgctgaagctgagaaaggctctggtaaactgggatggattgatcaccctatataaagggctttccccacataaatcctatgaggaaatgtggtgatccattccatagaaggagaaattgacgttcaaaaaaataaggttacttgctcaaaatgacatagcagaaattgatattcaagcctacatttttttctgatcatagataggcagttaaagtgtataaatacagtggttccagagtcaaactacctgggtttaaactatatgtgtttatgcctcagttttcccagtaaatgaggttaataatgtgttttctcatagtttttataagaattaagtgaggtggtgtttgtaaggagtttagattagtacgtggtacatggtaaactccccaaggagcagatgttttgtctcaaaaaaagtattaaccttttactatataaccagtaacctataagatacagctttgagaaaagaggatataagggactcaattttatgtcctttgagtttgaatcagatgattaccaaaggaaaatgtccaataagccactaaaactagggatttggagctcatatgaacagcctgaaatagagatatagtcaattataccagataatggttgatgacatgggaagatatgggcggatccttggagagaaagcatgtggttagaagagactactgccaggacaccaaagatatgaggaagaaaatatgaatcagatgctttcaggcatctagtctgagatgactgctaagcttatttttaacaagggagataaagtacaaactcaatatgcattatgcatgttacacaacacctaggggaagaagacgtggggctgcactgggggagcagtggggagcaagaagcaattgaacttatgtggttctctaagggtcttaaggaaagttgaaatcttaaatttcaaattcaagaacatggagggttttatatgttacgttgaataaaatgaattagataataaaagtgtacgtacttctttgatgattgagaaggcacttcaaaatatcatgttgtgtttcaagttgatcttttaaaccacccttacatgagaagtagagaagttctgcttaataaagcattttaactgataccattttgaataagaaaaaggttagtaaatgaaacggaaaagaagtgcaatggaataaaatccccgtgcatcgtgacactgaatgtactttcaaaaatattcctgatctaagcattaatgcaaagaagtcattcaccaagaacattatattacttaacaatcctttgagttcctcatttttcatttttctcattaaaatggactacttacttggcttatctttaattgagcctgagtttctgccattaaactatacataaaatctctcatcagaatcactggagacctgggaggtggcaagaaatcagcaaaatattgagaagaaaatgttaaaaaagtggcagaatgggagtggcaacttcaggcatcctttgtaatgagagatttttcttacatcacagtatatcagtatggtttagaaaatcgagttactatctaaactgatatagccagctcattggcaaatgaacaaagctagttaggccgatgtaaccccctgccagagtttctgtttttgcaccagggtttctgttatatgcatcctcagcaatatcactgtgggaggtgctaaactcaggatgtgtgatttagggattaaatgactctagttgatattgctagctgcaggattcatttcagaaagctcaagacagggattggtatgtgggagttgaatgaaaggacttcaaaattaaaaatactatccctctaaaactcaaagaatgagccgacaatccaaagtgccttggcacacatccataatggttttctctctgtactggaagtaatgcaaatcatcactgagatgaatgatgttcttgtgaaagcttttaatttcataagaaagagaattacccgtaatcgttgtgttattaatacataaaaacaggctaacatgagccatagattaaccattgccttttaatttaacaccctggagaggaaaattcaggtaattatgctttatcaccaaacagtaagcacaggtttgtctttcttggttgtctttgtaacagtatgcaaaatctttagccaagaggttccttataacacctgtattttaaaatatgatattctttccttaggttagaaataactgcttattcatacacttttctaatatttaaaaccatgaatgcaaaaatgacttttactgaaaatcatatatgattgtacttgttaggggacatagaagaaacattcaggacaactcagcacagatgttgaaaatgttctgtttatcctattatatataatcagattaacctttccttttgtgctataattattacacagaatggcaaggttcatttggtgaggcatgactttcttttaatgagctcacttatgtaaatcccttgattaaaggagaaataagagaaatgggagcaattagcacaacttgggcagacaaaaacctaatttgaatcagctaaaattagaaagaagctcaagtagtttactttcaaccttacatcactccgtttatagtcccacaactgtttgggccttaatacctcacacctgggttaggacaataatttccacactggacattttgcatcttgacttttttttcaataatccatcttgcaaacaatttcctggaaaaatatgcttaaaacatttctgagcatttcaaaacagttcaaaaaccttcactagctccctactaacctgtgaattttttatcaatgtccccactgggaactagacctacaggtggccacctcaaacttttccaaaggtctattaactggcagccagcagtttttggtaaggataatttgttggatttacagagtgttttataaaatgttgaaagtagttactcctgtttaaaaatcagaagagatctcatttttaaaagcatgtgccctagctaccttgggacctatccccaggggacaacggttacattatagctgaggggaagctgcctccttgcttctgggatcatccctctagtttgccagaaattcttattgccttatacttcacctgtttccctcattttcttcacctgcctataagcattgtagttggtaacctctgttgtgtactacgatactacaaaaacttctacctaagccaattgatctaaccatggtcattcctacctccatgccattttcacccagtgtcgcccacttaaaataccttgtttaggatatatcatcattttacccttctaagttcttctgtttcaaggatattccccagttccttctatcatcagggattgtgcctgccttggtctgaagaactctgtggttgtttggcatttggtttgaaaataaatagcataatttcttgcagtctatatattattcacttccaaaaatacattataaactactagaggattgggacaatcacatttgtctctttgtaaatctggctgtagcatcaaattgtataaacaatgaggactaaataaatattgaaaattgagttattccagatactgcttttggcactagaaacccgaatgcaaacagaacactgacttttagtcaacttcccgtgttagtttatagtttagcatgagaagactgtcttagggcaatgtaacattcaaaagcctgtagattcgttttgaaaataaaattaatatcatttattaaatacttatcttccaggcactattttaaatgatgtcctcaattagcccacataatcctcacaaccattctttgaggcaggttcttgggggtagcagtaaccttgtttcttgtgctttcccaaggacatctagattataagtaatggcgtcaagatgtgaacccagatatgctgagtcaagggacataagaatagaaggaataattctgtctgtgaatctggaatgatttcctagaaggggtggcatgctgagttgttcttgtgatgcttaggagtccatcatacagacaagggtaaagcatgccacaccaggattagtgagaacaatatgattaaagacagtgggcagaaagtgagtgatgtgttcagggatcagtgagcagctaagtgtggttagaggaccagatgtggcagaatgaagtaagaaatactaaggaatttggacattttcctgtggacagtagaaaacatcaaaagtttataagcaaagctgtaatgtgttcagatccattttagtgagattaacttctacaatggtttggatgaagttttggggccaggcaatccagggaaggcagtagtccaatcacagtgacacagctttagccaagagcagtaaatttagatgccaatcaggaaacaaagaggagaattagattctaagaaatttgagaagaaacttgaggagatatgatatcaaaatctcaaacctagctgctgatgcccttaataaatatggggacatcagaaggaaatttgaagcagtaagatattgagagtagactttgtaaatacatcttaggtaccttatcagaatgttttttcctttattatgtggtagctcacattgatcctctaattccctgagaaatttccagttcattttggcatcaagcacaagttctccttaaaggaggatggaaagttcgtgtaatatttttaggttttatggctggattttgggaaaagggattctggtttctatgactcaccttggggaagagggattctagtttctatggctagccttcggggagaatggcactgagaaatagcgcaggagaaggtaagagaaaaccttttgcttctgaggccttcactttgggctattgttttctgaggcccagaggtgtgcacataataatttatgggttacatgtaaaaattaggaaacatttctaatgaaaaacgttagctcaatatattattctcttaggtcatatgagattacaattttagaataaagaaactaattttaacattaaggatgaggcttcttcttgtgttttcctttattattttgataaatcgatgctattccaagcactgggaatacagaagtaaaaaaatagacaaggcacctgctctcatggagtttacagtctgccagcggggaataaacaaataccagcttttacatgggatttgagtagaacgttacaataatgtcgaaggtatcttaccagagttttaaaaatgtcaatagaaatttaataaccacactattttgcttgattaatttttctctaagaagctgtgtacttaccagaagcctaatgaacagaagtttacccttagatggcaggaaaatgtactgatgcataaagcaatatctaaagttctctttagttctcacactaaacctcatatttacatatgagtttcaaaggtagagttccatgacattatgtatattctttggttgaatctttttcttaacacagagtaaatcagcagatgacaaaggaatgtgccctggaggctaagaatatatttcatttgggctatctcgtaatgccagttttgcttttaccatttctagtgtcaacggtttcattttccatttgtcatacttttagaaggcaacaaagttcaaaatacggcaaatattcacatgcttgtacaatactactggaaaggccatttcaaaacctgacactattgtgtacatactatatgccaaatactgcacactggagaattataatatctctaaaatagaacttttggctggaaggctatgccaccatacagaagcatattttggcaccggagaggtgatccagggttgtaacagggtacaggttaaatataaaaaataacaaacactttgtattgagggtaagagtgaaaatcaactaattaaaaataaacacaggcattaaattaagcggctcaaaattgtaatcctgactctccttttgtgcccttggagtgattagtcattgggttcactatcaacatttacaaatgatgtgactattaaagaaaacgtatctgtgtatagacatctatagcatctaacaaaggaactgtaacacagagaatgctaaataaatagtttgtctttcctggttgcctgtggttagcaaccctgatgtgcattataatcacctggggaacttaaaacactactggggacccaatcagtgtctctaggaagagagaccaggtatcagtaattttttcaagctccccagatgattctaatgtgaagccaggctgggaaatattgggttttttaaatttctctcttcgtgcttatgaataggatttaggctatttacagagaaacctcttcccaattcctgtgggttaaataggattctgatgaaggaaagacagagagaatgagagaagagaataaattatctctgctgtcttcaaataagagtagctaactctgttaacacatcctccaattccatgtttctcaaggtgtggctttgcaatgcctgcatcaaaataactctgggtcctggctgaaactacaacatattgagcccagccacagaccttcataataatttcattaggagtggggcaggggcagaaatccaaatttttactaagcaccgtaaagaacttcatgtactcaaaatttgaaaatcactgctctaagttaatgccctaagctctttttttttttccgttctgaaatttcttcacaaacatactgcagttgctattgagtaatttctatttggaatatgctacagctcagtcagataatcagagaaattcaagaaggggtttaatagactatggaaatctagctattgaacatagcttgaagataggtggatttcaaaacccatttactattttgattgacctaactgtttcaatctgtcaaaagcaaaaaatagtcaaactctttttttttttttttaagtgtacaacagattttgcaatgtctggatctcacttagagaacaagtgagccctttaggtttcactgatattttctcaggaacactttccctgattcttgggtccattaggccaacctgctgttggttttctgagcatcctgtacagcactcaccattctttattgttatcctctgtataattgtctaaactttctactcggtaggaagatgtgcgagagcaggattttcttttgccttgctcacaactgtttttccagcacctagaggttctatactccacagaagcaatcactgagtgacttttaagtgccccctacctcgccaccctccaccgccaaaaaaagtttaaatgtgcttgggaatgtaagcacaaagtaagaatgctttcatgcagtcactgacctttaagcttttctctgaaaaagcagcaactgtccttccaagagatgacttttagcacctctagctcctactctgctacctcctcaccgtatttaatactgtacagctcagaaacagagaatgttggtgctaaacataatgagggtagaagcaccgtaagctaaagctagcattagcatcatgatagtaatcatcatattaaagtgtacaacagtgctgagtgctgtaccttcctcctgctgatgtactgtgggttttaccacctagtcttcttctagttttgaatgctatttgtagccactttcacagaaatggagccaattgtttcttatagaagaaaatctgtagttctgtagtctattgatgactcttaattcgtttcaagcatgtttgatgttcaggtggctgagtagcactacatgcagcattaccaaagaggcttatgggatctatcctggtatacaagttccatatgacattacccatttcgctaccatcttttctggaaaacatcctaattgattgttatctttacatttaactatctatatttactttccagtgcttcttcaggtagtctaatatttgcttctgaaataaattgtattcccgatgcacgtttcaatgtaatatgaaagtaacaaatgtcatatttactgcctctttcaggacattaacaaggagagtaaatgagattgagcctaacagcaaccctctacctatgagatgggaatgctgtactgattcggtgacttactatgttttatgatccttattttataaaccattagctaatagtccagctagtacacattcatttttaagttaaaatgcatggggtgacaaattttatgctgattactgtttattttttaattactaaaataatgtagagaagaaacggctgttttatcaactacaaatttctaattttgaaagaatgccatgtaaaatatattttaatatgacttaaaaatggtaaaatgatatgtgttatgtttaaacatgtctggctagcaaaaataaaaaaagaacgtgatatgcttatttataaaaatgactgcccttaaaattaagaaaactgacctatcttattttttataaggacagttctatgatacacaaaagattattattacattaccgtattattattatagatttttctgtatgtttcttttaacatcgcccatttcttttgactattgctcattgccaggtggcaaactattaatgtccgtctttgaaggtgtcattcaaatataaaaacagtcactcatatcccctctcagttagtggtcaccaagccaacttctacatatttagtttcttaatcttccctcaaaattgaatctctccatctatttaatcactatagtggttcttccccattgtctgctgagaaattatgtgggaaaattgatgtattatatcttaattttcttactcctaaaatttcaaaatagaatgttgtagcatgactgcttatagctgtatattttggagaagcatctggtattcagagttgttctaagtcttcagttgcacccctgttaataatttaaattgtccagaacggtaaaccagaattaataatgtggagattaaattattaatcaaaggcaatgtaaatataagtttaaagcaaaatcacaaggtatattttgtatatggttgcagaattatttatttattttattcaatattaaaagtaacatataatttctgcttttcagcatgattatttgatgatttcatgtgattctgttacatgagtattttattggtcatttatatttgtattttaaatgtcaaaataagcaccctatgtttgattttagatttatttcaacagtgtagtacttcctactctaagcctacttttagtagcaatttatcttttcttgtggtggtactgagtctgctaaaaatgcaaaatgatagaggaagaataaattagtgaagttgtatctagaacactcttgcaagtaaaccatgagttgagttatctgattaaggaaaacagattacattaaagggtatttgtgaattatagatttgtataaagcaaggttttgatatacaagattttttttcacaaggtagaaatacaggtagttcaaggagaactaaattcattctatcttatttgttatttcaatccataaacagaattttcatccataaaatggaagatattgtgcttatagtacaaaataagtaaaagaatatataggccacagctagttttctggtagaatttgacagtaacattgaatcaactatttttacaatgttttcagccaaacttggccctgggcttttgaatacgatgttatttaggacctcatctggtttttgggttttttttaacaatacagtggcattaaattattaaggggatatatgtgtttttgtggtgaggataattaaggacatagtcattgtttaggctatgctgcttttatttatagcaacattgggatgaagtcaggaaaaccaggttcaaatcagctttatcacatatcaagagcatgaaaatgccaagttacataacttctaagccttcctcatcttcaaagtggggataacaatacttgctttataaatttattgtgaagatcaagtaatttagtctccatgaagaacttgttacagcaccttatgacattattatcactattaggcaattttgcaatgacccttttaaagtaggtcaggcatatttccatgttaggttaccaggaagtttacaagaggacagaataaaacttatcttttcatgtttttatataaatgcagtaaatttgccccaggaggcatcagaatatgtcaaattgccttgtatatattatgcacctcctcaagtgacaggattgaatttaaatctgaggcaggaaaaacggtaaatacagcagctgtagacaattatagttaataaagataagtatgggaaaaaataaatggcatgaaagagagggatagtctgcatggtgcaaattaaaaagttcaatgtgaacaatcattccacaatgtggcaatgctggcatgaaataatccagcatcatttttaaagtattattgaatggagaacttagaggaatgttaccttgcttattcaatctgctgaaaagagacatagggaattaaaaaagaaaaaactatctaaaggaataccaaagatgatgagtgtgtagaacaaagcctgtgaaaaatcatgcagcaagagaaataaaagacagaaatggaatgtaatcatctgctggaataagaggtctagaaaataagcaacaagatgcctttctcatccattgccatttggtagctcctttcctgttaatttttgtaagaattatatctttatgttcattgtgctttctaaagagcaccatttgttcccaagtgatgtctaaaagagaaaattgtgctttttttttttttgaaacaatcgaatgatcatgagcccaaattcttccaaatgtgattttagagatttcctaatcatggggacacaggaataaggtcaaactgaatgattttaaaatactgaatcaatcactaactagccatgggatttaatttccctatcgataaaataagagtgattgttgggatgagtaaattattggtacacaagaagttctcagaacagagcttggcacattatgcactcaggccatgtttgtggcactaaggctgggtcactagggcaggctcactcacagtcacctatgtgccgaggactctcttaggccaggtcttcctcagtgccctccctcccttttcactttcatttatctgacttctgcttctctcccaaggcccagccttttctattctgaaaggcacatgatgcagtggtaaagctggaaagaacatcaaagttgtagaatcccaatatgtcattttgtgggtgaagaaaccaaggcttagagaggtagaggtagagggagaggaggagggaggagaaagggagagaaatggcagaccgtggaccacttagcttaggaatttacattccgcgatcttgtgctacactcaacattctcaaagttcccctctttttgtcaaactgcagagtttggacaggtatttgcactccaattcctagtccactttgtttgtgtttttaggcaacctagacaaacttctcaattcatgtggcttctatttcctccccagactccatctacaacctgaatgtcttctgtactctagaaggctttatccatctacagagtttggataggtatttggggcagcaaattcaagagaatgtgggaaaagcagagtgaatctaaaaccccaaggggactgagaaggggcattgataagaatcccttagacatgagttatttaagtaaaaaacaaaatagggaaggactaaataagaaataaacaaatgatctgtctgtataaggctaaatctagtactccttgaaaatttgcacacagtgtgcacaaagcactgtgctactggaggccattgcatctcagtaaccaacacagcagtatctacattccactgaaatactgggaagaatttgaattactattattattcaaattcatgtaaatctatagttgataaatacattatatatttatgttttaataattcttactaaaatatttttagattttataatgcataacattaactaatatctttaataaatttgggaatggttatagattaaaataagctacaatttaatcttactcccggagatgcccaattacagcatgttgacaaatcctctcattttgcggttgttgccagataactgatgcccactttgtgatttatttttctcagaatggagaattgaactcacagatattttctgagtaataattacgggcaagaaaaaaatgctaattgctgaaaaagtaatgggggcataggacaaaaagactctactttcaagaagcttacaatttagtgagcaataaagacagaaaaagcagcaagatgcatgcttagtctggtaaatgcgtgacctgcatagtggcaaagttccctgtacttagaagagctctttacttggttaagtgctcttctagcaccctcttgaaattcttgataatttttgaacaatggatctctcattttcccttggcactgagcctcacaaattatgtacagccatgtgctgcataatgacagactgcatatatgactgtggtttcataagattataatatcatatttttactgtatttttctatggttagatacacaaatactttccattgtattacagttgctgagagtgttaagtacagtaacataatgtacaggtttgtggcttaggagcatcaggctgcaccatatagcctaggtgtgtagtaggctgcaccatctatgtttggtaagtacattctatgacgtttgcacaatggcaaaatgacctaagcacacgtttctcagaacatatacccttcttggagggactcatgactctaatgggtcctgagtactctgaaaactactgcggtaggttaagaacaggggcaatggaagcccttaggctaaaaaggtaagccagtccctggatgaagctgaatgccagaaaaagcttctcctgggaaacaatgacaaactcatgctgaaaagatgagtaggaattggttaagtggaacaaagaataggacaaaaggagttacaggatgaggaaacagttgattcaaagtccttgtggagagcaaaaacatagggaattcacagtagtttagcgtacttgaattttagagtaaaacttatagataagtaagagatggaaaagggcccagatcatagaacatcatgcagttcttcatatagatacttattctatcctgagaggattgaaatcattgaatgattttatgtagaggagtgaatttatcaaatgtcagttttagaaaagttactcttagttactctgtagaaaaatcaatggagggagtagttgaattgtatttccattaatctaaacaaggaaagatgacttgaaccaaaatctgccagaggagttatagaattcagacaatgtgctggttgacaggatttctgaaggaagggatgaggagtcaggcataatgactatattgtcatttggaaaaaagaaaggatattcatgatgtttgctgagatatcaactataagacaagtgacagacttatgcaaaaaaatataagtttcatgttagaaatactgaattcaagttgtctatatgatgttcacatggagaggtacaggggcagatggataaaggattgtggagtgcagaagacgtttaggttgaagatggagtttggggaggaaatagaagccatatgaattgagtagtttgcccaggttgcctagaaacaaataaacaaaaattggaagcaactgaaatcatacatacaggtgttccaaagaatagaaaaattaataatggcaaatactgcaaagaagtctagatgcagctcctggagttattatcatgcagtatagaaattaattgacccccgcatttgctttgacatactgaaagtatgggatccttcagggctgggatcatgcctgttattctatggcagaccttaaggtatctgacaaaatgccttgcaacgtgtgtgtgtgtgtgtgtgttggctgattacctggccaactttttttttttccttttcttcttactcagaagaaaaattctgtttccatctggtcactgggacagttcagcctacagtacagcaccataaattctgggtctaaatcagaagaacactagaaaataatatttcaagttcccttatgctcctgtactgaatattcattatagaaatacatttctttgtcaaaatagaggagtcattcctagctgcttagtatttttcagctgacatctaataggaatataaatggaccaggttaatgaaaacctgctcaggccatctattaggtaaagtcaacagtaacaaagtccttacagtaattactaactcactctctttcttgacccattcgttttcctgtcttttatttaggaagtcatttcttcaagtctgtctagtactccattcttagaaatgccagaacatcaataaattgttggcttcccccgaagaaattaaattaaattacatttgctcttagaatgtatctttcgtcccccgtatgtctcatgtggtcctgatgctgtacctcattaaaaaactcactgtaatagaggggagactccctgaaagaggaggaaataaagcatacaccattcctttttatatgatggactgcagctgaatgcaaattagctcagaatcaaactgccaggaagggtgtatttattcttaattgatggctaaaacttgcctctagaaattaatattttatatcacaatttgacacaaactctgataccagagtttggtatcagagtgccagttttaggctcaaaaataattatgggattagcaaagataagagcagaatccctagttattgatgtcagctaccaaatgtataccactattatctaacattatatttcttagtttatttgcagttgaccccaactgtaactgatcatcttctatatgaaccaggttgtaaaactgaaatacaaactaatttcaagcaagaaagagtcctccatgactaatgtatttatatttgtaattatatatatatatatatatatatatatatatatatatatatatatttatagatgtaatcccttttctggatttggtgtatttttccttgtaaaattacaattaacttgaacatatgggacacctgtaccacagcatgtactaaaaattcaaaggaacataattaattggaataccaagaagcagcatgcttgtaaagcataataaaattcaatataattttagcctaatttatgttctaaatatttgaaagatgaagatgactgaaaaagcagttggaagtcaaacttttgccttcaagctatgtattgaaattcattgatacagcaattcttgtaaaagcataaatcaaacttataaagtaggaaggaatatagctaaataataatggaagagtttttctcttgcattactatgtttaccttgtgaaagacttgtaaccttttcaaaattaaagtcttccaagtatttacaagagtagataatgcttttaatatctccatattttatgtttattcagctatcagaaatcctatagaaaatttacatttcaatcagtctttttatactggaggaaataatattttcataataaattttcatagcttgtttaaaaataagtcagctgactggtgtttattctatcctaaaatagatatttatgaggcagaaaaccctgctggcttaaaatttaaatgtgtactaaattaaacaacctttatcaaggaagttttctaagttatgatgagaaaaacaaaatttccatcactaattagtcattgataaaagagaagaaaatgatctattatctcagattaaatttggcttttaaagatcttgagctgtttattatgagttttgtttctctaaacaatttcccttatatatacaatatacaataaagcaatagcaatacatatttgctacaaagtgatagctacactctaaaggatataaatcatgtatgtgtttataattgatgtgtatagattgtttttctccttattatagattgtttttctccttatctacatatgcagaatggagtttgtttgtgttttgtgtagccatgccattagtggacacaggatagtgttttgaggcagagtgacctgaattagaatcctgaatctgcctcttattagctagtctaccttggataaattaccaatctttttgcattttccttaattcctcttatgaagaatagtaatgatatatgcaaaatgcccagaacagtgattaacacaaattaattttatttgtacaagacatgctaatatgacttcaaagacaaagggaaaacgatggtaaaaatgataacagaagtcagtatttgcaacacctgtgattcagccaggaaattccttagggaaaagttaggttgcaaagagggagagacagcactttaattgatagcatctgcagtagattctgatttttgtcattttattgtgaaaactgacagttaaaggacaaggaattggaaatagtcaaaagccagatatgatcttgaactgcatatgaactgggataagaaaggtggcagaataataatttctctatcacttagttgatgagtgtttcattattacccatccatcctaggtaaagaaaggagaggtatttgatagccctgtttctttccatgacttctcaattgaaacggtttttgatacatagacgtaatgactttaactgtgctagaaaggcagatatcttaaagtggcagtatatcgaagtggacaagacttgtttctggaacgagattgcatgggttgaaattctcaactacttaccaattgtttgactttccgtaaatcatataacctctctgggcctcagtttctttagttataaaatgaggtatttgctttcactttcatcattattatgagatttaaatgacactttctggccccaacttgcttgacttcatatttctgtagcactatttacttgttatttgatttcacaaaagttacttaacatctatacctcaggtttttaaaaatatgtgatattaataattagtatgaataaatagtaatagaacatggattttagggttgttgtaaggatcacatgtgtaagtccatatagggtacttagaccagtgtttggcatatattttgtgcacaatagcggttagctattattaacgtaaacacatgaagagaacatagcctatgtctgtgtaatatacatgtgagaataggggtgtgtgtgtgtgtgtgtatatttatatgtacaaatttgaactaaaacgtgtgacagaaagaaaattgacagggaaaaaaattggaatagcttgtatttgttctaatttgtataatcctagcccatgacttaatgttgatgcttggctttatcttttggatggcctaacctacattaacatgtacgcagaacattttaagagtttttttttttcaaaaatcataatttattaataaataaagattaaaaaattggaattgcaaaattacatttgagcaaatgtttttatagagaacttgcccaaaccagcagaccctctatttaaaaatgtccaaattcctgaatcatttactaactatgctttaattctgtgaaccataaactataaatatgccaggtcagttctcaaccagaggacttactatggaagtttaattggtagaattgattatttcagactatcttctagcctgcagaactgctaaaaagccttcacgtggaaaaagaaatttcttgatctatatcataatcacaagggtaaaaatgaaattatattttaagagatgaaatgcaaacatggaacaggagaagtttctattaacccattaatgctttactcctctatcttaataaaaaccaaaacaaaacttttattcaactgactctatgtggtcaagaaccaacagctatgaaatatcaataaattgctaaagtgtaaaataatttagtatttttttctggtgcaaactataagatgaaaacatggctaagtagcaaattcaataataatgtagctaattaatttattataaattttggaaccattcattcatctttaaagtcagaatatttggcttactcgtctcacaaacttgttataaaatgtaattgggtaatgattataaagtcagattttcactaagagtaaataacctattaatgttatctaggttgttttcaatttggtgaactgtattgtccaaactgtggcatctctgattatgacaaaataacataaaagtttatgactgagttttgtagagtgtttttacccatttgctcaaaatgaacgttaggacaattagagttattattgcatttaatcaaaggtagagtctgagtttttatacttttagaattacacttcttatctttcttagtctttctgttgcttctaacagaatacctgaaagtatataatttataaaggatataatttatttcttgcagttatgaaggctgagaagtcccatgttcaggggccacattaggtgagagccttcttgctggtggaaactttctgaagagtcttaagacagtttagagcatcacatggctagggggctgagcatgctaacctgccagctcaggtctgtcttcctcttcctataaagccaccagttcccctcccatgataacccattaaccctttaatctactgatggattaatctttttattaaggcagagccctcatgatccaatcacctctgaaaggcttcacctctgccacattggggatgaagtttcaacatgagttttgaaggagaccttcaaaccataagattgggaatatatgaatgatttgtctgagagtaaagcagaagttcttttccctccagattcagaaggaaacaatatggcatagtagatcaactgtgagctttgatgatagtagcccattgatgacaactaccatagtcatctataataccattagactattaataaaatttcctataaaacaattataataatatatgtactgtaaaccattattagaactagctaaggtatgtatatatagcacacagcaatctcagggacataggggtagtcttcaacatgtctaatcataattattaacattagactgacccaaacatttatattttattattacttcctttatatctcatataataagcccattacaacatgacacatgacatatatttatgctatcaatgaaagtaagttataatgagtttttgagctttatgaacctttattttaaagtagtggttaacatagtttagggtctgaaaattggatgtagagcattgcatctatgagagattattaagaaaatatataattacatgaaaaattcctcaaatgacagttcagtgggtcaaaatttaatatgaacattgaaagtacatatgctggtaatttttacttgcctctaggtataactgaattattctacatttgttttccatatgaaaacatgtgatgttacctgagaaattgtttggataaatgcagtgtatgtacttgaatgttttacaatgctgttccaactggaaacttgctacatgtcatatttttttttatatatgaaaataatctctaaggaatttatggaccaagaaagaagatattgtattagttttctatttctggggactgaaatcagcctgctaacttatttcttctggaggctgcaggaaagaatctattccttgtgttttccagtttctagaggctgccagcattccttggcttgtgccacatcacttcaatctctccttctgtcatcacattgcttctctttgcctgacctttctacatccctgttgtaagaatgtttatgattacactgggctcacctagataatccaggataatcttcttataataaaatctttaacttaatctcatttgtaaaattcctttaccattaaggtaacattcacaggctctagaaattaagatgtgtacttatttgagggtgggcattactcagtttagtatggtccaccctctggcctccaaggatttacatctatccacatgcaaaatatattaaaaccatcccaacatttgcaaaaatctcaatccaattacgacatcatcaatttaaagtccaaaatctcatctaaattttgtcagatcaaaagtcccaaatataatcatctaaatcatataattcaagtataattgagaatcttgcatgatctatcctgggacaaaattttgctccatctgtagactgatgaaactagaaaacaatttgtctgcactcaaaatacaatgaatggtgtgacaggaatgatatgtaagttagagatattcctattttaaaaagaagaaaaggaggaagaaaacaaaaggaaaaagaaaaaggagttattggtcccaagcaaatttagctatattactttgtagaaatacaaataaaactccattaagcctcaagaccttggaataatcctgcgtggctctcgcctacctcacctgggagtgcagctctgccctgagagtcattctcccctttttcttgaaagataggtatgcttgtacctgagcagttgtgttaggcttttccatccctgtataattttgggagtctggcagccttctttcattctgtcctatctctgtctctttcaattcaagctggcagtgttcctggtgataaaacatgcttaagaatctcttggatctcccatgtatatcacaaagatttgctccattagtcaagaggcccctccaaagagctttcctaaataatcccatctttcttcctgagttttgctgagatggctaaggaattcatcagctacttgcctaatctcttcacagagttctcgctgttcaatttttttttctttttttttactttaagttctgggatacatgtgtagaatgtgcaggtttgttacataggtatacacatgccatggtggtttgctgcacccatcaacccatcatctatattacatatttctcctaatgctatccttcctctagtcccccaccccccggcaggccctggtttgtgatgttccccatccctgtgtctatgtgttctcattgttcaacttccacttatgagagagaacatgcagtgtttggttttctgttcctgtgttagtttgctgagaatgatggtttccatcttcatccatgtccctgcaatgggcatgaactcatccttttttatggctgcatagtattccacggtgtatatgtgccacattttctttatccattctataattgacaggcatttgggttggttccaagtctttgctatagtgaacagtgctgcaataaacatacatgtgcatgtgtctttatagtagaatgatttataatcctttgggtatatacccagtaatgggattgctgggtcaaatggtatttccggtactagatccttgaggaatttccacactgtcttccacaatcagttccacaatggttgaactaatttacactaccaccaaccatgtaaaagtgttcctatttctccatatcttctccaacatctgttgtttcctgattttttaatgattgccattctaactagcatgagatggtatgtcattgtggctttgatttgcatttctctgttcttgaatactctggggcagttttaatccttttaagccgctagcaaaggttgtggaaccacatctttggctttctagtctaaagcacatcctcctgccaatgtatctcccaattttagcatcttttacaatcaagacaagctgataatttaacagatcataaagtattggttccttgttaataaacagttcttccctaaatttatttctttccttttgcattttacaataggcaacaagaggaagccaggcccacctttaaccctttgcttgaaaatctcctcagctaaatacccaagttcactgctgacaagttttgttaccgcttataaccatagggcacaattcagctgtttcctgccgctgtgtaacaagggtccattatcccctagttttaaataacatgtccctaatttccttctgagctctcagcagcagcatatttaaaatctatattttcaccaacattctgtttatgataatttaggttttctgtaagatgatgtaagtttcctgtaccatgctcctcagtttcttgtaagccctctcaagcagtgcctttaacattcagatttctactaacagcctgttcaaagaaatggaggcttttaaaatcctgttcttcaaaatttgttcacctttttcccattaccaaattctaaagcagcttctacaggtttagtatttgtgacagcagcaccccacttccagtaccaaaatctgtattaggttcctgttgctggggcttacactcaaagtatcagtggaactgtgccttctggaggctccagaagagacatttcacctcgtccttttcagcttctagagcctgccagcattcctgggcttatgttcacatcacacatgcaggatgcaaagaccagcaagagcttcccctccacatttagaaataattataagtagatgctatgcaccaaacactgaatctatttgcaaaatataacagaggagcatggtaaagtcaagtttattgttattcacattatgaatcttaaacaaggaagagatttctagatacaaaaagtctctcaatattctttgtatttcaaagagtctaacattatgctaagacacagataagcagttcttttgttccatattccactaaatatgttatccaatcaactaagttatgtaagaaaacccttctatccccaaatgcctaagtaggttgtattcaattatatttatcattttaaaagtacacatgtactcgaaaagtttcctaatcattcagtctttttccaacatgggaatggagcctagttatatgaaagttgagggaaagttttccactttttcagcagaggtatattttgtaaagggaatattattagagctgaaccaaaatagaactactgtattcatagaatattctttttctcatacttcatttaattcctgactgtcaggccaattgttagtattacatattaatggggtaattataaaaccaattgcttagtgctctcctaaaaatccttttttttttttgccatctacttataattttcctgacatcctctcctctgattttttaaattgttctaataaattaaatagtgcatatatgtaatgctagttaacaaaaatttgggctaagcattgcaaatactattgcattttctttttcatctctatccgatctctagctttctagtctatgaccatctccattttctatatccctaaactcaaagggacatccagtgctatcaagacacccaattgaacatacacatatgttccccccttacttttctcttattttacttctattcacttttgcttcgaaattctttctgtctctgaacctgaaaaaaagcaacatagttaaagcaagaattgagagtacaaagacagtgatatcaaagagatgttaatcctccacacagtctggctgcattgaggatatttctctttgtgcagtagaaaactggaaatagctaagtctattggaactcttctttctcaaattctattgaactgaagagtaggaaatttagaaacagtaagacgtgggagataatttaactgaattcactacttttgtgacaaggatatccagaggaactcagggacttgcccacgatagatagtgccaggactagaatttgagcttagtgactctatcaagtattctttcggctgcatcttatatccttagtcaagttaagaataaaattaactttgttctgacttttcaccttgctatcttagatgatttatttcctaaatcttaccttcaggaaatccaaatatcacatagatcaacagaatgtatttagtgacaaatcttaatactctaatcataaaacacacataaagtaacaggaaaaaaataaattattgaatgataaaatgatgaattatgaaaattgactttttttatcctagataatttggaaaactctaggattggtttgttgctgttgtgttagccaggttctcatattacttagactttctgagacttaccttgaattttttttttatttaccaagaaaattcacaatacatttaatcaatagagtatatctattttttgagacgagctcttgctccgtcacccaggctggagtgcagtagtgcgatcatggctcacagcagcctcaacctccttggcacaaaaaaatcctcccacctcagcctccaaggagctgggactataggcgaatgccaccacacctggataactttttgtattttttgttgagacagggtttccttatgttgcacaggctggtcttgaactcctgagctcaagcaatctacccacctcagcctctcaaagtgctgaattacaagcatgagccactgagctgggccaataatatttttaggattatgaaagtttctatttgtcttagataactgagtttgtggcaaaatgcaacgcaccattttcttacagttaggctcagcatttaaatacttcaataaaagcacattaagcaaaaatactatcccaatcttctcaaactactagattatatttttaataataaaatagttactgctaccagcatttctttcataaataattaggcagattgataacaccatagattcaaatgtctctgcaacacttcctagaaattttgcaactttattgagctctcagtctcttttctgcaaatattatttcatagcttctctcccatcctcagactgcaaactgtcccttctgttccctctatttttgtggatgtgcctcatactttcattttgtcacagagtcctaagttgaaaatattttttctgcatctgtaccaatcttatcttttcatgttgcattatagtgggagaaatgtatgccctggtaatgactgtaattttacatttcatttcagaactcacattgggaagaattccatttcttcctatgttcccaaggacttctttttgggaagaagtttcccgcttatttttcccatttatttgctcaactttctttgtctatgttagcacaaattattctcattatcatccagacatattctagttttttctatttaaaacgtaataaaaaataaagcaatgacttctttcttgacttcacaattcttcagctatctgtaatattttcctgtttttcaccatcaaacttcttgaaagtgtttgctacaaacactgtctttacctgattttgattcgaaattcgcaaagtttaaaatattatgaaatatctttaatatattgaaaagcaaagagaataatataacacatagctatatgcccaccctccccaggtttaactaatgttgatattttgtgaaattttcttaggctcttttctcccaaagaaatactttattacccatatggctaaagcccatctcatttaatttcattctttcattccagagttgactattatcttaagatagatatataaactttccaccctaatatttatagtttataatatttgtatctattcataaataatatatagtattttttatatctcatatctatataaaagtataatttatatcttttattatgtctacataaattatatcaaagtattagtatacttttgtgctttatgttaatacatgcagatctactttgcttatgttaccattagtgttctaaaacatgaatatatcaaaatttatttatccattcacatgttgatgtatatttagtttgtccagcttttcattcttataagcaaccctcaatgtgcatgcttatttatatttctttgctcacataaaagtgtttctttagaagagggattggtagcctgagggtacagcatcttcacctttactagagatagtcaaattggttttcaaagaagttaaaccaatttaaactcctatcatcagaacatggatatgtttttattttccatatacttaaataatactcgttataatcagacttttagatttttgtttatttgaagagtataaaatggttcctagatttgttatttattacggcataacaaattttcccaaaatgtaatgacttaaaacgaaacatttatcttacagtttctgtggattacgattccaggcttggcctaaatacatatgtctgcctcaggttctttcatacactgcaattaaggtgttagctggggctaggctcttgtctgaaggttctgttgggggagattcacccaggcttactcgtgtgttattaccaggattcagtctctaatgcctgttataccgagggtctcagattctcattggctattggaaaggggcctccctcagttctttgccacaagcaccattctatagggcagctgacaatatggcagttggtttcattcaaagcaagcaagagagttagaaagcatgagcaagagaatagtcacagccttttggtaaccttacctcagaaaaagatgtctcaatactgttttttatattttattcattagcagcaagttactaggtccatccacatacaaggggctggagtttcataggagcatgaataccagggagtgggtatcatctaaagccatcttagaagctgcctaccaatgtatttcattgtatcactgtcacatttttctaactattaattggacatcttttcatatgtttttagcattaagattcctgttttatgaattaattacctattgatatttttctacttttctgttgaataatgtttgttttattcttaatatgtagatattctttgagtgttctgaatactaatttttgttagttttataagttggagcccattcattcttcagccaacttgaatttgatatactttctctcccatttcttctatccgcattgacaaaaccactcctgttaggtcatcattgattttcatattgtcaaattcgatgaatgcttttcgagcccatcttaattgacttgttggcaacattcaatatagatgaatagtttcattcatcattaaaacatacattttttttgtttcaactctatgtcagatatactatttgtttctttctttcctgacagtatcgtatattggtttttcccttatattatggctatttgacagactctttagttggtatttctacctctacttcacctcaaaatgtctatattcattaagattatagctgatattcttttcctactgattttgtttgttttcatagataaacattgattatgatgccaataatactcaggtttatattccttcaactgtatcaccaatcttctattaatacataatgtgttcacttggatttctcacaaacctctcaaactttatgggcctaagtctgaaattttgaatatccttattcctcagttgtctgaaggtcacagataccatcttctctcatccagtggtaatattggaaaactaggaaatatctattacatccccttgtccctataaatatcaagtcctatatataccatctactcaaacctcttgcattcatatatacctctctgtctctacagctgtcagcttagccaagctatctgcttctttccccaaggctaggttatggtatcccatttccattttgcttatgtttcctaatgcttttaagaaaaagaaaaatatggctaggtgcagtggctcatgcctgtaatgccagcactttgggaggccaaggcgggcggatcacccgaggtcaggagtttgagaccagcctgaacaacatggagaaaccccttctctactaaaaatacaaaattaacggggcatggtggcgcatgcctgtaatcccagctactagggaggctgaggcaggagaatcgcttgaacccaagaggtggagtttgcggtgaaacgagattgtgccattgcagtccagcatgggcaacagagcgaaattccatctcaaaaaaaaatatatatatacatataaaactcacatcaagtgtttttaatgtaaaaataatggcataactcccctgtaataatgttcccaaagatttctatagtactttgaataagattttcaatcttcagtgatagaatttcaatgacaaactttgcacaatatggtttaacataattttcttgcctaatcagtttcctgcctctgtttcccttcacttcatttctctaaccaccctgggttcctctttttctgtaaaattccaaatgactttcaggctcaattttttgaaacaaatttcattgttcatgaagaaattttctcccattttcctgtggaatttgtattcgttcttcaggtatcagttgaaatgttacttctttaagaaattatttctttctcttccagccgggactaaatagtctagagtctatttctataacattatttggtttccttcataagagttatcacaattgtaattatataataatctatagttattttgcaattattttagttaatatctgcatcatccacagactatagttatataaaaacagaactcatatctctagtagttttgcatctctaaattctagaatattgcttggcccatagttggcacttaattaatatttattcagtaaattgctgaatctactgcaagttctatcttcacaggagcttttaatcccatcggtacagaattaaagagaaatacaaaattgaaaactaaaatgtgagccacagtcattaagaatactctaagggaaagtttcataacctcgctagccatccatttcctcattattaaatgaagggtttaacctagatcaagtccaagatcatttgcacctctaaaattaaacaattctaactgctggctcaggaagaaagaaaaatcaatgtgctccaagaactgaaggaaaatttcatgaagaaacttttgatgataaaagctataattaatggggaagaaatggaaattaacataggtattctgagatggtgagatcaaccagatgcctgaagtgaaggactattttggattttagtgggagagatgatttacatggagctattctcgaaggcacctataaaagaggacaagggtttggaattgattagaggccacaagacattgtaggatttggaacaatggtcaacatgactgtgcattatttttaaaatgaaattattttctataaacatgtattgatttttgactacgtaatggtcactgcttggcactggggatacaaacatgaatcagacatgattcctgcctctgtgtccctcaaaatagtggggtggcagtccaaaaaaatgaataatataatatcacattacaaaaacaatgtgtcaaagaagaaaagatataacaactaaaaatacaatccattcataagtattttataataaaaggaagttttatatggtggaaacatcatctttaacgtacatatcctttgaagaagcaagaccacctctaagaatgtagccatttttgggagatgtgggtgtaaacttcaaatcattaataatcttgctaactttatcttttgatagaagctctccaagcctcagtttctttatatgttcaaaactaaaataaaaaattggtgtaaagattagagacataaaattacaaacgttggaaacagatcactatacaaatggaatctcagaatataattaaagtgaatcagtgaagaaattgtttaaaatttaatcaaggatgtaagaattgctttctcattcttgaaaaaatactcagattcctaacttctactaaaacagtgcatatacatatatatatatatataccaaataaatttaaaataattagaagctaggatttgaatacttactatgagtcaggaatttttaagtatactacatgtattaactcatttaaaccttacaaaatccctatagggtaggtactgtcattatcctcattttaaatgcaaaatactaaggcactgagacattaagtagttttcccaaggtgatcaagattattaaaattaaaacctgatgcctctggactatgaacatgacctcttactactatgttctatggcctatataaaattgtattgaaattttacaaagattgggttaaagatacaatcttagcaatagtatgtgagaattatttttgtaactttaagctgggaaaaaagaaaactctctaaagcaagaagccaagctacaaaataaaagtttaaagatgtgatttccaaaaacttttaacaagtattttattaggaaaggtactttaaatataataaaacaaaaatttaagaatggaaagaaatgtttgcagtgcatttagtgtacaatgtcttaatattattaatatacaaagagtttccacaaatcaataagaacacaaatttctttaagaaaataatagggcaaaatataagaacaacaattcatgaaaaataaaaacaaaagtttctaaacatatttaagtatgctcagtcataagtgagtgaaaatacaaatcaaaacaaaaagttaccaacagaaacaaaatgttaatagtagccagcgtttttgaggacactaacatagattattcatgtgtttataaattgccccatgctttcaaaaaaaagcaatttctagtatctgtcaaaatgtctaatgtacatgtcctttgataaagcaaattcttttctagaaatctacccgttgcaatgcagtgattaagaactttggtttcagaaatatctggatacaattccctgcgattccatttttatatgtgtacccttgaagttcttcacttttataaggctgaaattactcatttgaaaacaagatagcaataggaaaatggcttcacagggttattctgtagattaaatgaaaccatgcacgtgaagcaattagcacattttaggagttgataaacattaaatagtatgattattattaattataacatagatatgtttccagtgtgaaggaatagctttatgagaatgtttattatattctaataacttatagtattgaatacaatcttggaatcactgcaattatctttgtacaattgtggcaaataaattggtcttaagaagacaagagatgggaaaacgttgctctgtgtgactaatgtcacatatgcaatgggtgaagattcagaaaatcagtattggtcaacaggcaagtcttaaaatgattattaacagatatatttaatgctttagaaaaattcaataaacatcagagaccaattcaaattcataaagaaaaagtcaaatcttctctctaaatgaaaaatgggttgatattttaaaacattgtatattttattttagagaaccatataacatgtcccatgttaatgtataagattatggaatatgattaggtaattgtgtgctatggagactcagatgtgctattaacaatggagggaatggatttaaacttatggcagttagtttgaatgccaacctgaatgaaatgtgctttggattgaccaaagcttctgcatttgctacattctgcttcatattttcatcacagttagaggagggattaagggtattatttttaaatttgcagctctcacaaaattgcttcagtcgtcccatataccccataaatatatacacctactctgtactcatagtgattaaaaattttaaaaaaaatcattgcagtggacaatttaggtagatgatgtaatatagatttgaaatgatctatggcactacattagaatcaacaaaatattatttaacaaagagaactttttgtaaattgcttaaagttcaaaatataaattgcacaattatagaagttcatctaaaaaactattattatagacaataatatggccccaaattgttatacaaccgtgaaaaaatgttctcacattgttttaccagtgtatggctctttacagtgtttgattattacattctactttggacagcacattttaagagaaacttgatgtattgaaatatgtccagaggatgtatgaaaatgatacagatttgagagttggaggagctaggaatgtttccctagcaaaagggaaattgagggaagacacaagtctattcaaacatttgaagatttttcttgtagagtaggagacaaaattgctatacctagcttagagggcagctgagagctgcaaggaggtgaaattcatttcagaacagactttctcacatttagaggtattcaacattgcagtaaaggttttttagtattaaaatcctcatagctagaagtacttaagtaaacagtaggacaactgctttcaggattgtggaagagactctgtttatagggaagaatggattaaattacttctaagatttctttttagaaaaggaaaatggtaaaatggaaagaatgccaatcttgaaggcagaagacttccaggtcagacttactctaacacttatctgtgttttaaggaactttaacttacagtgatataggcgactgtttttagggtaggggaatgtgttaatgatacccataggagacttctgagtacaagtctgtaaaaccagggcttggtagagtggcacagtaggactgtcctcaacctgaatgagaaaaggaattcagagactggaaaccttcatgatgaacacaaattattccactgtcatgtctccggttgcattggtttaaagttctattcatctctcattagataagtattagatgttttgtaattttttacagtgcatcataggataacaggaacaaaaagaaagttgcgatttaatttactttcacatttcaggcatcatgtgtgttgtttttatgcatttttccctagtcattccacaggttaagcttctctgtagaacattgtgcaggcttcccagatttagaaaaaatagaattgatgtgctgactcacaatgtttttgcaaaccagattacataaatctaggtatagcaaacttttcatgacacccaaacattataagttcagtcctgcaatcacaaaggatttgttttgtgtgactttgtaacctccgtttcaggaaggagctctgaagactagaaatagcatagaatagactaaatttgaactagaagtacctccatctatctcctgatgaccttcttccctttgtgaacactctggattactgcacaatgccctgggaccctcaagctctcccactaaatcaaaaatgctactgggtgcttactgtgatgaggagcgcaactcttcctcaaatgaagtgccttgttgtctctttcctttcttcaaggaaactctagccattattatctagttgtctgtagtagaagctgcctgagatcttgaaacacttggaaccttgaaaattgggagttaatctattagtattttctaaaagcctcctacccttccagatgaggttaggtccttgctcagtatatcctcccaccctatacttttcttttttagcacttaatcactgctagatttcattaattgtttatatcaacatattttcctaatatctgcctccctggatatagagagtgttttgtggagacagacaccctgttggtctggttcagtgctaaacctccaagacatattccagtgcctggcatataagagatacaggagatcttcagtgagtatttactgaatgaataaatagcattttgtttgtgaaaaaaaaaaaaagtttgatgggttaagaaaggatttgtatgtttgctgatagcattcatttatgtatatgttttttgattacctattttctgccagataatgtactagatgataggttcacaaaattgagtaagtctttgcttccacctactctgagtgatggtttaaggtcagagttagcatcagaaaaaaatctagaagaatgcaatggtatgttgatgttaattagttgtaccttattgccctttctccaactctcacactaccaacacccaatccccacccttagccattgtcaggtataaacacaccccagtattcttgccttggataaggataactccaggcttaacttacatttcagagttcccctgcggaatcaggctggccccaccctctgcagactccacctgagttccatccttgcttggcgttttccccttccctactttgcctccttcactccctggctgccacctaagggaaaacttcctcaattaaacattcgcacatgaactcccatctcatgatttgcttctagagaatctgaccttagattatctttttctagccgtatttgcaatatcttactattctgttctcagttgctctggaatcagcagttatgaataaaatctttgcttctcaaggattattttaattcaagaactagattcacctttgaaatccttacctcactaattgtaatttaatccctttaaatcccaaatatttctatatgcactagtctttgcaaaattagattagagtctaccaaaattcatcttctctgaaatgaaaagatgtcaatcttttctgggaacaaaggctgaactaaccacagcacatgataccattatatattagtttttatctaattcagataccttttatgagtccaattatgaatagatttggaaagtaataattttgaagaaatatgaaattgtaccactccagatgttctcagacagagttttaagcagaatatggcaaatttgtaaatctgtgacaataataaataactcattaggactgaactgacaaacttcacaattattctcagttgagaactaagtgccaaaagttccaaagttaaggatttattttttatttcactgcacagataagctgtactttccattggaaaatatttattgttttaatatgtctacaacaaccactgattttaccagataagtctgttcttcacccaaaatgtgaaattcataccagcctgtcacattgttagactagatattaacattccgtacatcatatgcttctgatccaacatatctggccctcctcaaacccctacagtcatccccttgcccatagcctaagtcaagtgaaaatgatcctgtctgtggcatggaattttataaaattcttccttcaatccacttacctaattttcttcctaattataaagaagtttatacatttttaaaaataaagtgttatttttatacacagttaatatgtgatattaaagcatcatttgctcatttattgatagattcgataacaaatattctttgagcacctacttggttccagggattgtgctatgtggtgggctaaagagatgaattagacactaaagccctcaaggagctcaaattctaatgaagaggctgaggggtataaaaaacacaaagcctaaatcagaaaaaaataaaaatgtgtgcagtctacaggtctgttatttattcattgaaaataaatacattgaggttttttcacttcgtttattaatgctgctcaacaaaagaatgatggctgggcgcagtggctcatgcctgtaatcccagcactttgggatgcctaggtgggcagatcatgaggtcaggagttcgagaccagcctgaccaacatggtgaaaccccgtctgtactaaaaatacaaaaattagccaggcatggtggcacgtgcctgtaatcccagctactcaggaggctgaggcaagagaatcgcttgagtctgggagacagaggttgcagtgagccaagatcgcaccattgcactccagcctggaagacagagtgagactctgtatgcccccacccacccgcccccgccaaaaaaggcaatgaaaacatgacattttttaatacaatagaagtatgtaggatataatgcagaagtagcaaacttgaaatagcttaccctccttcctctgggaatttgttctcaggctttattgttaagtttggcctgactgtcactgtgcaaataaataattgcaatgaaaggtagcaagtcttacagggtgggcagaaatagagtgcaccgaagaccaaaagacagtagaacaccttccctgcctagaggcaggcttcccagaggaaggttttgatctgggacttgcagtgcatgagttttgtagggaagccataacaaagcaccatagtctgggtggcttaaacaatagaaatttattttctaggatttctgggggctagatatcagagactaaggtgttgtcagggttggtttcttctgaggcctttctctttggtatataggtggcagtctttgctttgtcttcgctttgtcttcacatggtgttccctctgtgtatctgtttactaatctcttttatagacaccagtcatattgaattagggcacaacctagtgaccccatttaattttaatgacctcttcaaagcccctatctccaaatatagtcatattctgaggttcttcaaagcccccatctccaaatatagtcatattctgaggttcttggggttagaacttgaatatatgaattttgggagaacacaaactaactcagaacatttatgatattaaaacagcagagttccttgacccccatcacaagggtattgtgacgtgccacaggggtattgctcatctgtttggttgctgcatgctcaaaccccttatgagatggggagcatgcagacgggcaggtgtaggagccaggacaagcacttttggactctggcccaatggtagcatctacaggtggatgcctgcaactcccaaagccccagtaggcttgttacagtgttcctttagctctgctgtccacagatgagttaagtgttaaccagctcagtgccttcttggtacctgaccttgtccatcttccaggaagaatcagattatacatggacttgaaggatggtgaatgcaggggttttgtgagtggtggagaaggctctcagtgagatggacagggagctggaaagaggatagagtgggaagatgatcttcctctggagtttggccatcccacagccattggactgtccacagtcacactcctctcgatgttcagacattccttctcttcactcctctctgccacgctgactttctgttcctcttctcttctgctcatctgccatggatcctgggatttgaagtttatatggatataggataggggggtgtggtgggccaaaaggcaacatttggccacaaaaacaggaatgcctgttcccatttaggacctgttcccattccaggcttgagggtggggcctttgctggagaaccaccatcctctacccagtatttccctgtctcctgtccgtatcaatataaatataaaattaaaagctagaagaggggtgaggacattccaagaggtgtcacagactgtgcaaaggtaagggaaatgaaatggtttgtatatttagaaatgctgagtattgaaggctgatggaacctagaaatggagctaagttgtcttttccataagagcctttgagtctgattgcttattggaaatgggtgccatgcttcatagctacaatttcaaccacattctatactagggacttgacatacacatgtaatctctaatataataactcttggttatgtattattatgtaaaagcatgtattactttcttcttaattaaaggaggaaatgaaggctcagatgggttatcttattcacatgttaatttacctattcatccatccattctttctataaatattcactagatgcctcccatgtgcaggtactagatgctggtgattagggagggaaacataggtataccctatcctcagagagcttagactctagagcaaaaacctgatattaaataactaacttaccaaaatgtgatgtgtaatgaagaggtagtagagttttctgtgcatagaaagagaagagtgaatccaagtaagagtaaaactgatattagaacatatatggtctaaagctggtttcctggtctaaagctttatttccttttataatgctgtgctaccccagttaccacaagcaatgtttttcaaaaagtggagtgctttcttctgaaggtccaggagtatctttggggagtacaggacaaagcttgtttttaaagatggatgtattcaatttaatgtctattttttgtcaagtgatattgttttccatttatggaagtggtatattttcttttaaatatacgtatatttaagcaagcatagtggtctgatttagagaaacatacctaataaacaacaatgcaagaatacagtgggtatgggggaaatcctaattgaaatttgaaggtttttttctggttatgccagttctgcagatgctcttgttattttcattctgattattacttgttccagattcctaaaatggaacctctagtattgacccactaagcatttggtaagtacagtacggtagctcattaaaatgtaaattgggttaagtgcttcagaaacatacaggagaatatgtaaataatgaagaacaatgagaagccggctctttccctcaggaactttgcctctctaatagtttgaaccttatccatagtcatgaatctagctaggaaacactcagttaaaaaaaaaaatctagaaataaagcaaatgagctgagggcagcagtgcaaaacttcaaatgacatcaagcaataagaaaaacatccagtaatgctcttgtgtttaatgaagaaaactgtaccaaggttaaatggtttccatgtttaccctcaattgtatcatgtggcacattaacatgtttctcctagagtttgtcctgctggagacgtatacataacagctagatcagttcaagagacagaaacctgactatgagtagaggaagtaaaaggggcagtagagctctctccactggtttcagaaaaacatctccagcaaggatctggttgggttacagacttgtatctggaccattccctgagaccagggatagatttttctcagcctgaatcatccatagcataggcaagatgaaagactttagtagaaggtaatggaggtatattggtagattaaaagaagaggtaatgtggagaaatcagtatgtaaagtaaacttgaaaggatgtacctaggaagctgaggagggagaattccttgaactcaattgtttgagtccagcctggcaacataaccagacctgtctcttaaacaaacaaacaaacatggaacagccaggcaaaaaatgggatttgattgccaccatgagataaggctttacatttacctgcttgtattgtaatctagccccaccctgcttctcacactgattttcttcaggtgatacaagataacattgttgcctacaatgagcttgtctaagaagtcagtctatttgaactttccacagaattggacaccaattgtctcctcttttatgaaatacactccttagtccagggaaacaatattttattattttattttataagttctggggtacatgtgcagaatgtgcaggtttgttacatatgtaaatgtgtgccatggtggtttgctgcatctattagcccatcacctaggtattaagcccagcatgcattagctatttatgctaatgctctttctcccactgccaccacccctgcccccaacaggcccccatgtgtgttgttcccctccctatgtccatgtgtcgttctcattgtttagctcccacttataagtgagaacatgctggctagtcacatgtagaaatggcagaaaatcaagtgtttggttttctgtacctagtttgtttgctgaggataatggcttctagctccatttatgtccctgaaaaggatatgatctcattcctttttatgtctgcatagtattccatggtatatatgtaccacattttttaatccagtctatcattgatgcgcatttgcgttgattccatgtctttgctatcgtgaatagtgctacaatgaacatatgaatgcatgtatctttaaaacagaatgatttatattcctttgggcatataaatcagcaatgggattgctgggtcaaatggtatttctggttccaggtctttggggaaccgccacactgtcttccacaatgattgaattaatttacattcccaacagtgtaaaagtgttccaacttctccacagactcaccagcatctattatttcttgactttgtaacaatagccattatgactggcacgagatgggatctcattgtggttttgatttgcatttctctaattatcagtgatgttgagctttatttcatgtttattggctgcatgtatgtcttcttttgagatttgtctgttcatgtcctttgaccacattttaatagggtgtttttttttcttatgaatttgcttaaattccttgtaggttctgaatattagacctttgtcagtaggaaagtggtctagtttcagttttctgcatgtggctagccagttctccctgcaccatttattaaatagggaatcctttccccattgcttgtttctgtcaggtttgttaaagattagatggttgtagatgtgcagtcttatttctgtgttctctgttctgttccattggcttatatgtctgtttttgtaccagtaccatgctgttttggttattgtagacttgtagtatattttgaagttgggtagtgtgatacctccagctttgttcttttggcttaggatttcttgggcagacaggctcttttttggttccatatcaattttaaagtactttttttgtccaattctgtgaggatgtcaatggtagtttaatggaaatagcattgaatctgtaaatcactttgagcagtgtggccattttcacaacattgatttgtcctatccatgagcatggagtgtttttccatgttttttttcctatctgatttccttgagcactggtttgtggttcttcttgaagaagtccttcgcttcctttgttagctgtattcctaggtattttattctctttgcagcaattgtgaatagttcatttatggtttggttctctgcctgtctattgttggtgtattggaatgcttgtgacttttgcacattgattttgtatcctgagactttgctgaagttgctaatcagctaaagaagctcttggactgagatgatgggattttctagatataggatcatgtcatctgcaaacagacacaggctgaattcctctcttcctatttgagtaccctttatttctttctcttgtctgattgccctggccggaacttctaatactatgttgaataagagtggtcagagagggcatccttgtgttctgctggttttcaaggggaatgcttccagcttttgcctgttataaatcttattattttgagttatgttccatcaatacctagtttattgcgagtttttaacatgaagggacattgaattttatcaaaggccttttctgggtctaatgagataattacgtggttttagtcttgagttctgtttacgtgatgaattacttttattgatttgtgtatgttgaaccagccttgcatcccttgatgctgacttgatcgagcagggaagctttttgatgtgctgctggatttggtttgccagtattttatggacgatttttgcatcgatgttcatcagggataatagcctgaagttttgtgtttttgttttttttttttttttgatgtatctctgcaaggttttggtattaggatgataccttaattaaagcagatgatatctgtcttaatttcattatttacccatgaaatgaattagggaggagtcccttcttttcagttggtttgaatagtttcagaagaaatggtaccaactcctctatgtacctctggtagaattcatctgaaaatgtatctagtcctgggcttttcttgtttagtaggctatttcttactgcctcaatttcagaacttgtaattgatctattcagggattcaacttcttcctggttctgtcgtgggagggcgcattgtccagaaatgtatccatttcttctagattttctagttgatgtgcatagaggtgtttatagtattctctgacggttgtttatatttatgtggggtcagtggtgatattctcgttatcacttctgattgtgtctatcggattcttctccattttcttctttattagtctagctagtggtctattttgttaatttttttttttacaaaaccagctcctggattcattgatttttttttaagggttttctgtgtctctatctcctttagttctgttctgatcttggttatttcttgtcttcttctagctttgcggcttgtttgctcttggttctctaattcttttagttgtaatgttaggatgtttacttgagatctttctagcattttgatgggggcattaatgccataaatttccctcttaacactgctttagctgcatcccagatattctggtatgttgtctctttgttctcattggtttcaaagaacaacttgatttctgccttaatttcgttatttacccaggagtcattcaggagcaggttgttcaatttccatgtagttgtgtggttttgagtaagtgtcttaatcctgagttttaatttgattgcactgtggtctaagagactgttattatttctttttttttatttattttttttgcatttgctgaagagtgttttacttccaatgatgtgaacaattttggagtaagtgtcatgcggcaccaagaacaatgtatattctgttgttttggggtgaagagttctgtatatatctattaggtccacttgatcgagaggtgagttcaagtcctgaatatctttgttaattttgtctcaataatctgtctaatattgacagtggggtgttaaagtctctcactattattgtgtgggagtctaagtctctttataggtctctaagaactcattttatgaatctcggtgctcctgtatggggtgaatatatatgtaggatagttagctcttcctgttgaattgagccctttactgttaggtaatgccctttttgtcttttttgatctctgttggtttaaagtttgttttgtcagaaactaggattgcagcttgtgcttttttctgctttccatttgcttgatacattttcctccatccctttattttgaccctctgtttgtctttgcccatgagctgggtctcttggacacagcactttgatgggtcttgactctttatgcagcttgtcattctgtgtcttttaattggagcatttagcccatttacatttaaggttaatattgtcatgtgtaatttgatcctgtcatcatgacattagctagttattttgcagacttgttgatgtagttgcttcatagtgttattggtctttgtacttcagtgtgtttttatagtggctggtaacatgctttccttttcatatttagtgcttccttcaggagttcttgcaaggtaggcctggtggtgatgaattccttcagcatttgcttgtctgaaaagtatttaatttctcctttgcttatgaagcttagtttggccagatatgaatttctcgattggaaattcctttctttaagaatgtctaaaattggcccctaatctcttctgccttgtagggtttctgctgagagctccactgttattctgacagactttcctttgtacgtgacctggcctttctctctggctgcccttaacattttttccttcatttcaatcttggagaaattgatgattatgtgtcttggagttgctcttctcatggagtttcttactggggttctctggattttctgaatttgaatgttggcctgtcttgctagattggggaagatctcctgggtgatatcctgaagtaagttttccaacttggtttcattctccccatctcgttcaggtaccccagtcaactgtaggctctgtctttttacataactccatagttcttgcaggttttgttctttccctttcattcttttttctgtaatcttgtctgcttgtcttatttcagcaagacaatcttcaagctctgaaattctttcctccatttggtcttttcagctcttgatacttgtggttgcattgtgaagttctcgtgttgtgtttttcaagtccatcaggtcatttatgtttctttctaaactggctattctggttaacagctcctgtaatgttttatcatggttcttaccttctttgcattgggttagagcatgctcctttagctcagtgaagttcggtattacctaccttctgaaggctacttctgcaaatttatccatctcagcctcagcccaatccggtgccattgctggagaggtgttgtgatcatttggaggagaagaggcactctggctttttgagttttcagcatttttttcgtggattccttttcgtcttcttgagtttatctagcttcgatctttgaggctgctgacctttggatggggtttttgtgggaacattttgttgatgctgttgttgttgctttctgtttgtttgtttcttttaacagtcaggtccctcttccatcgggctgctgcagtttgctggtggtccccgactccagatcctattttcctggttccctcctgcacctggaggtgtcaccagtggaggctgcagaacagcaaagatggctgcctgattcttcctctgggagcttgtaccagagaggtaccgacctgatgccgatgggaacactcctgtacaaggtgtctggtgattgggggtctcacccagtcaggaggcacgagatcagggacccacttaacaaaacgcgctgggtgctcattggtggaaggtgtgcactgcgctgcagggatttctacttatctggacggcccggatttttcagagccagcaggggaaagactaagtctgctgatccgtggagaccacggcagcccatttccacagggactccgtcccagagagatcagagttctgtccataaaactctggctggagttgctgaaattcttgcagggaggcccttcccagtgagaagggatggatccaggtccagactaaagaggtagtctggccacaatctgccacagctgctgtggtacaccctggggaattcttcctgggtccaaactgcccagtttccgcggcaccagcgggggggaactgccagactggagctgtagtgatggctgccgccccactccctgagaactcagtagtcttgtgcagtctccagccaggcggccactgagaatctacacagctctgtgcttggaacccaaggtcctagtggcatgggctcatgaggagatctgctccacgggttgcacaaatccatggaaaaagcatggcttcccgggcagggtagcatggtcactcaccgcctcccttggctgggggtgggagctccccttgttccggctcccaggtgggctgtcgctccaccctgcttttcctcactctctgtgggtcacgccaaccacttagtcaatcccagcaagagaacctggatacctcagttgctggtgtaggattcactctccattctcccttcttcttggtgggagactccgactgcagctgtctctcgttggcccttttggcccctctctgccagggaaacattcttaatgggattttctcctttgtcaatcccttctggtctcttctgctaatttatcttctatgcctttaccccttaaatattaatttcctcctgggacctgttttcaatgcttttattttctcatttatcactctcccttagtgataatacaactgaaaccagaattatggctgacttttatgatttttgttatagtgttttgagtgcttcctgtatgagagatactgtaataagcaaaagaaactcagaaaggtaaattgatcccttctattcttggctttaatttctacctgcatgataatgactctcaaatatatgcctcatagatctagtcggccacagttacatatccaaggaaggagtatgccattctcccaggtcgtccacttcagactcaagctccccaaaccagacccacccaaaacctgctttgactctgtatttcttgcctcagtaaccaccagtatcatctgcttggtcatatgcagcataagtcattgttgattgtttccttttcttcactgactacagtacattgagtctaactgcaaaatgttgtcttctatttttattcccactgcttttgtgccaataaagacacaaccccatgactgttttataaataaagttttattggaaaatagctgtactcactcatttacatattttctgtggctgttttcatgatacaatggcagagctgactgtttgcaacagagaccttatgaccagaaaaacctaaaatatttactgattcgctatttgcagaaaaaattttgccgatgcctgctctcgcataaatagtcatatggcctggtacagtggcttatgctgtaattttagcactttgggaggccgaggtgaaaggactgtttgagctcggaagttcgagacaagcctgggcaacacagggagaccccatctctcaaaaaacaaacaaaattagtcgggtatagtggtgcctgcctatagtcccagctactcagtatgctgaggtaggaggattgcttgggccctggaggtcaaggatgcagtgagccatgatcacacagctgcattccagcctgagcaacagagcgagaccctgcctaaaataaaatataaaaataaaaatcttaatctcttctttggacccatgtagtgatgccttatttttgtctctcagtgtcccttcacccaggttccaattcatcttttatatccaccaccatttatagttgcaaaactcaatctttgccatgttatagcccccttttaaaaacaaacaatgataagattttgatgaatgtaaatggcccagatgaaaaatgtgaatcccagtattatttatgcattgctgcataacaaaatactctaaaatttagtgactttgtggattgactgggcagttcttgtgctattctcatgcagcgggagttgtatagctgcattcacccgacaggtaagatgaaaaatagttcagctgggatgttgggatggctgggtccccatcctcaaggctagtgtctctcagggacaacaaggagacctgggctgccttttagggaacacatgcctttcttagctccccaactcccaactttatccttgttccattatgttacctacttagctcttgtaagcactggaattagcaagccctgaaatgtgtaaatttcatttgtggtttgaaataaactaactcctgtggagatattaacattaacatattctctaatgttgaaatgctgtcagatacaattcctgtaccagtttattattgtctctatgtggtgtgtataggatatcagaacttctagctgaaagctacttgttgatctccttgaaagtttttttcttttaccttttcctctcatccccctcaataatttttttcctttaaatgatacctattacaatttcttccctatgaaatgagataatttgactatctgcttgagtctgatgtaaaaatagaatcacaccagaggaaataaattagcatttggcaaggatacattttcatttgtggtactgtatttaaggcagttgctaggtgggtttgtggatgatggaacattctagaacttcgtttaaacctttttcaattaatagaaaggatgggagcagaaggcaaaatgaatgtatgtttcagcgtatgtggaatgctgatttgaataaaggaggatgttttacttaacaaaagattatttcagaaaggcaatacatagaaagttacagtacctataaaactatagattgatcaactgtcaatgacaacataaacacaatcacacagatacacacatcccagataattcctacattcaccaaaaataacactactgttggacagcctgcaaggatatccaagttggactcagatatgtctttaaaatttggcctttattgcatctcaaatcaattagttagaaattacaaaaaagagaaatgtataattgaaacaatgatgacaggctttcacttacaatagtgtgaactcaacagaggcccttgaaattcagttaatttaaattctaatagatcatcatacctatagaatataattcatttaatggcaattgctattcataatagggactctttatgaaaattggatatttgagttaaactacatttatagccaagaataaaatttatttgatccgtaagaaagacttcatcaagaattaaatgttcagtcttgagaaatctacattagaaaatgaattatgaatcaccattcaagattgaattcattatcttgttgtgtgtaactatacatttcttttggtcatttactacactctgtaatttctagtaacttaaatacaaacattttgcattgttaactaaatacaatatctgtttcctttcagttaattatgtacacataataattttgggtctcaaagaactgtctcctaaaatcagtagaactaaaaaaaactgctttgtaaattctccttcaagctgtagttttatgtgaaggattctaagctttaagtttgttgttccaaaagagcttagaaatcctgatttggcattaaaatgtgtaatatttgtgtaaactggcttctcttacattgtcctactttatactcgtgctaaattgtatttgcttctaagcccaccttctattagcatatctttgtatgtattaaaactatgtagctaaaagtggatctatatgattatgcaacatagggccagacacatgctagatacttaaaagaggattgtctaaatggaatggctatttcatacatactttacatacatatatatgaaatgttcaaagttctcagctcatgtaaactttaatcactgagattgtcaatgcaatatgaacaattttgaaatatcatttaaaagcaaacattcatatttaaacccaatatcagacaattgtactgctttgcacacaatgcaatttgaaaattactgagagaataaaactatcatttaattagcaacgtttaaatcaataccaggtatagaaataaaaatgttctttggtttgaaacacatcctttgattatttataatatcataacctgatattcaagtttcaatattaagatacagatgtttaaacactgcccagaaagaattttattgattttttacaatacttttagaaagtagaccagagatagatgaaacatttatctttaatgtcttataagggattccttcatatgagagaaaattaaggacacctcaatgtcttccaacttgatgaacctatgatagttttaggaaagatggttgtatctgagtggcattattgtatgacaaccacatatcatagttaagaagtaccgtttaattttaagggaggcaacatggtattgtgttgaagagcctggtttctgaagttagaatgcctgacttcagttcctggctcagttctgtactagcaatgcgactttagcaagtcacataaccactttgtgtctcagtttctccattaacaaaatgggtataataattatacctatctcataagctttctataatgactaaatgagttcacctgtataaatcgcttaggacagtatctgacactcagtaagttccatggaagtgtttcatcaaaaaatgtttttttaatgctatattagtgtaaataagacccagtttcatcctcagagtggtacatttgtgtgcaaagtaatttataaatatatttcctacttggcaaagtaataactgaaacctaagagcaaagactgtataacctggagaaagtcagttaacagtcttgaactgccttatctccagcaattaaatggcaaagttattctacatgatttctcaagtaccttctgtattaaaaaagaaaaagcctatgattccataggtttattttgctatattcaagcagaatatctttatggtagcaataaccccattaatattaaaacacataaataaatcattatggtacttgataaataataaattatcaaaaatattaaatgcatattctcatgtatctttattttcttatattgtaatttacatggatagggacacctattgcatgaattaattaggtgtaaaactctgctcaactatgtgttgttttggattgtttttctagttatgcaaattggaagttttttatttagtctaataacatcagggagggctctataactcaaatacaaatttgtcttagctgtaaatatgactctcctccttccttattattctaccacacttaaaatgaagaaaggacattaagccttgtgaaagtcaggttttattttattatttagtatgaaaagcatgaatataaatccattcaaaataaaatagtgaccaaggagatcaaattttgataatgtattgaagttcctaaataagtcaactttcctcaagtcaatacttacgctcctcagtccgtccctcttcctcctccccagtttattgatacaaaagatggtaaagcaagaatagagtatttccacaaaacacttctatatttctgtaaaactattctaggttagctccaatctagcttctgtactgataaattgcaaaaactacagagtaataaaatcctcagcatttcagcattgtacacctccctaacattactgtcttatttctatcccgactgttataacaccaagacaacttatcataaatatcgctcgcagactgagacacttgattaaactcttctggctgtgtgtagatgggaacagaattaaagtagtacttctattcttaaaagagaattgtaaaagatattgtacatgtgcatcttagaaaaagttgtgacacttaaggacccctaggagtacttcaaatttgggtgcattttggtcctgggctgaagtaacagcatcttccttggccctgtggatcgagagaagagctagatacagctagaaatggaggttcttctctactaaatgtctgtggagaaaagcaagtgagaaggaagaagcaagcagatgagcaggggaagcacatgtgacagatggagagagaatttctcaggattgccagactcctccagaccctgagtctgctccagaggcccaggaacacacctgttcacagtgtcttcccaataaatttccctgttagcttcaggcagttcaagcaaggtttcagttaccattcaaccaaaggagccctaactcaggtcatatttgtcaagacagtactcccttgaaattacagtgattctatagcctccccaaattttcaacttcttgtaaaacactttacaaagggtctgatggtttatattgcaatacaaatacataatcagtttgagaaaatctcatgtgatcaaatatttcgacgtatttaccttttctcctttgcaatttaaggtctaattccaatttcctggacccactctagcttcatctttcataaaataatcacagggttttgaatacaagttcctgtcattaaatggctctaattcttagtagtgtttctattcctgcccatgagaattttggcttactttctcatgcttagaaccttctctgagaaacagtcacaataagtattcaatatccaaaaacaactctgtaattattgtaagcttcaagaatacatggtggcccaaacaattgtagcaaagattcttaagagaaagtgtgacagtgttgtagaatgtaccatttttataaaagaaaaaaaagaaaatactgtaaaccacaacttctgtaaatgtgcacctgcttctctatgcttcacatttgttgaatttttagtcctcattgattgattgatctaagcctccatcaaacacattaatatactcaggttgcttaggcaccgccatctgagtgtaatacacagccacagaatcaagattacctgatgctatgaaaaccacctcgtatagcttgaactttattctgattcacagtgtagtctcagtggttcattcctttgcaacacctgtatactagaatatgttagtggagcttccaaaatttaactaagaattgatacatctaactggatctgtagatattataggacacacatttacagtgttctattggccttgatgccaggagcactctgcctgtgttttgtgcagaattcatattagagttgttgctttcttttctatgacacgtactgatgcaatctctctggcctgggcttttcttgagccattataaattgtcagtttggttcagtctctagttcccattgaaaagcttcatcatgaactctccacacgatgatcttgcaacatgcctgctaatgaatcctctaaactacagcattgagaaaaatggcatagctctgaaaaatcagcagccatgtcctcaccaagctttgaattcaattggtggaatgtaactctcagaacaataactaatagtgctgctgtgatgtgaacttccagtaaccttacagattcatcaaatgccttatccttacctgaggcacggatgttgagagatcatgttataacatggtacacttctgattaaagccttccaagttttattatataaagtattatgaaaattaaaatatagaagcaacactcatcctcacaacccaaaataattattatcccacctacaaacacccctggtattctgggtgcagtggtccttagcatatgaaggaatcacaggaagccaactgtcaagtaagccttatatatgacaagaggtagacattcttctcttggtgtatatttcattacagattagaaggaggccatgagattcatgaagtagtggggaagtggtagattggggattggaaagtttggattctgcctgcctatgttatgatttcaaaaaaatcaagtatttctctgtatttaaactggttattttttaaaggaaataattgaacttgatggctttaaaggtttctttccttctaatgtcctgtgaatgaatcagaatgacagatagaaaaacattaacagctctgtaactcttgttatcctctctacactctgcaggctctgtcttagtatgaagcctacccatcagtctgactgagactcaagaaagcctgtcaatgttgctaaaaagacatacagaaaacattcaaaatgtttactcatactatgtcttgatttccatttatccagtcatatacaacattgttctaataaatcacattatcaaaacaaggcctgggataaataactactttctctgttagcagctccatcataaaattatctaacttaatctatgtatatatttctataagaaatagcttctgaattggatattttttctggaaccaaatttctgtttcaatatttctcttaagaaatgggagagaatcctctcaatgagaaagcgtaaaagaaaattccccaaggagggagtagtcaaaagctttataatgtcactataatgctaaatagagcttaaattgaataggaggagagatgtctccttgggacctgtatctggtaaaattgagggaagttgtgtgttatgatcagatccacctgtatttagtatatattgagaataaaactttggctaaaatataaatgagaacagagaccattttaatgctggtctattatttaaactagtttctaaatattacatattgatcttaaaacatgtaaaaatattttcaactgagatatatactttaggtgctcaaatatatttaaaatgtttaattaaccaatttccaaggagatgtccattacgaaaaattatataatcctgtactataaagtaaacctcagttaaacacttcagttacgttaagattatcatatttagcaaataaaaattcaagatacccagttagatttgaatttcagataagcaataaagaaagtttaatatgtctcatgcatttattatcattattattttttaatgacagaatctccctctgtcacccaggctggagtgcaatggcacgatctctgctcactgcaacctccacctcccgggctcaagcaattcttgtgcctcagcctcctgagtagttggtattacaggcatgcaccaccaacacctggccaatttttgtatttttagtagagatggggtttcaccatgtcggccaggctgatcttggactaccgacctcaagtgatctgcctgcctccgcctcccaaagtcctgggattacaggcgtaaaccaccgtgcctggcccatttttaaaatacttttatgctaaaaatgattcattatttatctgagattcatatttaactaagtgttctgttattttgtctggcaatccttgctacatgtttacagacttttttcattttacttttatagatatatataaacctgtggagttatgcattagtttggacactagttacagtagacataatattgagaaatagaaccatatacattggaataaaacccaataaattaaataaacaaagatactttggttttgacaagagaaattgttggaaataatgttttacaaggttgaccaatctcactttagcttcctttctccattgtaaagtccggcatggataagatttgaacgattaatattatttaaatgtatactcaatggctgttgaaggtgcctacctcttaaacaatgttcagactaatgatgacagcaatagacatccgtgtagttggaatgtggaggaaaaatgaacaaacatatcaagaaatagtctcttaaactataaattaagtagaatgagagatatttaagataaattcgggattagtgggaaaacagcacaaatctaaaagatattgagggttatattctatagcctggttttcaaatgggctttttttcaaactgattcactagatgtttttcttcatttcggtgtgcttcccacaacttcattgtattcttcaaatatgttctaacatcaaatgttctttttgcactacgttctcattaatttccgagtcagaggaatgtaaagggctcctgcaattgaaataaaaatctgtttttctggctttcacccttgcctcttccctatcctaatccattttgagtggcagccatggtaatgtttgaaaaactcaaatgtaatcaggtcagtgtatttcttaaaagcccctcaaagctttcctttgttcttaggctgaaatggaaaggtttaacatacctcaactcaactggctctgctgcctctcttgattcctcagccatacctctcccatttctccttcccctccactccatgttccactctaactctctagaaaaaccatactcacaaagaagtaggctaaatcatatcaattccccacatctgttttagattaactatagaacctcaacttagagtgaaagggacagggttatatacatgattcttcctcttttaccctgacactatatctttcatattgacattcctctttgctctgtcacccaggctggagtgcattggcacaatcttggctgactgcaacctccgcctcctggattcaggcaattctcctgcctcagccccccaactagctgggattacaggcacatgccaccatgccgcgctaacttttatatttttagtagagacagggtttcaccatgttgcccaggctggtctcaaactcctgacctcagatgatccatctgcttcggcctcccaaaaagctggaatcacaggcactagccactgctcctggccccaactggtttttaaagcttagattggttacctagttattttgtctcctacttactttaatattcattttcttggactgttcttcaattcaggttaaattttctggtcaactttctggcaaagagtttgtcaggcaatagtttgacaatagggtatcatttttaaaagtaaagtgatgaatatgaaggttaaaatgtaaacaaaattaatgaaataaggtttcttatcacaattagaggtattggaattacataggcatgtttacgcctgttccactgagctagctatggaagtagaatggagaaatagtcttatacacacaatttcaggtaaagagacatcaatacaacttaagacatcttgagcatttttcaacttaagatatcttgagcatttttcttaataaaacttaagatagcttgagcatttttcttaataaagtttaagcatctaagaaagggataataaggtatggtaaatgggttatttttatggtaagaagagaatattgccatttcacactttacttcttggttttgaatttgctaagaacaatgggattttcaaagtttggtcctataccatgatgaaagacaccatgatgccttctgctgcttcatcttcagaaatcccccgctcagaatactctcaacctccctcacagcctgtccttatcttaccaggctcccatgtgtccaaaagataaccctgcaaacttagtcctcatttcaatttggaaagctatcagtgacctgcagtttgtgtcatgaattaacctaggaatgtgtcccagctgaacacaaccctccttgaggaatgaattagaattttagcctaccctgtcttctctattaattatcacatctggaggcttcatctgcctaaactaagttccctgtgttgcttcatagtggtcagatttcctttgtcaaataactattaaaattatgaagaaactaattaaatgctataagcagaattgtgtagagtaagaaacaatttcaggcagatccagtccctgacttcaattcaggcatgaccagaatggattcaaagagccagaacacatccgagaagggtgtcctcgaaggctttggcaattttagctgtatctgaaagtttctcctccattcagctcccactaacagattaatctctgtctttcacacctacctgttcactcctaatatcttcataaacacattcattcatgatttcacctgacaaacatttactgaacatattctatgtgctatggattatactaggcattggtaatacaaaaatagctagatatgatccctgacctcaagaaactcacagaatgaaataggaaacaaatatacaaagaaataagatgccaatttgtattgctgtgataaatgtctgaacagtagagtgtaggaatagaaaagagagaaaagtccatttctcctgggaaaaggaggggaattagaaaaggattcatgggagagatgatacttgtacttgaaagacaggtagtctgctgctggtagagagatgggaatgaaggattactatagatagtgctataaaaccaataaggcaataattttatgttttttctaatcaatgaaagaagtgaaatagtctgatactttgtgattattggactcaatgaatgttgttagcttaattaatggtggagttcagtcaagaattcaggcatcctcattgcaggtccagcctctttgtactatcccaatatgaatgtttcttcacagcacaaaactcaagatgattatgtttaatttagaagctcctgctccacaattttttttttcctgaatcacatgattcgtctcaccataacatcttccaagtgagagacaacataagaagtctcacaggatactctgccagaattccccacatttctgtatttaggcactttttaatcatttgtttaatatttctgttttatgtagattaaaaaattttttttcttattttttggttctctacacctgcctctatttattccctgggcttttcttggcatactccaaataataaactgagatggttttattatttcaattaaaattttcttaattttattgcagaattcaaactttttccctgaacaaaaatattagactgttaaaaccagtcaatgactattaaaaactactattaagctacttgtctctcttatttaaaaaaaaaaaaactagaaggttattccctgttctaaacttctcagagaaatgtagtcatgaattaatatgcttatttagaagtaaacagaacaataaataaaacaaatataaagtaaaagcttagaagatagaagttgagggtcatagtttttatgctgcattagcataaatgatgaagcatgtctattctcaaccacgataatcaagctttgtgaaaatcgtctgaagtttgtaaacaaattcaccatagaagcaatgttgctcttagtcaaggaagcccttaaactgtggaaacaaattaacccccaacactcagtgacttaaacaatagacaatttctcctggtggaaaacgcttcctctatcttatttaatcaggaacacttggcttccaaggttgctaaggcagaccagagagggctagaagtttccttggacattttactctgctaacttttacccagtagattgactagaatgccattttatggttccaatctagctgcaaaggaatgtggaaagaagaagtagtgaacacatagcattccctggctaaagcattactttgacaaggatacaaaatcagtaattttctcatattcccttcttcttctactcaggaccttcttcccccacccacaacttgaattcattattacctgaccgccataacccctttgaagtcttaccagccatagcaaggggaggaatcaaggaggaagaagaggaagaagaaacagctatattaaaatcagaatcctcattgctcttctctctatacccactgctaccatcctggcaaagctggagcttgttccccccttgactgactctagtctccacggcatgatcattcactagtgtatacctaatgacttgaaattatcttatagagatggttcttcttttgcctcatgaacaaatcaacccattttaaagccttgcttacgtttctctgattagtgaagcctccccagaattttagagctgaagaagaactacattccctattctcctgagtactacttgagctttttactgtgtaattactatttatacggttccctgcatttccatgagttttctaaataactgaattataaacttcttggtgggttgtaactagtcctagttgttgctatacacccaatgagcagcaaagtgtctggtatgtagaagatgctcccaacgtattaattaaatgaattgattaactcatcgttttacatgtattattcttttcatatcacatagcacagcactgtgtatcacaggccctcaatgagcatttgcagattgattcctctcttaaattcgagatgaaacattacccatgggaggagatgtataagttggctcttaaacaaattttatgataaattttatttcataaattaagtttacttgtaatgaattatatctctctacactatatacatttggttttcaaatgcacacatatacatacatacatttcaatacaaacatggaattctcttttaaatttgacaaaatgaatataaaagctaagatgtaactgttggaaactctaccctgattttcctttctaattatatgcaaataggaactgggagaagaaatttggggaatcttagttgacaatatttaggcaattgtgtaagatatcagcacaaacaaaacttaaatcagggtacatgacatgaagtatgtagaatgctggcagaaagtttctgagtttaaatcctgtggggttgcgtctcttataaaaattgataagaacttataattccaggcaattttcttagactgaaattcattactttttttaaatcaaaatgcactaaatcttagcaagtaaaaagctggcttgtagttatttatttatatggatgtgtgtgcctgtattctcaaaaaatacatgttttgtatttatccttgacgttgtttgaaaaactactcactctttggagagtggtgtccttgaaaccacatggtgaggccatttaagacccagtctctaaggacttatctatgaaacccatacatagtatactcagttgatcaaataattttctaatcagaattggaaaaaaaaacatgttgatgctgacttttctaggattaaatgtttggttcctgaaagattagttgttttaaatatgagattcttaaaacagtaagcctacctttggagaaatggaaagagtaatgataataaaataaacaaagtcaaaaccacccaaaaaaaaaaaaaaaaaaaaaaagccttgtcttctttggagagtgccaatgatcccatgtctgctactgactgcttttcttttcccatcaacagacaaattaagtcaccatgaggctgaggtctagggcatcctatgctgccagaatagatttcttcatatgaggcatggtgtggagtccaatcaaaaagtttgggggactttgaaggtcatctagttcatagctatctactttctccattcccaacaataaattcccactgaaaggagagaatttatcctaatcttattgtcttccaagaaaatgaaatgcccttccttggcaacctactgcaaatttgggcagacctcactttctttataacttacccccaatactcctaccctaatataaatccatagtgtttatttatatttcaaaagaccacatatttattagaaaagtagtcattatatcatcagcttgaatattgtctcctctagacagaatatactttatttctttgatgtctcctcaaaggctatgtttccctaaaattagttttctttccttccagccaaggttctgcactttgttataattaatactattgctaaataattgtgctgggtgaagatgctgagtgcagtgctgatgctgatagatggatcaggaggaatgagttccaagtctattttttccatgagttttcctgtgtgtgtgtgtgttgtgtgtgtgtgcatgtgtatgcgtgtgtgtgtgtgtgtgtgtgtgtgtgtgtgtgatcaatgactgcttatcagacaactgaccatattctactgactctggtcaaggaagcaatgccttttctatgaaaagcaaaatggcccatgtggacattatatttttaatgactaccaaataccatattgttatgtattaaagcattgtatgtcacaatttatctaataattttaatttaactagtcatgttgttaagaaacaaaaagtaattgctgattgtatcagtccgttttcacactgctgataaagacatacccaagactggacaatttacaaaagaaagaggtttgatggacttacagtttcacgtggctgggcgccctcactatcatggcggaaggcaaaaggcacttcttacatggggcagcaagagagagatcttatgcgaggaaactcctatttttaaagccatcagacttcatgggacttattcactatcataagaacagcactgggaagacctgccccatgcttcaattacctcccaccgggttcctcccatgacacatgggaattgtgagagttacaattcaagatgagatttgggtggggacacagccaaaccacatcactaatagagaggaaaactatcattgtgtgggggaaaagggttttggaattgaaagaacaaggttgtagcctggacatataattttgaggaagattttactcacatacacacacacacacacacacacacacacacacacacacacactctccacattctccctaaacatttattgtgcacctatcatgtgccatgagtttttctggggaaaaatatatttgatgttctaaacctattctaatccttgcagcagccctataaggtcgctgttattaatattactgttctcattttgcacacaatgctgctaagaattagagaagttagatacttttcccaatgtcacatgactagtatatgttgaagacagggggtcacagcatcgtcctctatccaaaactcattccactacatcaaagaaaccaccagagatactcttgtaaaattagaaatatgaattcaatgactaatgcactcctctttgatcctttttagctcaattttctacttttgtgggacaaaatactggaaactcctctttccccattagaccaattcacaatcgtttcaactagtttgtacttatgtgtatgcagatagctggagtcctacatgaaagaatgaacaaggtgtgatattgagacagattttcccacaaacctacatttctgaaaatatttaataatacaatttccatattcctctccgtctaactttaaatatatatgtaggctactcttcattatcttaaatatgtatattccctggtttatagatgtgaatagaataccctttaccacttaattccttttcctgaatcaacccataagacacatcctggcgaaatacaattttctggagtctgtagactgaggagggtgcttctgttaccttaattattgcattgccagtaaatcaaagtaatttaaagaagaccagtcttctaggcatgccattgcagagtaccagattagtggtgctgcaattacacctcaaacaatgtggtagacattagaaatagactgctgcttttgcttagcgaattaataattctcagatgtctactttttaatttcctgtacatttcatatcgacattttgtcccccttaacagtattctttcatcacatttttcatgtctttttcaatagcatgacccttaagtttgtcttttaactgtagagttcacattggtctcgacccaccctttaattgtattggcaaccagtgctttcactgcatgatttatttagcttgtatttggcataaaccagagttgactcagtttaggtaaaaaagactcgctacaaaatggaccttgtcattttaatctctctaagaacagttttattatctgccatttcattttgtggttagtgccaccaaaaacgttattttgtgttcaaaggggcttttctcatccctcccatatgaggcatgaacgatggtgctctagctcacattctgtatttttccttcaagcttttctcatgccatccatcttcttcttcatatcctccctgatttctcctttctataataaatagctttcccaggattgtgctaccaagaaaatatccatttccaagtgatttaagaaggtctatatattctttctgtaacatttctattagaattgcagtaatttttttatgtggaaaattgttatgtaggtaatcagaaaagtactcccccttgcctttatgttttactttttcctataaagcctgcacactccagctcatatgataggaaatttgtgtagtttcttccagtttggaaaatacttccacttactttaacatatgtaattccctttacaacacttccaggatgacaagaatgggctgctaccctcatatttaaatgaggaaacagattcagagaggtaaatgaattgttacttttaatttttaaatgtttaattttgtgaagttaattactggatagtcacatttttaagactccctatttgtgtatatcaatactcgggacaactggaaggtcatagcataaactctaatgcatgatatttggatgcatatttttaaaaatgagcttcgttaaatctacggtcatataacaagtaaatggcagagcggaaattctggtgtgacttcaaatctagacttgttttttgggggggggttttgtttgtttgtttgtttgtttgttttgcatgctatatcaacaaatattgctgaccaaaatgattttccatgttgaattgcaagcagacattgaaacctggcttcatatcaaagtaaaacaatcctgtatttcaatatataatataacttttcaataatagtatgcaaaactaaaagagaaaaatcattaaacaatgttattaatcatgagtcccaggtcctctgcagagtcattcaggactcaagacaatagtctgcttttatcttaccattttttacccaggtataggatcttttgcagtctggtaatattagaggctgtagcatgtacatgacaaatgtctatggaatgtaagctttcataatgccattttatggggcagcttcactggaagacagttaactgctattggttgctagagttatagcattgcatttaagggttgaatgtatattttaaaatgttttggaagctcccttaattcaaagtcaactttatatgttttaaaatagattctacagtccactaatctaaaacacaaactatatagcctataatgaaaataaaatgaatattcagtatagtgtttaattttttttaagttaattattgtatagtcaccccttttcaactccctttttctttatatcaatgttggggacaactggaagatcatataatatggtctaatgcctgatgtttgaatgcatatgtttaaaaatgagataggttagatctcagtaaatacatttaatgatgcaattatcattgctggcactttattagcaccacactgtaaccaactgagctacccagctatactaccggcactttaaataagtggacttttaaatattacagagatctttatttctctcagtacagagggggaaagataattgaaaattaatgaggaatagaaaatatacctccatgtataatgtttataacgattgtttctctcaatggatattgagtaaactaacttcagctttcattttaacaatttaacagacgttgggcatatactagtacgtggcaggccccaaggatacaaagacaaatcagctgctcaccaccacaaaaacactctcattctgatgcaattgctctgtgtaaagaaggagttatgtgaaaaattattggggaagaaccaatagagtacaaggactctttcttactgtatttttttttttcttatttttatttgctgagacagagtctcactctgtcacccaggctggagcacagtggcatgatctcagctcactgcaacctccacctcccgggttcaagaaattctcactcctcagcctcctgagtatctgggattacaggcccatgccatcatgcccggctactttttgtaggtgggtttcaccatgttggccaggctggtctcaaactcttgacctcaagtgatccgcccacccttggtcttctaaagtgctgggattacaggtttgagtcactgctcccagcctagtcaccgtgcccagcctctttctgactgtattaaaagtgacttgaggtatcagagggaagaaagtgtcatgtgataaaagctaaaggattatcaagaagaacaaatctcagaaaagcatggaaagaaaattagatttgggcatcctaaagtttatgcaagtttagttttttacccatcagggtattagctctttttttgtcaaatgagaatataaaagtatgttcagtgtattcaaaataaaagtaatcattttagtgcaagatctaggaatttgcaacacttgatagttttacgagtaattatcatgatctgtagcaactcagggaaacaaatgaatcctataagaatcttggttctcacttcagcagaagagaatgtgtgtactgaggcattaatttttctttggtttgctgtttttcgttattgatgtagttgaaggccaaataagttattataggtgatgacaattattagcttacaattcagttgggttcaagcttctattgctgaatcatcatttccaagggaatactttaacatgagttccaggcttgggagctaccattgcgttttcttttcctcattgcacatatcttcctgtgagtttaccaaggcaggccttagggtgtaaggttgtagcaatgtcatttgtaacaagaaggttgtgggggttgcagaaatatcgtaaaacacatgtgtaaaaaaaatcctgcctcttaagaattttactgtttatttgcttcgatcttcactagaatagtcaggaagaggatgcctcactgtaataatcctgatggattctttcattggaaagctaatgaagaaaacaaaataattattggagaatgacaacccagacaatccagtgagataaaatttaaaatgtatacattgttattatatttaaaaaggaaaaatagatgcacaaggtacaggagaatgttcaatagcattctgatattaacttccagctcctggtgaacatgcaaaaaaaacttgctttaaatatggctatacagaggttgcagtgagccaagatcatgccactgctgcactctagcctgggtgacagagtgagactctgtctcaaaaaaaaatatatatatatatacacatatatatatatgtgtatatatatatgtgtatatatatatatgtgtgtgtgtgtgtatatatatatatatatatatatatatatatatatatatatatatacacacatgatgcgtactcctgggtccagcaatgaatctactttctcagtctgcgtggtgctctgtgctttgcgtgaagagaccatgcaaagaccactgctttgcctggtgtcggcctccagtgtgtttcccgaagctccatttggtgaactatttggtaacttttttttgtggcctcgactgacaatggcttgcccctcactgctcctagacagatgttacaaccagtgccacttatggatactgtattggcccattcttgcattgctataaagaaacaccagaggctaggcaatatatatatatatatatttttttttgagactctaaggtagccatatatatatatgtgtgtgtatgtgcgtgtgtgtatgtatatgtgtgtatgtatacacacacacacacacacgcacatacacacacatatatatatatatatatatatggctaccttacagtctcaattttgatccaggatggcattgcccttcttccactgatgctttcatgtacccagtactaataccatgccattcttaactaaactttgttttaaatatggctcatatttctttttattaactatgtcacataagccttcaaattgcttgatgatgcgtactcctgggtccaggaatgaatctactttctcagtctgcgtggtgctctgtgctttgtgtgaagagaccacgcaaagaccactgctttgcctggtctcggcctccagtgtgtttcccgaagctccatttggtgaactagttggtaactttcttttgtggcctcgactgacaatggcttgcccctcactgctcctagacagatgttacaaccagtgccattgatggatactgtattggcccattcttgcattgctatagagaaacaccagaggctaggcaattcattaaaaaacaacaacaaaaaaagagatttagttttgtctcacagttctgcgggctatacacaaagcaaaatggtggaatcggcttcccatgagggcttccaagaagcttccaatcatgatggaaggcaaaaggggagccagcacatcacatggcaagagagggagccacacagagtagagggaagtcctagattcttttttagttttttttctttgagacaaggtcttgctctgttgcccaggctgtagtgcagtgggtggacctcggctcattgcagcctcctgggagatccctctacctcagccttccaagtatctgggactacagatgagcaccacaccaagctaattttttgtattttttgtagagatgggattttgccatgatgcccaggctggtcttgaactcctgtactcaagtgatccacctgcccctgccttttaaagagttgggattacagatatatttaaagttcttttaaacaaccagatctcttgtgaaccaattgagcaaaaactcacttatcaccaaggagatgctgctaagctattcataagggatctgcccccatgattcatatctcccactaggtcccacctccaatattggggattacatttcagtgtgatattcagagagggcaaacatccaaacatcagatgccacagcgtaagcatgtacctggtattagaatctcatgatttctctttcaatccgcttaatgcccactggttgctgagcaccaaaggaatagataaacattgatactgccttacattgtgattcaaggcagtgcaaaccaggagaagatacctgacaaacatgaagtgagagcttattcaccatccctagttatcagtcatttgtttgcatccttaattttcaaaatataaatagcagagtttctcagacccaggaaaatgtgctttgcacaagagctgaactagaccctttgctggcctgatgtcttcagcctttttcatccacttgggtttcttcccctagaataataagtattctctaaatagttaattttaattgcaatatctgttttatgcccccaagaacccagtatccagtagtggcttacataatttaatgcaaagaaggtgtgcatttcttgatattcctcggttactttaacttcattctcaaaaatgcctggcatatacataatttctaattactgtggtaagtttgtgtttttcctcatgctgaacaatccatcaagctgtctttcattcttgccccaatactgtgatgatgatgctttattaactctgtgcgttttctgtcatagttcacatgcttgccttaaaaaaagacgtgtttacatgaatatattctcgagaaaaaattccagacagtgcagaattatacaaaacaaaacatttaagcctctctttactttctttccaactcagtctcttcccaggactaaccattttcaatagtttggaatatatttttccaggcatccttctatatatttacatatatacatatgtatgcagtatggaagctacagatacattaatttacataaccatatgtattgttctgtgatgtactttattcatttagccatatgtctgataggtgattatatgataatacatacatttctaccttatgttttttttttcctttttaacattctcaaagtattccataatacagagaaaccatacatttagccactctcctactgtaggacctttagttgagttcacatgttttaccacttaaatggcaaagcagtgagcatccttgtcagcatatgttgatattacgtgtgatgatttctcaagattaaatttttacagttagaattactgtgccaaaaaaattacataattctaattttgatacatattgcacattatcttccaagtagactttaccaatttacacaccaatcaccagtttcaacatttgatatattagtaattatttttccaaccttgtgaatgaacatttatctcattttcatgtgcattttgcttattgtttctaaggttgagttcttttcatttgtttttggacatctaatttattacgttaagaattccctgataatacattatgttcatgctttttttgttgacttgtttatcagtttaataaaacaatttacatattccagatagtaatcctttttgtataccactaatttattggtgactcccaacgttaagtagtatatacctgttgcttatttttatgtatcttctttttataagtggatattaagctcctccattagttcagggttcttctttcatatcttttttttactgtccccagtacccagaatagtctcaataaataggcacttaatattgattgtcaattgaggagggagactacaactgcaaaattaagacaaggatcagcaggaatgtgttgctggctccagtctcaaggctcaaggccaggagtgacaaagtcagctttggcttctcagatcagttatcaatcctgaaggtataaaaccagaagatgaaagagacctgtataccctgagatgcgaccactcattttcctctgttcagtcattcacttctgagtttgttattatacatattcattcatcaagtgatatgtttatattgtttatcttcactaacttatttagctctttccatgaaaatccacgtggaaagttggcttaagccaaaatatattcaaaggcttctgtcttgaagttatgtcctaaatgttactctacaaggctatatgcaaaagccaactaaaacatttagacatatttcatttgtcaaatcacttgtgttccatagtttatttttaattcagcctttatttaataaaaatctcttccacatacatatttataagcacatggaattatgcagattttgcttgtagatgtaaacatttttaagtgaacagaggtgctagttttcttaggaagaaaggatatattcacaattcaagcaaaatacagcagacttttttttgtatttctccatttctctcactcccaattaacatatatgtttcatttctgaatgcttttattcacttacttgccacactcttaggtaacacccgttgtgttccatctctagttaaggatgtatggtttgtgatttggaagaatatggttttctctaaataatattttaaaagcctcgagttaatttttaatcagtattatcatgcaggtagtggggaaaactgtctttcactcattctgtacgtataatcctaaaacagctcattttcttttctttcttttcttttcttttttgcagggttgaggtgctttgggaatgaatgggagtaagtctttctctaaaagcttacttggtgtgtgtgtgtgtgtgtgtttcactatagttctgactatatgttatgcggtcaaatccaaattcactttttttaattcctctttaaatccttagggataccttcaactgtcagtataataaaatggtcattttacaatcataataaccaccactctaataataattaactaattaaatgttttagaatatctctactgtcaatgagaaattttattgacaggaaaaatcaatggtccagtcaaatgtttctggataactctcgtagctgaaatgggtcaccacaattacaccactaaaatcctgtcaatagtctaaaaaggtaaataaccagtttaagaatttcatacaaatatataaaaaatattagctatatacctcttttgtatatgttatatgataactacatttttatatagtggatatatgctttacaatatttataataaatgtgagataaagcacagtcacattttctaaaattttataagagaagcattgaaatatgtgggtagaacaatagattaagattaagaagtctttagttttagtgcctattgccacaggctactttggtaaattaaaagaaatgtcactcatcttttctagacatctgtttttttcatctacaaaacaatgggcttgaacttggcaatattctaaaatcccttctagctgctaatttctataaaatagtataatttttctattttaaatgattatgaaggtttatagtttttatagctttggttttataacattttgttggtcatatttgtgatttattcaatttcaagtcctgctcaggaatacagttccccaattacaacattatttctatggaaagagaacaatatgttttaagatgagccttttttgatagaatttatatgagcacattatattagaaatggtgactgcctgtgtttgctagtgtattttagtgtctctcagagctaattttcccaatgggcttttttgttttctaaatactcttcaagctgagactaagttaaaattgaaaaaaaaaagaaagcattgctgtgtgggaaataattactcacgtatagtgattttagccaaagccctatagttaatctccgtagaatcaagatcaaagggcttaaattcttggtgttcttttcctaaatggaacataacaagaattttataccactttgtactatgctaatccaagaacattagcacatgtggttaatcttactttggattgcttaatttttatagttttaccttcaacagtcctttaatgtagtttgagtgtgcatgtgaatattcataaaaataagtatatgtttaatgagtacagagtttctgtttgtgatcatgaaaagttctggaaatggatgttggtgatagttgcacaacactgcgaatgtacttaatgctactgaatagtatacttaaaatggttacaatggtaaattttatgtatattttaatcacaataaaaaataagcatagaaaggctattaaattaattatttctgaagtcgtattggtagattcagaggcaaacactttcctgggaaagaaataagaaataatcagaaaacatttcacactgtaacttgaggctaactttttctatgctgaatgctagatgtgtaacctatccccaagcaagtctgctgtaataatgatttgaaagtaaaatctctgtctcaagggtgtgatgaccttaattccatatccatatacatgtttatagttctttccttataaccagaatattcacctctgtcattttgatgacatggatgtgaatggaatacacaattacagttgctaaagcaagaacagactaagtcagagagagagctcccatccccacagatttgaaaagctttctcctttgagttattatgtattatgcagtttttctgtgtttacaagaggctaattatcatcttattctcagggtgggcaaaggcaatatcaaagaagggatacagagaaatatccaaaataccattcaggtggaaatttccgaatttgacaatgaatgtcagtttgatattggggaaaatgtcaaaatcataaacagatttgatcttcattaaatccagaacatatttggaagttaatagtttaggctataatcctacattatggcatggaaaaaataatggtcctgccccagagaatgagttttatactttttttttttttttttttggttcttgtagcacttaacacaatacattctcatagtagtctgtgtgtaaatatttcatgattcagactaattggcacagttctagactactttgaatgactttgatcaatttttatgtcatggttgaccactgactctctggctccattcagtccttcattctacattatatgccaaccccatttggtattatgttgaattataaaacaaaaaaatttaaaaatatatttaaaaactttctctatcacatgcagcttatttgtagttagaaagtgtgtgttttaaaccagactcagaggataactgcaaactaaaatttgtattttgtgtgaaaaatagaatagtatagcactgacttttctctcgtctgtcgaaatgcctcccggaaatattcaggatatagaaacaatgtaatagactacgttttgccagataatacttcactgacagattaaaatgcattctgttactctctgtctagcatctatgcatttcattaagaactaaagaaaataatgacacaagccagatttctaggttgggtagggaattggaaatatcaatttgctaatattaagagttttaagtgctaagaatctttataaacattagataaattattatatgagtttttttaatacgcattttaaaatgtatacaatcatgcctgttaccccagcactttgggaggccgaggtgggtggattgcttgagtccaaaagtttaagcccagcctgagcaacatggcaaaaccccatctctacaaaaaatacaaaaattatctgggtatggttatgtatacctgtggtcccacccaactactgaggaagctgaggtgggaggattgcttgatcccaggctcaagctgcagtgagcttgcagtgagccatgattgtgcccctgctttccagtctatctgggttacagactgaaaccctgtctaaaaaaaaagaaatgaaaaatcggtaaaatttcctaaaacttacattatatcttgataattatagcctttctaaatgttaaaaaaatttcaacaaatttagtttaaagatctaattggctttactggtgatctatgaatcaggcagcatcccatcaaagatgtagaaaagctgctttaataagcagagcaaagaagttgggctttataggcagaaaagggctgaagaagcagaaacaaggaacaaaaacacggattggtccttacaaagtaactttccttacagggttaaaaaagaggaacttcctctgttttaccagctggctcaggtaaaccaggccccttctgattgattgctgtgaatttccccttttttttttttttttttttggaaaactggttcattttaaagttcattttgattacatggaacctagcacaagttactgcattctagtttgtccagtctggtctgttggacctagtgcatgagctcagttcacacaatgatctcctataattttcatataatatagataatataaaaactgtcatatgataggtatgatatggtttggctgtgtccccacccaaatctcatcttgaactgtagttcccataatccccacatgtcatggaagagacccagtgggaggtaattgaagcataggggcagttaccctcatgctgttctcatgatagtgagtgagtgagttctcacaagatctgatggggttataaggggcttttcccctttttgctgggcatttctccttcctcccatcatgtaaagaaggatgtgtttgcttcctcttctgccatgattgtaagtttcctgaggcctccctagccttggagaactgtgagtcaattaaacctctttcctttgtaaattacccagtctcaggcagtcgtttatagcagcatgagaacagactaatgcaataggagatgattacaatatactagtgagcatcagtgaaaaggagagtactgtaatatgtttcttaaagaatgaaaaataaactgtaaaggtggaggaaagtaagacataattagaaaaaaattaagaagctcaagagcatcccaaaaggataatgcaatatgcacaattgatagttggataaagaaaagatgagtgattcaaacatgacttaagacattgatttcaacaccccctgtgcatattcttgcaaggaaatttctaaccagctacagatgctcctctatttaggatgggattacattttgataaactcactgtgaagctgaaaatttgagaagtcaaaccatcgaaagtcagggaccatctgtcgtgactttttctgctttttctgttacagcatgactcactatagcttttaaattgtattctatttgatcagcctgggaaaggggaagggggaaatctttgctatatcagaatgaaacaaattttaaaaaccttcatgaaagactgagttggaattgaaataaaaactggtagttcaagatgtaaagaagttctgaacgtgacagttaaagccagttaaagaattccctgtgaggacttttgtctgggagtttgattttatccctgcagctttgcttaagagatttcctgttcctttatgctagtgacttagtattgttttttccagctgtttcattctttttacctttgccttgagcactgtagaaatcaatatagtaggcactctctgttctgtgcccaatacctgtagtttcctgtgtgtgatggtttgagattctgtagatactacttaatccgatagctggtgtggcctatttgtccaataaaacattttccacagtggcagggaacattaagctacttctgtgggtggtagaatattgccttttgttagctatagggggtgagggaccttggatgaagttagaacattatttttatttttgtgggtgcttttgaagattgtattgatccaacttataaatgccttgacatggggtgggactgctcttctctcatgcctgatctctcagcttgttagtgacttcactcttggtgggaacagaggatttaatcaaatagttggctgggtatctattctctgctagggtcataagaagaatatggattgtctataagaagaaagaggattctgctacagcctcagtttgatatattaaccttagattcagtcctctcagtgtgaagtccaattcccaaaatggttggttaaacaacccaaagttacattttgagttaaatgctggaaataccaacctcatacaattagtgaaaggtggaaagggtgaaggcagtatatttggaaactgttttcagggcaagtatcactcagaatggatatttaaaaaagcaacactgctcataaaattttatatctttttattgtattcaacatgtatttataaagtatcctaggcactagaaatacagctgtggtggtagatttgtgcaagggtcaggatacaagtgacccttacctcaagagtttaatacttaagaaatgagacaaccaaacagctcatttgacgtgttataaagaagtgcacacaactaatttagtgtaggggggtttagctctttattaaaaagcaatgtttaaacagggaaatatggagatggtagaatttcaagtagcttagtgtattttgatttgatggtttctcaccatcttccttgtacccctcctttctttttcccctttagaaatgactactatagtaagtggatggtaaaaatgccactgggcatttaaaatattagcaaactgtaaaccttgcttttccaaagacccaaaggcatattaagagtcattagtcatagtaagtttggaaaaaaaatagcccttagagatctggctttgtctcatatggagtgtgatctttggacattatgattctcatgtatacgtggagataatgcttatacagattggttgtacaaattaaaggcagtaatgtatctacatcctcatacaacacttgttcagcctgggtgcagtggctcacagctgtatttctgcactttggaaggctgaggcaggaggatcacttgagctcaggggttcaagaccagcctggggcaaaatgatgagacctcatcttttcaaaaagtaaacaaaattagctgggtgtggtggcaagtacctgtagtcccagctactcaggaggctttggtgggaggattgcttgagcccagaggtagagactgtggtgagctgagattgtgccactgtactccagcctgggtgacagagtgagaccctatttcaaaaaaaaattagaaacttgtttataacagaaacttattatagcttctgcccatctccctccactgtaggcaaccttgcttgaagactgacagacatttatcttaccttgttcatcatgtttaccattcttaaaatcctgtttcttaaaatttcataggtcactctgcagcataattttgttaaaagcatcagctcttccatcaagaatttttttttttacatcctattcattgtttacccaacattaagaaagtgagtacagtttgcttttgtaatgactgaccaataaggagacagaaataaacttaggaaaagaagactactaatgaattttctgagacctaccttctttctgaatccaatacaatgtttaccttcatctctattaatccatcaaatcaagcacaaaaggaaattgtactcacaatttgattttcatcatctattcttaccaatgtcacaagaaatattagaaaagtagcatttggttgttggtggtgttactctgtaatgtcaagtttaggtgaagatttgtaagtacagcaaatcacagggtcccagggtcctactctgtgatcagagaccctgtttgctcttttacccagccacctaactgtggattatctttgaatcttcaaagtatgtcaaatttttccacatagtattaaaatttatttgttaatagaatttatttttagagcagttttaggtttacagcaaaattgagcttcatctccattgatccatcaaatcaatgagttcttaactctctactttctgacctccccgactcccgacagcctcccctactatcaacatcctgcaccagggtgatgcatttgttataatcaatgaaactatgttggtatcgcgtaattatccaaggttcacagtttacctttggattcattcttggtgttgtacatcaacagtccctaacctttttggcaccaggaaccagtttcgtggacgacagtgtttccatggaccaggggtggaggagaatggtttcaggatgatccaaacgcattatatttatcatcagattctcataaggagtatgcaacctagatccttagcatatgcagttcacagtacggtttgcactcctatgagaatctaatgcagcagctgatctgacaggaggtggaactcaggcagtgatgctggttggcctgcagctcatctcctgctgtgcggcccacttcctaacaggccacagaggagtactagtctactgccagggggctggcgacacatactatacattgtataggtgttgacagatgtaaaatgatattatcttccactgtgatattatagagtagcttcactacctaaaatcctctgtgctctgcctacttattcctcccttccccttaactcctggaaaccaatgatctttttactgtcttcatagttttgcttttcacagcatgtcatagctggaatcaacagtatgtagccttttcagatttgcttcccccatttagtattatgcacttaagtttcttccatgtctttcaatgacttgatagctgcttctttttagcaccaaaaaagattgcaatgcctggatatacctcaatttacttatccagtcacctctgaagaacatcttgattgcttctatattttggcagttgtaaataaaactgagataaacatttttgtttaggcttttgtgtgcacataagttttcagctatttgtgtaaccttcaaggagcagaaatgttgaatcatacggtatgaatgtgtttactttttaaaaaatctggcaaactgtcttccaaagtggctatatccttttgcattctcaccaacaatgaattctcaatcattgctccgcattcctgtctgcatttaatgttgtcaatcttctggattttggtcattctaatagatgtttagtagcaacttattactgttttaatttgcagttccctgatgatacatgatgttgagcatcttttcgtatactatttgccatcttctttggtgaggtgtctgtttagatcctttgcccatttttgaatcaggttgttcattttcttactgttgagtttcaagagttttttgtatattttgtaaaatagtcctttagcagatatgtctttcgtaaatgttttctcccggtcgatggcttctcattctcttgacattgtctttcacagagaagcagattctaattttaatgaagtccagcttatcaattattacattcatagttggtgtctttagtgctgtatctcaaaagttaccttcaaaccctaggtcacttagattttcttctatgttatcttctaggagtttcatagttttgcattttacatttagctctgtgatctatttcaagttaacttttgtgatggctgttaggtctgggtctagatttatattttaacatatggattccaattgttccagcatcagttgttgaaaaactatcttttctctattgtattgcctttgctcctttgtcaaaagtcaattcattgtatttatgtggatttacttctgggatctcttataatttatttttgaatgtttgtttcttcatgtgctgtgagttttgtaaagcagtgtagtatgtgtttaaacccctgtatgtctataacccctaaatagggactgggtacagattttctgtatgaaatcttctcataaaattagggagaataattaattattccacataaaatataaacaatataaggttaagttaaatatatttttaatgctcttgaaatatgcaatctaaatatagaattatctagattatttcaaactatctgatcataaaacttccttgaggcagttttaatcttataggttcccagtcaaaacccaaaactcttcaagaaagagtcctgggaaactgtgttcttaataaaaatcctaggtgatttatatgctcagtgaagtttaggtaacactgatgtctataaaaagtaactacaagtttaaaatatctaacatcacatgtaaatgcataatatatttatttcatttattcattcacttatgtagcatatatgcactgagctctaagtcgatcacgtactatgcctgggaatagaaaggtaaataagagtctctaccctcaagaagattacattctttcagtaacaaataaaaggttaaaataagtgggcaaaatagaagcaccaaaggaagattgtttagaaacattagaaaaaaatgtacggagtagataatgttttcataatatccttagtatgtttttcatctgactttctttgtcctaattagaatggatatatgattcaacacatttttttaaaaatccattatctcaggcaattgaaataccctatcattgagtataatattaattacctcactcaaggtaccattccatgtttgaataattacatacatttttgctgaatcatgttggcattgtattggtgtcttattgaagacttcatcagctgaataaattctgtgacttaaaaagtgcgaagaaaagatccacaaacaacatattaattccaattactctacctttaattactgtagaataaatttgctactaggaggaggagacattatctttgttttaaatttcaaccctgccaggtgcggtggctcacgcctgtaatcccagcactttgggaggctgaggcgggcggatcacgaggtcaggagatcgagaccatcctggctaacacagtgaaaccccgactctactaaaatacaaaaaattagccgggcgtggtggcgggcgcctgtagtcccagctacttgggaggctgaggcaggagaatggaatgaacctgggaggcggagcttgcagtgagccgagatcgcgccactgcactccagcatgggtgacagcgcgagaccccatctcaaaaaataaaaataaaaaataaataaatacataaataaatttcaaccctttcatgagttacatttgtaaaaatgagataggaaaaatgaataatgctaacataaagtttggttttgaaaatggtaactatatttaaattgtaaatctgctaatctgttggcatatttgggcctatatctatctatttatagatagagatagatacataggtagatacacagataaaacttataaacagggaaatgtatttgccagctgtatttttaatattcttttttcccaaggcaataatcttctaaatagatatttaaaaagtatatattagctattccaaacaaagataaaccacagttttgtggaaagaataatatcaacattctagtcctcttttattcaactagctgttgatacttttagatgttttacttaacctctctgggcatcattctcaccgtgtataaaatgttagctgatggttaacatttgttttactttaaagttctattaatatacttactcaggttgtataatattatgcctatgactggcttgcaataaaaattttgtttgggtgaataaaaaacaacttgtaccctactagctgcctttaaaagttctcaaatgaagatttacttactatgtggataacttagtgtagactatatacatataccctttactaattttattccttgcatgccatgtatatattatgtactaatcttgttttttttcttttctttttttttttgtttaatttttttttttttttgagttggagttctgctctgttgcccagaactagagtgcggtggtgcgatctcggctcactgcaacctctgcctcctgggttcaagcaattatcctgcctcagcctcccgagtagctgggattacacgaacctgccaccgtgcccggctaatttttgtatttttagcagagacggagtttcaccatcttagccaggctggtctcaaactcctgacctcatgatccacccatctcggcttcccaaaatgctgggattacaggcttgagccaccccgcttggccctaatcttttttctgtatgcattagaggtcataacatgtctctatgttgccccggtgaagaggggatcagaactttgtggtatcattttgcttgcttgttactctacaccaaagtgggtgaagtctaaggtgaaaccatgatctgttcaggtaatattgagggtattttcagtgggtgtatataagaccaaattataaaacctatatcttgagaacagtggggattgctatcaagaaattagaaaagataaaggcagcgtttaagaaatgagaaaaagacaaaggtgtaaattatttcataagaaagcacttctttggaattccgcttggtcaaaatagtaagaaaggaatccttagggtgtggaacattatataccattgtccacaaatagttgcttatttttaccatctttacaactgattcataacaaataaatggcaaaactctgcaatttatttgattgattttgaagaatgtggtttcattaattcagaatttatttggatatggacaatgcgagttaacatgaatgttttctttaaaagtgatttttttttaaattaagtgatcacagctttgaagacagattttaaaatgtgccttcttagatgggttggtaaagtatctttagaaaatgggcactttcattcataattgctttatcttagccaattccagctggacttgccgtagtcttcaaggacaagttgatgtcatgctgaaccatatgtgttatgctgataatcagcatcattggaactgaaactctgccatctatcttttgtgtgattgaccttgttattttaaaggtggcaggggttgggggaggaatttggcaaagcatccaaaaaatcagaacacttcatagctctgcagttcatcctagacattaaggtcagatcaggtgccaaataacctgacaaatttggaatgagcagcaggacagctacctagagaacatcagaggttcacaatgtcatcccagcagcacgcaaaaaataggatagttactagcaaccctttgaattatttggctgatattatttgcagagacaatgaactcttccactttactttccagagagactgtgtggatacatagcatgtcaataaaaatggattcttacatagtcctggaatagttaatgcaaccatttgtattgtgaatcactttactgatgtgatagcaagaagttgaggttcaaagggcagtttctaagtagatatattgaaaggtatgtagcagaaacccatactacctgctgatgtgcaagttctaacaaggaagttgagtacagtaattgacatgaaagtcacataaatcaaaaagaatccactttctctttattcaacattttttaaatgtaccattctaaggtctataaagaaatttaaaaattggaagcatgctgtgatattcatagatgagcaatttaattgtataatgtagaatttttgaattctcattttttaaaatttagaaataaatactaaatattatccattaattagttaaatcccttgctataaaatgagagtaatgagccaggcgcggtggctcacatctataatcccagtactttgggaggccaaggctggcagatcacctgcggtcgggagttcaagacctgcctgaccaacatggagaaacctcgtctctactaaaaatacaaaattagctgggtgtggtgatgcatgcctgtaaccccagctactcgggaggctgaggcaggagaattacttgaacctgggaggcagaggttgccatgagccgagatgattccattgcactccagcctgggcaacaagatcaaagcaacatctcaaaaacaaagaaacaaacaaacaaacaaaaaagagagatagtaatgaataatatttcatctatatttttggatcgacttttcctcccccatcttcttttcttcttttcttattcctctaaaatcttttccccattcttttattttcacatcaaacccaaaaactcaaaattgtgaaagaaatatctctgacaaaattgcgggagagactatttcattttctgcctcccctcctgcataaatttctgactaaatctaaatatttaaatgtattaaggttttgatgagtttaggaaaatactgagatgtatcaattattatccaaaacccttaattttgacattcctgaagcagttccatgattagtttaatcttacgtgtagtttaagggaatatatcgtaatttcattcacatctagaaaattcacttaatgaatcaagccttatgtaacactgatgataaaagtttgcctgaattcatctctgtatttaattctaactttacttctctggtattttctgtcttatcaagtcatttatcttaattacaataggcaatggtcagaattcatcattattcatgttaattttatgaaatgaaataatgaaaattgttttaaactcataaatattagttttcccctttccacgtaatttttatttgccaattgagaaagaattttaaaacattgtactcagtaacaatatgagcattgatgatcattataaagtattataggcatatataattttatatgcattcaatgtatgtaaaacatatgagggttggagctcaccaggcctgtattactgactatagagacaatcttaacattttactttctcaagtacaaatgctgatgtaaataaaaagcatcatgctctggtttagctgtttttgttctcctgggaatacatagccttagagttgaacaaatgagaaatataccttttttttttattaaaaggttaatgaaattcttcatgactttttggaagaaaattcagtttgggtttctgccaatgtctggaaactttcccagtatgtccaactaacctgaatgatacaagccacttaaaaaaatcaatactataactaagacttcaaccaaatgggttctgaaaaggtgtcttcatttaaatgagtaaaaaaaagaaaaaaacaaaacagtggtaaaaacagagtcagagaaaggatttcagtggttaagaatatttaaattttgtgtttgttattccaccatgagtgatttgaacagaaaatatttctttaaaatatgtattaacatattcaacatatttatgaaaagtcagaaaattattttgactcactaaaataacagaaaaaagtatacactgtcatttccttctcatatccaatatgtctgtaatgaaattctagagagagaataaaacctgtattgcctcttctacatgccatttctatttaattcatggtttaaggaaattaaaatgattattttttgagagatgcagccagtcatgccttttacaattaacttgttagaataatcaaagctatgtaatggttttgttaaaagctgttcaaagagagggacagtgtatgtcacaaattgcctatctgctaatcttcttcacaacccttttatgaatatacaaagtatactgactttaaaatcttgccagttatggctgggcatggtgactcatgcctgtaacaggctgaagtgagaagattgcttgaggccatgagttcaaaaccagcctgagtaacacagcaagatcccatctctatattttcttttttaaatagctgggcatggtggcatctgcctgtaattccagctactcaggaggccaaggtgggaggattgcttgagcccaggagttccaggttacagtgagctatgattgcaccacgctctccagcctgggtgacagagtgagaccttgtctctaaaaataataataaattttaaaatagccaattataagtagcatgaaataattatgtcagacaatcatcaacattagccccttttaatctgctcgtaggatggttttagagtgggtggatcatgttctcaacttacagttctatcagaaggtattgcttccttaagagataaataaaagctgtacctctgtgttctgccaatttcatctcatgtctcaaaagaatccaatcatctatcctctaatcttatcttgtgtttctaaagagacgttgctgttttgctactcttgttgaactaagctccagataatttgaattcattaatttgcaaactcacagattcttaataactcatttttaatatgtggttgattattatatatttttaagagagaaaatttcctagtacatatttaaatgaaactaatcagacaggcggattacaatgcaaattaattgaattgcagaatcacctttagcttttcttctcttcccttcatccaatcaaatatcatttcctccagatcctacctcttcagttccgctcatatgcattgttcatttattattttaacaaacatttatcaagcccaataatgtcccaaggtataagctggatgtaggaataaaatacgaagtattagctcctcctgttgttaaagagttcgtagattactatgtaaaacatgaaaatgaatgaaagtgctaagtacggtaatagaggtaggacagtgtttcagcaaataatgcctactcaagatcaggccctatgattataaaaagcagaaattccctaaaaaggctcaagaaaagcaggttgaggtggggagtggcataaaggttttaaataaccgaatagagaaatcaaacaggataggaagcactaactcagtagaaatcaatagggctctaataggtgagttactctgttcaagacagccttgggagatcatagcagataaaatccttgaaacttccctataaagttttactttaatgcaattcacttgaactccgtaagtttgtttctgtcttgctaccaatatataatgtattttcctctttatcttagttcaaattatgtaagatgaaaaaataactgatggtcaaggctcagcctccagatggactcccttaattcagttacccactttaatcctatcacatgaggtgcagaagggtgacatttagccatctaggtccatatattcagcagcagagactaaggacaggaggatcaggtaagctcaacacaccaaaacatatccggcacaatatccttgccactttcactgctgtttctatagtttcattcttactgatagactattgtagtggcatcctgacttactttctggatagagagacagatcaaaaacaggtggtcatgtaaatgaccacgtatttttatagatgttctcatggcacttagtttttatttttctcaaagtaatgcttatttataactctgtctataattagggaaacatgggagaaactatgtttccctgtatgttcaatgaatgttcaataaatgaaagaataagtgaataattgagtaataaaaaatgattgaccttgtcttgcacctaaacgtcataaaacatttgtttgaagttgaaataaatagaactttcattagttaatgaacccaaggcagaggaatatccaacttctataggaatctgtggaaggaactaggattctcagttgccttttgctgtaatcactgtcaccaccaatttgtaaaaggatgaccataaattactagcgaggaaaaaaaaaataaaagcacaccagagaaaggacaataattttctgtttaagggcaagttctttctccgtcccctcagacctcaaaatacatacatgcccataagagcatgaatattgactcacatatagcaaacactcaggactttgatttggaccttttgcaagcactggttttctgattctcattgcagtaggggccacagcatgtcttcactttccttcttgaaaaatagcctagatgtcctattaaactgctaataaatagcttgtaggttcttgttttattttgttttaagccttaaaataaaataattaggatagagaaaatactgatgactattaaagttaattacttgtatacatgggagtttttataccactctctactttttagagtgtttaaaattttacattggaaaagtaaaataaaaagtgacaaaaagtaaacttggtattaattacattttttaaaagcctaaaattccttctatttgccctatcttgtgaatctgtcagtattgtagaaagatttgctttgaacacttattactggataactcattttgtattatctgaagagaaaaatgcatattctcttaccacaatcttatgagaaaagactaagaaaatattggctaagtaaggaaagcattgatagatatgagaaatccagagaaaattttatagaaataaaaatcaccacattgatctctgaaaattactttaaaggctagcatgctccattctgtcctgcagtccagccaatgatacctcaccatattaaagtagacccctgaaattgtacccgtagaaataaaaatgctcacataagttagtctgtttattttccataacactttgacttacatagcaacagtacacatagcaattgacttgatttttcttctccctaaacttcttgtgtttgtatatttgtttaatatttattgaagatctgaagttgtgtaaggttttgttcaatcactggagataggtgtgtaaaaaatacacagttcttgcctttacgagcacacattccactgggaaggcagacacccgaatgtaatcaaaatacagtaagctattttatagagatataccccgatgataaaataaaatgaaataaaaagagggactgaataatactaacttcaggagttggtgaaggcatggcagatggattaatgtttatgcaagaacctgaagagtaagtctgattgcccaagcagagatctggggagaggactgctctttgaatgatgatttgtaggtactgaagaggaggggaaagaaggcagaaaaattagagagttacaattgaagagctttaacaaaacagtacttataagtggtactgaataaggcagaaaaacagtaaagagtgattgtacaccagagatatagaaagtgattaatttgaaagtcttagtaacatacgaaactagaagccacagatggatgtttgaaatcttttgtgtgcagtaagcattaaggtgttccctgggatttccaaaacaattttttaaaaagaactgtacttataaatctgaggaatgtaaataaatatttcctagatatacatattttcacatgaattaaagtaataattgttagcctttgcatatctataaaatatctttctattgaatgactagtgtaaattaaagatctctcttgaaagaaagtcaggtatatgcaaatattacaagaagagagaattttaaactaattgatagcagagtgtcagtaattcttaaaagagtaggtatagccacgtatgaaagttactgaggagataatgggggtgggagagtcaatatgattattgttttcattgcctaacatattgaattgttcatataaagtttatgtcattttatatagcttttttttctttttttttttttattttcttgagacagagtctcaccctgtggtcaggctggagtgcagtggtgcaatctcagctcactgcaacctccgtctcctgggttcaagtgattctcctgcctcagcctccccagtagctaggactacaggcacacgccaccacacccagctaatgtttgtatttttagtagatacagggtttcaacatgttggccaggatggtctcaaactcctgacctcgtggtccgcccatctcggcctcccaaagtgctgggattacaggcgtgagccaccatgcccagccagcattttttttacaacgaggatttgggtggcagtttgattaacttaagaataaagacagtcatcattattttttacgaccttaatatattctgcggaagcttggatcttcatttgctattactgtttataggatttatgccgttaaagtcaacccagctattaccaaatcttatcctaggaataaatgctaagaccttacttgagaaccaatttcatatgtggcctcaaatttgtatctccctgttctttctttttctgaaacttttaaatgttcttcagggaagttaagtgagagtttctgtttcaagtaccataactagttcaattttaatttcttattttatattagtttatctattgtaaacacaatatacttacagtcatgtaaattgtttttagagactaaaaattatttttgtaatttcaagaattatattaaatataaaattttataaatcatttggaaaatttaggcataaaaattggtgggctaaatgtaggaatttcagcctaatgcattagtttccttcatttcttaactcatattgatcatctatgagtgtcagggcatttgggaaatgtcagtgaacagaacagactaatattcctgcccttgtgtggttacattctagtagagagaaggacatatacaataaatgatgaatatcatgtattaaactgttacagtcttgaagcagaactactttaatttatttcttgtctctttcatttactataagcagcaaagagaaattaggctgtactttgcacactttgcttagaaatatcctcaactaaatatctaagtttatcactaaccgatttaccttcctctccaaagtagaaataattcagccaagttctctgctactttgtgacaaagatggcctatcctccagtttccaatacatgttctcattttcatcagagacctcactagaaggtcctctaacatacatgtttctatcaacagtcttttcaaagcaatctaggctcttcctattaaatgactcaaatctcttccagcctctacccattacccaattccaaagccacttccacgttattataccaggatgcagtgtgttccagaaccccacattctggtataaaaatttatattagtttgctagggcagccattacaaagtaccacaaactgggtggcttaaaacaagtgaaatttattctctcacagttctggaggttggaagtctgaaatcagagtgtcagttgcttagattccttctgagagctctcagagtcaatctattctatgcctcttctttagcttttggtgaaggcaaacaatctttggcattccttcatttgtagatctatcactccaatttctgtcccggtctacacatggcattctacctgtgtgtctctatgttgtgttttctttgtgtgcatttgcctttgtgtctcaatctccttcttctaccagtcacattggtattaaggtccaccctaatgacctcattcttaacttgattacatatgcaaagatgatatttccaaataaagtcacatgcacaggtaccaggcaggattaggaattcagcatatcttcttcagaaacactactcagttcatcacatgactaaattaataaaatgtatggcatattatagatggtgatgagtatatacacactatattttcccctccacattagactgaggttattctcattttacaggaaaacttgcagtgaaatggaatttttcaaagtgtgttctgtgcagcaatggtctgacaaaattttgtgtgagaaaaagattccataatcagtagatttgttttatgcagcatttacctcctctctgtgcttcacagtgtctactaacccattcaggattctgagaattcagaaaaaagtaaacattttctttctttttttttttttttttttttgaggctgagttttgctcttatcgcccaggctggagtgtggagtgcaatggctggatctcagctcatgacaatctccgcctcctggttttaatcaattctcctgcctcagcctcccgagtagctgggattataggcgcctgccactacacctggctgatttttgtatttttagtagagatcaggtttcaccattttggccaggctggtcttgaactcccgacttaaggtgatccacctgccttggcctcccaaagtgctgggattacatgcatgagctgccatacccggcaaagtaaacattttctaaaggaatttgaccgtagtattcttttaatcttaacactttcttcaaaactagtgtattacttggaaaacacttaatgaaaccctgcaacaaaatcatagatttcctcctcctcactggttctgagacacgtttgcgaaggttagccaaaatggaaagcagaattgactccaatgtaaagtgtccaagttgatttcttattattgataggtgttcaataagagtacaggtatatgccactgtagagctaccagagtggagtccagaattatcaaaatctatatctcaaatccatacggattaattattaaaatttaataaacaagcaataaaaatgtgaaagttcatgtggcggtgtgaaaatacaggctcattaggaggaagtgcaggtttcttatacggattttttaaataaacggtcatgcaacttttgggtcatttcgtggtcactttctagaggtcccagtaatactggctgctgtagtgtcaatgactacaggacctaaaacagctatagtgtgctcctacattcaaggaagtacttaccagagagaaaggagaataagcaggtaggcagaaacaaaaaagccaagaaatttaacaggcaattgtcacaaaaagggaggatgaggacaggaaggcagtagacttccctaaaaaacaaaaacaggccaggtgcggtggctcatgcctataatcccagcactttgggaggctgagcaggtggatcacgaggtcaggagatcgagaccatcctggctaacacggtgaaaccccatctctactgaaaatacaaaaaaaaaaaaattagctgggtgtggtggcacacacctgtagtcccagctactcgggaggctgaggcgggaaaatggcatgaaccagggagggagagcttgcagtgagctgagattgcaccactgcactccagcctgggtgacagagcgagactgtctctctgtatatatacttaatacaaggtgaagatactttataaccttctcactattgccttggaaaaactgagtgatgcgaaggcgaaagggaatttactgggttgaacctatagtactctccagtggttgcctatggcattaatgtgaagaatctttcagaaaatggaacactctttcttttacatatcacacattaccgtgaagcctctggtaactttgggtgtatttctacaaattagtccaggtgtctctggtattatttacaaacatcccaactgctttgcaatataattcttctgagtttaaatatcaagtgttattataaatatttaccctgcacagctctctgccttcagcttgtcttgtgcccacaactctaccctatgtagtttaatttttaaaagatagaaagaaaagcatccagtgacatctctaatagggattcctcaaacttgaagcctactctaaaggcagaaataagatccctgaaatataggccactgcttagcccacttgatgaagacacttcaagtctcaggacaattggtataatgttcccaactaagcttacttgaacactgagttttcctattatgaaagacaaactttggaatcttctgatccatagtcagacttgtttatccattacaccagtggctcacatcctggatgactaattctgaagcagtcatttaatgaagctttatttgggggatattacaaggtttgttgtttgtgtcttgaaaatccagctttctgtgcaagcatacagttacaggtaataaaacgctacccattgtagttccatactttcctcatccactttccagggtaacctaggctatgaactacattttgaaagaaggaatcattaaaatggctgataattatccagaagcttaccagttttaccagtctctgaagaaattcccattaaatcgggctgtgtcctgtttcctcaaataaaatgagaccatacaccagaggcttatcagaccttttcatttcgaggtcattaattaagcatattctactccaggtgaaaacgtttcccagaacgctctcttgcattgacatttattttgtgttaaccattctgcctggcatggctccgcaccacatctagaggccatttaaacaatattaagataacaacattaattcactgtttttctgttaatcatatagaagcagatcagcttgttataaataatgatcttaccttgcctgaagcacaactcttagcacttgttctaatgcaaatccctctccttttgtactagctgcagagtaatagcatttaaggctgcgctcttttcttctcaggtttcaatactgttgggaagagaggaagtggcttcaattttaaatttgaataggactgctttccaaaaaaaatgtgaggaggaggacacaacctttcttgacttgcttttatcaaaagcatcatttttctcctttctcatgatgattactggaattgagactcaaattaagcagcttgtctgacagatgatgtaatgtgtcataacttttccttatctgcaaaataagtatattgggttggaaagtcaggaagttttgtcaaggttttgtttactttcacatttggctcactcttactacagaggagatgtagctcctttaactatgggaaaccacggttaaaagatttctgtcattattctatgtggactgtgtgaatttctcaagctgatggaataaaacaggcaaatgtgcaattgattctagcagctagagatccttccttgctcacttgtataattaggcatggcttttaaacaactttctgcatctctcagggggctttcaggaacataggaggtggtgttccagtaagctggtgctaatgctgcagcttactgctaaccagttgctcctccaatcaaattcaatccagtacaatatatctttaaaagaacttcaaaataatacagttatagtctgagggtgaattaaataggcagcgtgttccttatctcaatgctccggtttttccttttcctaatcatcagctttgcattcaaccagcatttgccaaatgccaacaacatacctgtcatcattctgaatgtcagaaaatcatgatgaaaaaggcagacttgctgcctgactttgtggaattcccagccaaatggtgtagaaatgactaggcatttacaatcaagtaagagttaccacgaggttacgcgcaggatgcaatgaggtacccatgaggggtaccttatggtagaaagggcaggggaggttctcagggaaagtactggctgacctgacatagaaagatctaaagctaagctcaggaaaagaggtcagagagtggcaagggggctgtaggtggagagagcaatttgagcaaacacgtggcagcttagaaaagcatggtattctgagggaaacactgtttacaatgcctagatcacagtgagcaaaaagtaatggaaatagggtttctttttattattattattattattattatactttaagttttaaagtataataatacatgtgcacagtgtgcaggttagttacatatgtatacatgtgtcatgctggtgtgccgcacccattaactcgtcatttagcattaggtatatctcctaatgctatccctccccccacgaaatagggtttcttgatagactgtatcgaagaagaggttcattacttttttggattgtcaatttcaaagttaagagagagctgcaaatagttgcattaattagccaagaacacaataattacaaataccttcatatcagctacatgatagaattcgaatgatctgtcccaaaatatccctggtgtacaaataaaaatttcaccattaggtattgatttatttggcattttagtactgtactgttattgaacaggacatacattagctatatttgaacatatcattgagtgtgaattacttttaacatatactctttctaacattagggattagattgtggaaagactaataaaagcaggcagagaggaatatttaggtagaggacatgttaggggaattgctcaagggaaaggcagagttgtgtgggcacctggaagaaaatcaccattagaggaaaaaaggagtctgaaagataaagcgttagctgacaaaagcactagagtgccagagctcgtttttgaaccactcatgacaatcaattgttaaatttttatgaattgtgagtgctgattgttaaatacagtcatgatttaaaaagaaataatataagcatacaattaagtgagttatattaaaaacaaacactcaaagatcattactttctaattatttcattgacttattatctttgctgatggagttatttaagactgttgtaattgcacattagtgtgaatgactaacatgaaaatattatgttagcaataaaataaagttactgataattagtagacagcaacagtacactatgtctagggatggattcttattttctttagaggccatgacccatgttttctttggagagcagtcctcacattactgtcttaaaagtagagagtaatatgtggaaacactacgtaatagtgttctcctatacatctcatgccaattatgttggtaacttgaatttggccatattaggaatatttataccataaaaattagcaaataataaatctgggttttatttattgttttgttgatggtccattgttgacgtaagatattagtggatttttaaaaatgttagaaatatatattgaatttaaaatgatatcatttctctagatgctacattgtgagtagcacaaaaaattgagaaaatagtcttccagcattaaagaagtgctatccaacttagcaaataaatctctcaggtcattgacaaacaggtgaaatctaaaatagattcattattacattttggtaaaataaaattatcagccaacgtttattttgaacccatccaccttcatcaattacataaataaattagctacaaatatgagtttagcaaaatcaactgaagcattttgtgagaatcaactgactatagggaatttacaataaagtgtcctatatataggattactatttgttgttaatgggccatatatcctttatatcagtaatacttataataaattaagtgcctatatattttttccataaagtttgttgtgaaacattcactggaacaccagtgagtaacaattaaaaaaaagtaagtcatctattttacaattttgcccacatttggcctttgtgtgagggttatttcccatataattcctgtgaacatactcagtatttagtgttttaagttaatgtcattggacaatggtgacctggatctctcaatactctgctcaccgtagcagatattggagaagctgttcatgtgataagctctggaagatgaattattcatttaatgtgaccttgtatactgttgctcccattaccaccaatcgtgtcttttgtgctatttggagcagacatatatgctctagtttttgaaatgcttctctagggaaaatttgccaaaaaccatgcagtatatggcattgaattttattaaacaaattatttcttttcttttttcttttgagacggagttttgctcttattgcccaggctggagtgaaatggcctgatctcggctcactgcaacctccacctcccgggttcaagcgattctcctgcctcagcctcacaagcagctgggattacaggcatgcaccaccacacccagctaattttgtatttttagcagagacagggttcctccatgttggtcagtctggtctcaaactccctacctcaggtgatccgcccaccttggcctcccaaagtgctggaattacaggtatgagccactgcaccaggcctatttcttatttatttatttaagacagtatctcattctgtcacccaggctgaagggcagtggcatgattacagttctctgcagccttgatctcccaagctcaagcgatcccccctcctcagcctcctgtgtagctgggacgacagatgtgcaaccatgcccaactatgtattttttatttttagtacggatgaggtctcactatgttgtccaggctgatctcgaactcctgaactcaaacaatcaatcctcctgcctcagactcccaaagtgctggaattacaggtgtgagccaccatgctgggcctaaacaatttatttttaattgatcactttgtctcttcttaactgcaactttggggcaatatgttgacactagtgcaaatgttttagagggatgggaagggagagccaacttacagtgaaaataagatgaggggatggggtagggtggagactgatcactaagaaaataggaatgcatctctagagatagtgcatgactactatctactagagatcagtggcttctctttaattattgttaggttactgaaagcttaaggatgtgtcaggaagcagcctgagactatttgctttggttagagatgactttgacacaaatagcttttaccaaagtgaaaggcattggctgttgtttgttttagtaggagtaatttgcaacatgtttttgtatcactcctaatccagaggtgggtatgcactcacttatgtctgttttgagaaatgttgagaacgattttctattaattgtttttttttttttgtcaaagtaatgtgtagttaaaattcactatattaaattttgtaagggtatgaatcaaatttatgctttccactgaatacctagtgcttaggtattcaaaaagctggccacacagaaggtactgaaaacatatttgttggaagaaaaacaagaaaggaaggaagggagggagggaggaaagggataagggaaaataatgcattatatagcgtaactgtaaaggcataaaactcagacataatctcaccaataaaatgtaataatggcaatactgtatttttaatatattcctcgtatagtttgctaggactgccgtaatagaataccagagactgggtggcttaaacaacagaagtttatttgctcacagttctggaggctagaagtccaagatcaaggtgttggcagggttggtttcacctgacgcctctctccttggcttgtattcagctggctacttgctgtgtcttcacatggtttttcctgtttgcatacccttgatgtctctttgctcaaatttccttttcttataaggacaccagtcagattgtattaaggcccatgctaaaggcctcatttagacttaatcacaattttaaagaccttatctctaagcacagtcacatactaaggtactgagtttaggactttaacacaggaattttgggggaatacaattaaatccataatattttttccatttaagtttccatgctatttttcactgcatagttgacatgaaacttttaaacattggtttttagcttaatgttttatattaaataatttactatcccaacaaagctttgcaaacactaatataaaacttaaataaatattattacctgcatacatttttacctgttacttcatttggacccataaattattttcagtgttcaatctgataaataataacacaacatttatcaatatttattgaaaattcatatgacctttttaagattcttgatgttgctcaggggttcttgaagttagaaataatgtggccaattttatttcccatggaagagcatcatggtgtgcttaaaagagctgagatgagaaaagcatctcttgtctagcacggacgtgtatgaaagacataaattgcttcaaacatgtacaaagagccattcatagactttcgattaagtaatatcaggcctgaaggtgatttatttaggctcaatgtttttttttttcttttgcattttatcatacttaattggactttataataaaaatgaaagcagctgaatgatagaatggcttaaaggagagaaagacggaaagaaaaacatatgtaacagacaatcttttgacattgactatgaggctagaaaggacaggccatatatactgtttgatactcaaggaaaacaaaataccacttctaactttgtggctgaggtgacctttccaaagtctttcttggcatatggaaagtgtattttcctatttagcagtaacagcagcagaaaatgtgcttggcctttacctgtgtgtttatggtggcagagcccagtggatcatgtaatgggctgagtattaggctgccagttccagcccagctctaggccattctgcttaaagggacctggcttgaggcctggagttccaggtgattttacctgacttagctatagaggtatcagccctttaatgatcccataaacctgagaatatagagaagattcaaacaggacttacataattctgccccatattaaccatgatgaatccactcaaataggacctttttcaaaaaaaataaaataaaaataaaacttaaattaggtgtcagcatttttttttgtacaaggctagatgataaatattttaggatttgtgggccacatatgtccccaatcaatattcttctttgttttcttccttttgttttttataccctttaaaaatacaaaaccattgttatctcaagtgtcatacaaaacaggctgcagactggatttgcttgtgggccatagtcctcttttgtttgccaatttgcacaaatatatatagcaaatcgaatgtgctccatagtgacgcaggatttttcttggtcactttgccagccaggaacctctggctggcaacgttcccacccgggccaccttacgtgccgcaagagactactggcccactctgcctgccttggctgtacctggcttgtgcaccagctcaggtcacaactgggctgggtgtaccccagcccacctgtgttatagcttgtacccgtgttccagggttcccaagttcttgtctcgcatccaagtagaaaaaggataggctgacaattgaaggctgaggaggatggggaagaattttactgagtgacagaacagctttcagtggagaagggatgcgggcatgatcccccacctgaagtcaggtggattctctctcagtgtggctgagtccagggcttttgtgggctcagaataggggagtgtgtactgattggtttttgaatattcaaaaaaggctaaaacgaaggcaccactcaaaagtgggcatgacagtttaaaacaccagttagggaaaggtaggtatttgtaaaataggtgaaggttgaggatcaatcagaagaaaatgtaccaaatgggaagacagtttcttaagccagtccatggatgtgacttgtagcttggttttcaggctttaaactgtctttggcttggaggttgggtttcactggagacccacccctctctgcctaggatttgtctgtctcctgcctctatcaatagtagtatttttaatcccttattttaccgtgcttatcttaaattatgtcctctgtacacagagcttgcttcatgaggagacccaattagagaacgctctgttataacatggcataacatttcacaagttttgatattagattatctgtcttatctgaccaaccattttgtataatttatataaaatttatataatagtttcattatgtaaagatttgctgctttagtaaatggtgttccctgttataaaaaatgacatttccatggaccatctatcgaccatccatcgatatacatttcatacacagaagttgtttcttaattgtttgttttgtttttggtagcttttcatacttaagtacagggtacaaaactgtattcatttgaatcttctgtgaagaattaggaagatttaatgcaattgcatccctggaatctagccagactcctaaggcaatctccttacaaaactgggtcttagaatctatgacaattgttcatcagaacttcaatgttaggccttttcctaaagaaaatatttttaattatagtagtatcctcaagaagttttcttcagaatatgttatatgattgctcctctagatgagttttgagagaagaaacttacctgaagagtacctgatgaaagatctatctttttaagtaactatggtatacacaattacggacttaaagaaataatatggtaaggtgttgattcacagtattttacttaaaagcctcaaatatgaacttttaaagtagaatgcattacctgctgatcacttatgatattgcaacatttatatattagctactaaatatatcagtcctgtaaaagatataaatgtgctaaattctgaatgatcccactataactttttgagacagaaaaattccctattatctgtatcccctgatacaagacatgggcaagctgtattatggaaatatgaactgccccaagaacataaatctccaaggagaacaagcacttttcatgtagaaagtaggattcactgaaggattagtaactacttgagcttttacacaaacgcatgcatacacacatacatattcaactgagcctactgttactattataattcaaaaaaaattattgacacaggttttctatgaaatgattggcacctataggagaccacttgttcatttcttgccttccaatgtgaaagttgtaaataatatccttggattgtattcactgaatttacttgcttgagtcagatactgatgttgcttccaggaatctaagagtgacacagctatgcttaaatttaattcaggccaatcataagtcatcacattcaatctagtttattttgtgtcttttatgaggaaaagaaacattacttttctggaatatttgacacaattaggtaaatctcaatttaacaatgcattttaaaatacgttaaaatcaatgagataatctgtattcaatacttgttacatacaagtttctcaagaaacatttactggcattttatacacaaaaacaggtaagattaacatcaaccagttagttatgaggactgcccaacctcatgttaatctctaattgtttgtgttgtcacctgtagattggatgcaaaaattatcttttaaagtaaaaacagttcatgtgggactatttataggtttaggccctgcccattattcctttgaacttggggatattaggagaaagcaatgtatcctggcaagcagaggagaactgaacaggtacagagcccaaaggattgtctgaagaaggattttttagggagtttagagtgaaagagatatattttgagaacagctgctttaaaagagatgaagaaacagatttcaggaacttagcaatacatagtgaataggatccctctttataatattttgagaggattatgaaatgtttaaattactttctaaatattgtttaaattactttctaaatatctttgcctgtttgagttgagccaacataggactgtaaggatctttgactaattaactatatgtggattacactttgacagcctgcctttaagtttcagtactcagctgtacttcagacaaaaatcaataccccgaaaacatattttcatgctggttacaacctcaccagatttatggtgcaaagagtaaagatttaccctacaaaatgtttatgtttctcagaatactattgcagagagaagcactgaagactattcagagacctaatagggttccttatgaaattgaaaactagaaagttgtttctaattcaacttccacggatacaggcattcttaaattggagctcttggtggatgatagacggcatggtagctatgtttaggctaattcaagtcatttgctctgctccagtgacagagatttccctgggaatttggctgttactctgagtagaactgctgacaccagttatttgctattagaaacttgagaaatgtgggtgcagtttctcatggaggcttaagaaaataatgctaaggccggacgcggtggctcatgcccataatcccagcactctgggaagctgagtgggcgcatcacttgagatcattagttcaaaaccagcctggccaacatggtgaaaccctgtctctactaaaaatacaaaagttagaggttgaggcacaagaatggcttaaatctgggaggcagagttggcagtgagacaagatcgctttattgcactccagactgggtgacagagtgggaatctgtcaggaaggaaggaaaaaaaaaggaaggaaggaaggaaggaaggaaggaaggaaggaaggaaggaaaggagtgctacaatacaggttaaatcacgctactaatatagtctagaagtggcaagtattaaaaggtagaaaaatacatcaaggtgaaggcctacagttaacgttagtattgtttgtggtctaaaagtcacctgatttttgtttgtattacaacatgcttcactggcctagaaactgtagacggcaagtgatttgtctgcattcatatgttgaatccataattgcacatcaacaagatatggtacttataggtacagcatggagagatttcaacagtggcaatctgccaggagaagatgtagcacagtttgtagaaacatgtgatgtggttagaggcatttcatgtgctgttattaagatagatagatagatagatagatagatagatagatagatactgacagacagacagatactatatgtttaggatctattttaaacttaaaagcttcctgagtttttgcagtattgtgaagctgatcaatgttgagccagaaaatggggacaacattgtagtactttggaaataaaactaagactaaattacagagctcatatttaaggaaggaggatagactccaagtgccggtatagatataggtgtgcttgtctcttaatcttgggttacttacaaaacagatcctgattaatgtggatatatggacagctcaaccctaatcaggagatgccagcagctgaccccaggttctgttcggatgccaactaaaccacttccttgtgacagcactgaacacaagagggactggtataactgcctggactcctgtgtctcagaatcttgtaggcacaggtacaaaacaggggtggacagagttctgtgtttgtaaagggccatctagttgcaccctgaatccatgaggaaaagaatccaatgaataaagaaatttttcttattttatgggcagagaccctgctattaggtgctgtggtaggtagcagacattgacttttcctgctcagcaaagtcagaaacatgagggttggctctggatctaatggtggttacgtttgcagttcattcagactacagcttctagttcacccattcactttaaaccctgatgccaacagatactcacctgcatcatcactcacaactcaccatcccctcctcttcccagttctaccaccaccattactctaggacccaatcctttagaaaaagtgttttgtgctctagttcgtggaatacaataaatctctgaccaatgtttctcaactttatgtattgtgtattagattcacttgggaaggtttttaaaattatctggttcccacttcagagacaggcatgattggtctggagagggacttgggtattgcatttttttaaaaaaagctctccaggtgatttcaaggcacaagtaagaccgctctaaccaaagcacttaaatggaggtaggaggagtattgtggttagaaagggaattgatcactatttatacctttttcaccacctctatcttctacctactcgctttcacttatttgtgatgttgatcagcgtactgaatggtgtaggaaattagagatgatagaaaagggagattgatttatatttgaatgagaaaactgccactaaggagcaataataaatacagtgaaaggtgtgggtgtgtgtggagcgggcagggagtgagtggaggcagaaaatagcatcacccaagtggcccaagtgagaaaggaaaagcttagatagaacagagacagtgtggggacatgtgtaggcatatgggttaaagggagattagaaagtcaggtttcaagagggttaactttgttttataaatggaatttttcttagttgtttttgagaaaacaagaaaaaattaaattgctattcgagtgtttttgatagtcttgtttctttaaataaggcacagatctgacatggagacataatgtagttcatctttatgccctttatatcattgttacatttttctctggatcaaattgtacatatcgaaaaatagaaggttcaaataaagtattaaaaaacttcaatcgatccatgcattctgatagtaatagttgcaagttccagccatggttaccctaaagttttatatgatagttaattttaaataaaatttaatgttcaagtttcacacttcctgcagtggcggggggttagattttattacacagaaggaagtttttggatctggacatcctaaaatctgcgttatcaagataaccagtaggaaaatccctttctgaagcaaaagaagctatatatctgaaatgagatagataatcaaaatgttgaatagggaaattaaaaaagccaaatggagaaatagaattttttttcatgagcactacctctaatgctgtttttcaatttcccagaccaatttggcagtaacacagtagctatgaacaaaagtgatatgactgcttgagttgctgattgcaaagagacaaaatgcagccctttgtggagttgatctgaaatagcaactttccaaaattagagcacttgacaggagagttaaagcgggggggggggggggggggggcgggggggagttgaacaaaataaaagcaagtcaatttttttcaatttttttatagacttggcttccttttgtatttgagagggccacagtcagaagggctatttctggtgtggctatcatatttgatgttgtctgatcagcagtcttttagctgagtttctacttctggatttgccaccgcttttcaccttctttgtggtgttgttcctacttaaaagaaattgtgtcatggagctttctctgggttctgtacactcctgtatggcacagagtctcatttcatctgtatttccatcaatcaaccatatttatattgaactcactgtttgcacatgtatcagacctcggtagtaggctcaggttgtaaagaaatataagttcattagtcaattatttctgcaattttctgctaaaatctcaattgttgagattattttgaaagcataccatagagatagctgagttattctttgaaagattagatggaagacgtactaaacactgaattgtattcaatgaataccaaaataaataatatcatttctgtccttaaggaattttccatttagaagacaaagtaaggaagaggtgaagagctctttaaactatataagcttttcaaagacctgtaagttttttaatcaagctctaaaataatcaacctatttttacttttttaaaaaattaatgtcattttatttctatggttgttttccactttgctgtttggttttatagctttttagacagccttattgctttttatttcaagtaacaaaaataggtaagtgccaagtgtgtccacagtgctactaaggacactgtggtattcaagatgaataatattcatagtctacctttatgattatactgccctttaatgtataaaagaaaccctcatccagagttaggttctaggattagtgattcatgtaaaaattatatataataaaaaaattatatatcataaaaaagcaccttttaaaattttgtaaatttcccgtgagcttctgtatacacggctctgtgtgtgttacactgtctcttagttcagtgtaggccattttcttttgggcataatactgttcctttgggtgaatcccagatgaggttgttggcttgtttacagagtctttttatcccaaaaagaaacaaacaacaagacgaaacacaaaataaaaattgaattgaaaaaagccacaaagcctcattcctgttgttaatgtctgatacgtttaagtgactgttcatcatttaaatatattgtatgatgaatctccactgtattgaaaaactacataagtaccttaaaagaagtaaaaataagaggctgtgagatttagagaaaaaaagaaaagctaatcttccaataaaggatccagaaagaaacttcataaagcaaactgtatttgagattttaaaatcagatttaattttgacaaactaaggaccttccaatataagaacatgcagtctgggcaaaaacacacaacttgcaacaaatttaaaatctgttcaaaatgaactgtaaacattctatactgatggaagtttagaatatgagttgaccattaggatgtgaaggtgaagggcaaattgaacatgttattagcgagaaggggttgtgcttaactgggaaggccactgaagggtcttatgaagacaatgccttagttacggcttaaatctaggtactaattgtctaaattctcatagggagtagggaagagaaaaacttgagacagaagtagattgagctagactaggatggagataaagcaagttggaattgggagagtgatattggaaacaagaaagtagagagaaaacccaagaaatattatcgtgtgtgaattttgcttcaaactggtggttgacatgggcagtaggaaaaagtctgtgtcagaatcactttgggtcaactaaagtttctacagtaatggcacacaattatttggatgaatgcagatgtgtgtgtgtgtgtgtgtgtgtgtgtgtaaaatgtcagaacttatgtgtttgtgcgtgtatgtatatatatgcacacacacacgtcagttctgacttttttttacatatatatgtttgaatatatacataggtagtaactactaaaccttggtaatgttcataaaataaccattcatcataaaaaatctcccctttacctaggattcatttaaaacatggattaagttatgtttcaagtgtttatttcttaatggcatatggcacattcctgttaccttattatgaacatcacatttggtattgctcctgccttttttatgtctatgtactatatcttggtttaacatttcattttctgtgctttgcactgaagtctcttaagtgaaaggaagttgaaattctccaaaggggttagaatccttttcaagtgatgaaatttgttagcaagtcttttaaatctagaatgtaattaagttcatcacaattactttagatcaatagtgagtgcatttgtggttatgttgaatgtgctttaggaatgtattctgtcattattattattaattatgtgtgttacctaatagaaaaagaaggctattattaacgcatacctacatccatctactcatctgtccaaatttctctcatcacttgacttttgatcagatcagttttacttgggctttcaaaacaaaaatctattttacagtaacttagaaaaagcagtattttcccatatccttcataagttctgatttttttgtcaagtaatttatttcagaaactcaattttagatgttgagtctcattccagctccaaacatttttttcattcttaattatattaataatttgtaacatattttgctttattttctcataggcaaaattgagtcaaagatgtataccctgggtaaggatcggagtagctagggtagtatctaaatttagaaaatataaacaaaaggtttgccatggttcgctatatctgttggtatccaaatatcaatgtccacataaaaataattaatatagccctgtaaattttataatggtatatgtactgtgtctctgtgtatgtttcagatcactatttcaataactatagatcctccataattggattcaatatctgaattataatttatcattcatcactctaattaatgtatcttttaaatggatgcagataaattccaattaactttcagcgactagttaaattttcaagtatgatagagcacatcatgcaacactggatattcttctgacatgagctgaggtttctaatctatgtagggcatttaaataacattttcatggatttgaagttcctccaatgcttgtgatggcaacgggaacctgtgacttctgtttaaccatatggctcttaagtagcagatgcttggagaaattgatgaaagatgtgagtcatattatctgcagaatttttctaaattattttttctaatttgtcaaaacattacataaaagaatgatagcgtatgagtaacaaaataaattatacacttcaaaactctgtcatatttttctgcttagtatagtatcttttttctgccaaaggctattaacacttcaataaaaaatctgatgaggtgttgtctcactgtttacaaatgtctgatataagaggctgatttggttattttcccatctcattatagaattttatgtacaacaagcctagaaaccagcatcttcagagtatgttacattgtaacacaattacattgactcttaaactttgactgtgactctcagcaagaaatatatttcacatcatgacccagtaaatacatttctatattttccctagatcctgataaactgtaagaaaaccttcacaaagcaacatttaacttcactaatgcattcttatatttcatcttctaatttaaaaattaatatttgtaatccagtactgcataaaatttaatcaaattaataggtaaatatatgttcctttgtcagttttccatattttggttaaatattctgtttgtactattccgtctttcatgaattaggatttttaaaatacttaatataaaaaggggacacaaagcatctaacaatttttaatgcaaaggtaattgttacaagttaaaaagaaggtctctcatagttcataaacttctataatttaggaaaactagaaattacaggctgttcaaagctagaaatattcttgacaataagatggcatacttttatctttgttcatatttaagagtgtgtgtggcctatatatcaatatcataaacaatctaaatattaactcaaaaaattatcttctttttctttttggcttatatccaaggaaaatgagaatgcttttatttaaatatctaaaggaagaaatttatttgactggctatctgatcaatgtagtcaaccaaatgacaattttgataaattaataaccacctctctctcccaattatcactttatatttgcattctttaaattggttgtttctaactcaggttagtctgatttgtccatgttgcttagacacaaaggagaaaagtaagattcctcttctgactagcactctaagttttagattagtgaatgagaaatctttggaacactctggaagcttcaattctatatctacaaaaacgtgtgtattctaaatattttgctcagttcttttgatttaccaagcagattactctctctgtggaattattaggacctattcttatctctttcaccatctgccttcccagtgttgtggtctttctgcaccttagcttagctaggtccaagttcttgtctcacaaccaggaagaattaggcacacacacaccagagagtgagttgagaatttatgaagcaaaaggaaagctctcagcaaagaaggaaactggggcacagggtcccctactcgatggtgagaaagtcccccatctggctaggtctggggcctcttatggactcagagtgcatgctgattggcttgtgagtaggcaaaaagggtcaaagcaaagacaccactcaaaggtgggcatgacagagtagaagaccaattaggaaagggtatataaatataaaaaaggtgaagggtggggatcaatcaggggaaagcatgccaagcaggaagatgagttctcaatctggtccaaggacgtaacttttagcttggctttcaagctaatgacagctgatgacaggctttggaggtagggtttcactagggacacgtccctatctgcctagacatttagctgcctcctgctgctctcaccaagtgactgttttcttctatttccacatttaagaaaatcagaaatgtttcttttttttttttttttttttttttttttttttgagacggagtctcgctctgtcgcccaggccagactgcggactgcagtggcgcaatctcggctcactgcaagctccgcttcccgggttcacgccattctcctgcctcagcctcccgagtagctgggactacaggcgcccgccactgcgcccggctaattttttgtatttttagtagagacggggtttcaccttgttagccaggatggtctcaatctcctgacctcatgatccacccgcctcggcctcccaaagtgctgggattacaggcgtgagccaccgcgcccggccccttcttaagaaaaaaagtattcagtatacctcacttgtgacagatataaaaactagaagaataaacacatttcttgctaacaacaacaaagtagtatcattcattcatacatatatatgtcgagggggtacttttgagtaatgaaatgaaatgttttcctggtagaaatacactgaagctgtttatctttcatgggtccaggttttttctatgctttgtttgtttttgtaaaagcccttaaaggtttcatgccttccctggaatgtaaatattcttcaccctctgaaatccctaattatccatttgcagaaatatcattatctagtcctgttatgttgtctcttctctagagttttgtttgtacaatagccaaattttcttatttcccaaattttggcagaagttaacttcagaaaacttgtcctgaattgacattgtacatttctacatactaccaactttccatttgtagaaataagggagactctattactaggatttcaaaggattttcctattatacattgtgaaaataaaatgaccttgcccatcagacaagttgctttatttaaaaagtttttccttcaatgcttgaatacactccagagtaccaaggattctttctatttgtaacaacagttgctaattatgtgagtaaaacctagaatagaatctcaaaagtgggcctccatgggaggaataaaggaatttcacaaggtgccattaaaagtatggtatctcttgcctcatttttaatgagtcttttctccacaactcataccagggaagtcctaagtcacaagatatgtagatatatactttcatatcttctgtgtccggtgatcattttagataaatgagagtctggctattttcggaatgtctgtgtcccccaacttcatatattgaaacctaatcaccaagataccatcatcatatggggtcacagggagataataaagtcataagggtggtgccttcatgaatgggattagtgccctcataaaagagaacccagagctaaccccttataccatgtgaagacacaccaagacagtgccacctatgaaaccaaaatgcaggtccttaccagacatcaaatctgttggtatcttgatcttggacttcccagtctccagaactgtgagaaataaatttctgtcacgtataagctatctagttgatagtattttgttctagcagcctgaacagactaagacaagtccctgcccttggaaaatttccaaatgaaatgcaggaaagccatataaacaataagtatggaaaaatggagtcaacgagtggttgggagaaagagagcaacacagtcaatgttggtgcagaggatgaggatgtggggttgaggggagtggtggggcatcaaagaagtctttcaggagaaagttgagaaagttgcaaccaaattgttactgagggatggaattccaggtcacgtgatttgaaagtaagactttcataatcctgcatagattctgaacaattgggccacgagaagattttggactatgtatttattttcaaacatcttttttccctgtcagtactggaactggtgtagagctggctaaataacagctggctattgtgtcccaaatgctcctatagaaaaattaccaaaaggaaaatacaaactacatagtcagtattttttataggcttaatcatacacataaaaccatggtccacctttaaaattaaagcctgtcgacatttgtgtggcataaattgagaactaaatttaggtctgtctgcccaaattgcttcatatcaactgcctcatacataaacacacatggagacacacagacacacacacacacacacacacacacaccactctgcagttgtcttcagtgatcttacaattttctgcccgaggaaaacttcaattaaaatatgtttctaattgacctctgctataagcacaactgtatcacctgggagtggggacacaaacacatattagcttttttaacattttaatcgattttttttttcctatggcctggtcagcacttggcccagatcagaggcctgggaaaaaaaaaaaaacaaacaaacaacaacaaaaaaaaaccagtactaaaaccaagtctttgctagaagggataatttaaggcatctggatctttcctaatgagagaagcctgggtagaatgctgttcttagggacatggggagtgcaagaagctacatgaagctctggagtaattaggaagtatgagagagggaagtgaaaatgggcaaagtgcatcaggagatactacagacgtacttcttggagctgcctcaggttaattcgctaatcgccttggcctgagagtatcaccgctaaattatctcataattacagtcaggagggcagaggtagaaagaaatgagtcaaaccgtaggctatttaccatggctcgggcttcaaaaacagccaaggaggcaaagaaagaggaaaacttgtcaaagacttttaaaaaagatatgtttgtgtcaggacaggctgtgaagggagagacaaggcacacaggaacaacggaaaggacttctgtaacgctgggttggtgtccttgactggtgaattgggactgatgagttgggacatgagcagtcactgtcatgtggcaatgattttacgtcagcagcccggcatatctggtagcagcaggagggaaaaataaaatacctcctctgattgaaactgttagagaattcatggaagaggagcacaagtgcccaaattgggaggagacagggattgtcaattgaaatccctgctcttgtggggagaaaaatctttctgatgagtgcgaggaactggggccttgtttcactcttttatagctcatcttagaaatgataccctttcttgcctataaaaaaaactgtttgaggcttaattcagaatgacatccccatttaggccataaatgtttgaagcttaagcttaaaatcaaacttgtcttccgtctctctgcaacaccgacaacccctagggcactccaagtatttttatatgtataaattgcttttgctgtacgaaagtttttaaaattcagcctttgtctcacaaaggaataggcgaaagtattaaaagggtggtaatctcagcaagagttttaaattcagcttatgtcaggcaaacacaatttagttcatatgtttcatgttatctaagtctctttttaaaaaagaaagaacaactcattatgtcagtgaaaagcaatttataatgagaccatcaccaataattgtttgttttaggctgtgaagtggtagggtactttcctgcctgggtagaatcaagtaaaaataaccatttttttttctgcatttgcaaacaggataggttgtaatgaataagcctccagtacaacccattgcatttcaaaacagacattttgatgaagttagaataacatgaaaaatggcaatacttttcaagtcgaagaacttgtgcagtttagtggcttcttaaatcaaatttcaaaaaatattattcattttaataatattgttgaactttgaataactttattgcctttctccagatgtgcaccctaactcttccagacataacttaatttgtttccataacatacccaaagaggatgtggtagtttgcctactcaataaacagcaacatcccacctcccaggatttagccatatgacaacctcatgattgttgacagagctgagaagcaggatttaaacaataaaactcgaggcacaatcaaattgcaaccacaaagtccatgcaactaagcaagtgcctttttctcttataagtgtttccttagaactgacaaaatcttattttactgacaattttaacaagtgtgttatttggttaccaaacccactgcctattaggaagcaggaaacgaaaaaggggatggggctgtgaagacttgcgcaatgatagtagttaaatgtgtcagcaagaaagtcgaagaaaatctataaaaagcgtacaaaggaactcaaaaatcacaagaaccgagctataaaggtaaacacaataaaggcaaacagacctacaaacttttataatccctgatgttactgctatactataattggtacacctaatgatggtcagaggtcgctatggaagtgttattttaagttccatagtttgatcagttttaagaaaacaaacagagtacataactgacttagattttcatccaaaacgctcatctctttttttaaagagaggtttaaaaggttaaactttagctgttatgttgtttttgttcatcttgactaactcataactcaatactgcaagtgagctttacttacaaaattaaacaactagtataaaaatataatatagttgttgggtaataaggatgtccaagctcatttaatatatacccagtttcaaaatcatcctttaaaataaagccagggaatgttttcaacatgtctacttgtggctaaatatattacaacatttttctggcatgattaagattgcaggttaaattctccatgtggacctgttgtcttattttttgtcttgacccctgtttatccccctaaatggcatataacacataaaatttatttccactttcagaaaaataaccacataattactagagtaacatctgattatctacatattttacaacagcatcttaaataataaaaatccattcattcaccgggttcttatttcatatccgtaatgtagagagggaaggagaagagctagctcagaacatacaacttcttgtggcaggcccagtgctagtgtcacattatcttgcaacgaatttggagagccaatttttaaagaaacggaagcccatggagggaacttgtatggaatgtggaatattctcatttcctttagcttgctgctggagaggggctaaaacaatccctgtaaatgtttgctagttgttaacattatggtacacattagtttgattgagtttcatatggtactctgtgccccattcaactcatttaatgacttagtcattgtaataaacagggcaaaatgacagagtcacagtttcagtcccttctctaagtagcttctgtgattttaggccagtattatgttttctaggctgtggtatgctcattaaaaaaaaatgaagaggagccttcaactacctctgccaaggagccaacacactcttatgataaaaaaaaaagctgccagtcctaagttggggattaatgaagacaaattttaacaactttgttccttgagatattgtggacacattgcagtgtttggacaagagtatatatctcaagataacttatatttttggttctccataaacaaaagtatgttaagaaaaagagagttagcaaatacttacatggcaaaactccaagataagcccaacttgagaaagagtttaatttcatatacatattttgattaataaggtattagcatttagaagaccgatctggattttctacatctgataaacaactaagtgtagagaaagaaaagtaaccttggtgtatacgtgtattttgttttaaattttcttatcgaatactattggttggctagtttataatagtaatgttagtgcattacttgtattgttttttatttcttctttcttcactgttttttcttgttttgttatacatgttaattacatgagcattaagtatttcacgtgtgttttgttaactactgaagtaattatgtaccattaatctcaaaggtaattatgtttttaaattccaataatttctcataggttttcagaaataaattaccctgaaaggagaagaatgtggaggcattttagtgtgtattgctgtgtgttgtctcaaaaggggaggaattttgcatattattcacagaacaacctaattgaagagggaaaggatattgatatttattgagaaaataatgtacaccagtcactctctatttggtgtatagttagttctagttgctatttaatgttttcatcataacatttctttgaactaggcattatctccctttaagaaaaagttacagaagcactatttatagaaagtagcacacctatttctataatgccaggtcagctcccaaagcaagtgctttttcaactatatgatgctgttccttggcttttattgttaattgtcctatgtggttgactatttattagcacaatttaaattcttcactatctatacatctggtagatatagagaaaggggttagatgacacatatatacttttttgctgataagacaaaaaataatcaggtattttctttgctttacagtcctagttttttgcatatttgttgctagttataaatttctcattacttttttccaatatgcaaacattttataggtgtatgttgcagagtcagtttgtttacgtgccatttttgcaaatggataatgttttacatgcaggtgtcatatatgagtatttcctctccctttctctctctcttctttttttttttttcttttttttttgagatggagtctcactctgtcgcccaggctggagtgcagtggcacgatctcggctcactgcaagctccacctcccgagttcacgccattctcctgcctcagcctcccaagtagctgggactacaggcgcccgccaccatgcccggctaattttttgtgtttttagtagagacggggtttcaccgtcttagccaggatggtctcgatctcctgaccttgtgatccacccgcctcggcctcccaaagtgctgggattacaggcgtgagccaccgcgcccggccccctttctctctttaatgcatacttggaatttgtcaatggcatttgagtgtggtgtttgtggagtacaaatataaacatcatcatatatccaaaattttcaatcacttcatttgttctagagtgcattaaactgtgatttaatgggaaattaaactgccttcttgctgttttaaccataaaatgccttagatgtatttcaaggcacagcttgtactggaccaaagctatctctaatctaatagagtccagcctttcattttattttcataatccctttatatttctacaaaataaaaaaagctaagtagtactgaaaggaaaaaaaatgaaaatctcagtaagactagagttgatgctaagaatctatccaaagtgattagcaggtattggttttaaaggctttttatattttatcctgtataatttatatatgtttgcactatgaaaataagggatttggaaaattaaaaatacctgtcaagcatttctattcatatccaacatctcatttaaaagaaaagaaaagagacgtgaattgaaaaggtttaatgatttcaccagactattctacttccaggataagattacttcctaagatgcattttatgttgcatcaaagcccattttaaagttatttcttctagccaggcattgtggttcacatctgtaatcccagcaacttggcagactgaagcaggaggatggcttgagtccaggagttcgcgacaagcttgagcaagatagcgagaccctcgtcttaaaaaaaaaaaaaaagtgcacctgtagtcccagctactgaagtgggaggattcctagcctaggagttctaagctgcagtgagctatgacagagtaaggcacccatctctcaagaaaatttatttaagttatttgttctaaatattggagtgggtaacatttctcttaaaatgtcttgataattatctgcttgatttgaatgaagttcctgacattccagttaaattattttatcttcacttcaaattattaacagtgttacttctcagttgccaatcagggacatgaaataggcacacacacaggcatatttagaaggtaaactcgtatatggcaagcatgccttcaactcctaatgtttcagaaatagggtgtctaacttaaaacctattctccaaataaagtggccattcttcctcagccccaccccatcacacacacacacacacacacacacacacacacacacacacacacacgattatttcaggacactcacaagcacttctttacatttgttgcctactaacatgagtattttgcattgaataagggttttcttttacaaggatccttcatgacaggcttattcaattaaagggcaacatacttataatttatcttaggataaatagcatagaaaaatatcttggaaatatcttaggaaatatagtagatgagtggattatcagtttacaagagaattgtactcaaggtgagtagactgtggcaaagaataagaacatcggaaatattacaagggataacaggttgtgcgagggaaagagaaaagaccgtttttctctaatttcacaagtttttcctaatttttaaattttattaaaaaacacatgacataaaatttaccattttagccatttttaggtgtatagttcagtagtgttaaatatattcacattttttgtgagtcagctctccagaaccttttcatcttgcaaaactgaaactctgtacccattgaacaacaactccgcatctctccctccccacatccagcccctggcaaccaccattctactgtctgtctctatgaatttgattactgtaggtatctcatataaatggaattatacatcatttttataattatttgtgactggcttatttcacttaacataacgtcctcaagagtcatccatgttgcagaattttgcctcatgttaacattacctatacctaaatcatctcacttgacttaaatgttgttaatcacttcatgatagttgtgtgtgtgtttgaaggtgtgcatgcatgtgtgtgtatgttgtacatttagctataggtaatttggattatacaactgttcattaataaaaatatatacatatcataaatattaaaagttgtaaatatttgacagacatttccccctttaaattatgaaatatttcttgtggctaaaataggaataggctgtgttccgtctgcataaattagtatggtcgattcttaacatcgttggtcctttgccacaattggatctcttaccaaatctggctcctttctattctataagagacatcaaggaaaggctctctcatctcacttctcttttgtctaatcacttgaccattccatctcagctctttcctagatggtagttgaaaaaattatcttctttttttttttcttttttgagacaaggtctcactctgtcacccagactggagggcagtggcactatcacagctcactgcaacctttgtctcccgggctccagtgatcctccctcctcagcctcctgagtagctgagactacaggtatgtgccaccatgcctggctaacgttggggggaaatttgtagagacagggctttaccatgtagcccagctagtctcaaattcctaggctcaagttatttgccggctgccacaaaaattttctgctgcgactcagcctgttcaatgagatcaggagatcaagaccatcctggctaacacagtgaaaccccatcgctactaaaaaaaaaaaaattagccgggcatggtggtgcatggctgtagtcccagctacctgggaggctgaggcaggagaatcacttgaacctggggggcagaagttgcagtgagccgagatagtgccacggcactccagcctggcgacggagcaagactaagtctcaaagaataaataaataaaatattcttatatttaccttcaaaacaatttcactgaaactgtttcaatgatatattgagtgaatacatatcatttcatagtttatatatataattattttatattgtatataattatacatacttttatttgtaatataaaagaaaacatagtgtttttaggtaagaatttatcagagtcaacttcattgataacagtattcttatttctgtcttatttttcaaactctcaactgatttttggagggttggtcctcttagatctgttattttttcatttcctgcttgttctaccacttgatgatcggtatttcatttgttttgccataagcaaaacttcttgtattttcccaagtaccatcttattctgtgtttagtatctctgtttgtaacctttggatcaatcactatgacttctttctctccttagaggtatctgaaacatttactaggctttatttttatttgctttattcatttatattcagcttgctactcattccagatttccatacaatttttcagttgcgaaataagtcttcctttctccaaactgtttgacattagaagttcacttgacttgaatttataaaaatgattattgttggccgggcgtggtggctcacgcctgtaatcccagcactttgggaggccaaagggggcggatcacgaggtcaggcaatccagaccatcctggctaacacggtgaaaccccctctctactaaaaatacaaaaaaattagccaggcatggtggcgggtgcctgtagtcccagttactcaggaggctgaggcaggagaatggcgtgaacccaggaggcggaggttgcagtgagccgagatcaggccactgcactctagcctgggtgacagagcaaaactccgtctcaaaaaaaaaaaaaaaaaaaaaaaaaagtttaataggttattatcaagatttcaggtattgcttttggtcagaatcctcaaactaatttttttaaaatgcttcaatagatgtttgataaatttcgtattccctttctgagcaactggattttacttcaacaattttcacaatactgtaacacatatggtatattttatctttacaccttcccagggtaaagttcacagaaaaaaaaaaaaatcttcaaatactgtgttcaggctgacaagatttcagagccacacaaatataactaactgctttcttgtggagaattatttatttctcattttctctctggtaaaactagtgcctctctttgctagtgtcaacgatcaatctacagacactatctactcatgagaaagactgtggccaaataatactatgcctatcagtaatacacacactgctaccctagcaaccacacaacactacctgcaataacaacacaaacagcagcaggaacaacttgtgcgtctcatgaattccttgttttcttcagtttgctttaattcttgaatgatacagcttacatttctgaactaattaactatcaatgccctgtttggtcagtacactgaggcgtggaacatgaaatagactaagacaggaatatagccttacttcttagagaaaagccctttttaaaaataaaaaataaaaacctattatgacaactcctgagataaatttatgaggaaatctgaattttcaagccagtgaacatattttaatttttagagattcccttagggaaagaaaaattgaggaatgaaggtcgttcatatatttgacattactcttttgaattagaaacttgtaacaattaattttatatgtattttccataccatttttaaaacttgagccatccttgtggtaaaattttagctagcaaataaagtgatgaaatatttaaaaagtaaaacagcaattgctatggaatagttatatctggctttatagagctaagaatagttataaagccagttgccctacatatattgtaggacacaaatgtttggaatgtaatgaatgacaaaggaaagggaaaaactgctgaacctagtgtctctgaatgtcattataaagacatgatatggcaagcatatgaattaaaggcttgagactccttgaagggttgaagcatcgtaattatctataactcagtgttaaagaagattttcagacccaatttttttcatggatagattatttttaaagaaatattcatgttttagggaaagctattttagactatttgctgtgtggtggctgaacttgaaaatatagctataggttttctttctcccatgaagatatttttacctggtcattactttaaagattttaccctcccatcctcccacctacctagataggtgttttgataccaaaaaaataaaagatgtaatcaatatctgtatgtatcagaaaaagaaactactagtcaagaagtgagatgggaaaagtcattggggagcttaaagtgtattacctagggcaaaatcgtttttaaacaattctcacatggaagtagatgagctagggattggagattatcctaataagcagaaatcttttccattatcgggagcagtgtcagagagataactgagaggttttagtggagagaagaaaatgcaagtctgtgaaagttcatagagagtgcttcaacctggaaaacaaaaagccttatttgcatatgatgctactagagacagtgaacagcatacaatccatgatcatcatcagttttcaaacactttcatgggacatgtatacacttatcaggatacctggtacatttagatgagaggtgttaagtatttaagcagaagtattccaataactaatataaacagtcagatctgatgagtttatctgtgctctggaagcccaaaggctaatctgtttacatttcaatgtgtaattactgccttctcccatttggataagcatcattgagatcttgagagcaattctttctctttatctgtgaaacttcagtgactttagtataaacaacaaatgtctcattttcaaaactcgaaggtgtttgccgtgaagttttgtgctttgtgcagtctgttgtgtttaggttaactttatgttcgggaaacctgtaacagaagaaatgatttttgttaagtagtatgcctactgctcttcatatttctattatttttatatggtctttcaaaggatctaaggatatgttggcaccatctagggaatatgaggaagtaggaagactctaaggtttgtcctcacatatttggagcattatgcttagccatcaaattaatttcaaaacactgatatttctcagtccacaccagaattccctaaactgtggtaacaaggacaaaaatgcttattaagttgatcaaattatttagagatcatgtatttgtatgtgtcttaaaagcaggttgatagtgctctgcaaaattggggtttagttacgtccaagaagttgccattgtaattaattcatcaatgagtttgtaatctttatcatgtaatccaggagaaatattcatgtctttctttactccatccatgtgatgtaatttattttacttaaaaaaactatttatgtacatagaagactcattttgtagatctaaattagtgcctaaaatgataattttttaatgtccacatttctaactgagattatagaaagtaaggattcctagtcaaagtatcttgaataccagtgctcaaagccagaagaacttggtgacaaggtcaaatgtttcttattcccgaaatcaaaacagtaaagagaaagaagtaaaatccaggctgggcgcggtggctcacgcctgtaatcccagaactttgggaggcccagacgggtggattacgaggtcaggagacagagaccatcctggctaatgcggtgaaaccctgtctctactaaaaatacaaaaaagttagccgggtgtggtggtgggtgcctgtagtcccagctacttgggaggctgaggcaggagaatggcatgaacccaggagtcggagctttcagtgagccgagatcacgccactgcactccgtctcaaaaaaaaaaaaaaaaaagtgaaacctgatatgttttccttatgaaattaagagtacacttaagcaaagaacaatttatagagaaagaaaatgactaaattcaacaccaaattttattaatttgaattcaacattcaaattttatgctagtctattctgctcaccttccacccccagattctgatttattattagttcatacatgccatattaatgcaatcgttcagtactcataatgtccttgtctctgactgtaccatggaatatcttgacactccccgttgacttctctgggctttcttctttctttcaaaaaaaatagaggctggagatcttctttttaaatatttaaaatgttcagtggctctcctggaggaaaatgaatgagctaaagtccctttagttgatgatttcattttactatggttgtgaatgtgataaatgcacctgtctctagagaatgaaactgccagcttcgaggagtgcaaatgtgactgtaactgcctcaatttcaatgagttattattcactgaatctgttctgcttgtaccgggatagtttgtgcagagatcgtttacagctgcatttagaaagaagaagagtaaataaattggcatccatggaaaagaaaaagccgacctatgtataggtatatccaatatagttttgtttgtttctcgttaatatttagaatgtcactggttaaagaaaaagcgtatcctcataattaataatctgtattgtttcatgaatacaccgtaaagaggatctcctgggactgatctgagttttctggaaactcaaatcgtcatgtattgcaaatgtattgcttacaactcagttcctttagatgttgccctgggaattatagaattacattttgacacactggttcattttacttatgggtaattttgcacatacgcagaaacctttacctaagttccttcctgtctctagggcttccttcaaaatgttccttacttattacttcttcaggcagcgtacacttggttcttgctgttataatctaaaattgcatcagtcaacagggcattgaagtaaatgaatttgagttcaaaatgaaatattttagttttggaagttttcatttttctatcctagcttttaagtatgtataaattgggaacatttctaatatttcattgatgaactcactactaaataccaatgactaggcctttgggtatatacatacataaggcctaatggaatacacagtcacttctcatctagcattcactgtgctctgggagattttcttcaagcaaagatggtgggcagtgactgattttttttttctttttttctttttttttttttttgagaaggactctcgccctgtcacccaggctggagtgcaatggcacgatattggctcactgcaacctctgcctcctgggttcaagtgattttcctgcctcagcctcctgagtaacagggattaacaggcatgtgccaccacgcccagctaatttttttgtatttttagtagaggcaggatttcaccatgttgttcaggttggtctcaagctcttgacctcatgatccatctgcctcagcctcccaaagtgctcggattacaggcatgaggcactgcgcccagctgactgatttcttttggctaaacactttttaagtagatgatctattttttcccccgtttatgtatgcaattatcaccaggaaaattgtaactatactcaataatatgggctttacaattggacagacactttatttacgatatctgggctctgtggaatattctttgaaattctggaaatcattatgtctaaggctgaggtgtaagaagctctgcattccttcctgccttgattttgctacttctaaagtaagcatgacagtgatataatagtttatgaagactgactaagaaacaacttgtgtcctgccaggagaatacagtaatcatgctttagaagcactgaatttattgaagtcacaaaagtacaatttaatacattaatgtagtaagttattaaatggtgcccctatgatctgcgagaggtaatacactatcacgtgttccaaattttcacaggaaaagaatcatagaatcctatagctgaagggggctttagcggggatctctacaaatgcctgccaggtgcttggatatcctccatcacatccagccatgagaagttacttgtgtcatggtacggtgatcattactccccagcgcagctcaatccacttccagactgttctaattgttggaataattttccttatgtaattcaatttcccatctattaatttatgagatatttatttaaaactgaccgtattccaggaactgggctaaacgaagaagagtagtgaattaatacagaaatcacccttgatttggcagaatattttccctggtagtgtaggtcacccctattgtggtgataatcccccaaatcatacagcaaaagaaacaacacacagacaaaaaccaagtcattcttctaggatgttttcatccaaggatttgaaaagatttaggtgatcttccatttttcatcctatgcaatctgggctatgctactactttacagattgaaaatatatttaaaaatcactgaactttcaatagtcaccaatgatcactgttctagttgcagttacaattaggtgttcaaggaaacacttataacttaaatttaatgtctaaatcttacacctttaattggaaaaataatgtaataagtgagcaattagattatctagtattagaaaataactgaggattggctgggcatggtggcttatgtttgttatcccagcactctgggaggcagagacaggaggattgcttgaggtcaggagttcgaaaacaacctgggcaaaacagcaagactccatctctacaaaaaaatttaaaaaaaaaaaagaaaagacctgagtattaatgtatgcttcagggtcagactgaagcttttttttttttttttttgagacaggggctcactctgctgcctaggctggcatgcagtagcaggattatacctcactgcagccttgatttcctacactcaaggttttctctctcctcagcctctcaactaactggaaccataggcatgtacaactaaacctggctaatgtttaaaatttttttaaatttcttcttcttctaaaaaaaaagagggatacatgtacagaacgtgtaggtttactacatagatatacatgtgtcatggtgatctgctgcacctattgacccgtcctctaagttccctcccctcatcccccgctccccaacaggccctggtgtatgttgttcccctctctgtgtccatgtgttctcaatgttcaacacccacttatgagtgagaacacgcagtgtttggttttctgttcacagaaacttatgtgttacttatgtgttagtttgctgagtatgatagctaccagcttcatctatgtcactgcaaaggacatgatctcattcctttttatggctggatagtattccatggcatatatgtaccacattttatttatccagtctatcattaggtatttgggttggtctttgctaaatagtactgtgataaaggtatgtgtgcatgtgtctttatagtagaataacttatattcctttgggtatacacccagtaatggggttgctgggtcaaatggtaattctggttctggatccttgaggaattgccttccacaatgtcttccacaatggttgaacgaatttacattcccaccaacagtgtaaaagcattcctatttctccacagcctcgccagcatctattatttcctgactaattgccattatgactggcatgagatggtatctcattttggctttgatttgcatttctctaatgatcagtgatgttgagctttttttcacatgttgcccacataaatatcttcttttgagaagtgtctgttcatatctttggccactttttgacggagttgttttttttttttaattgtaaatattgtttaagttcattataaattcaggatattagaccttagatcagtagattgcaaaagttttctctcattctgtagattgtctgttcactctgatgatagtttcttttgctgtgcagaagttctttagtttaattagatcccatttgtaaattttggcttttgttgcaattgcttttggcatttttgtcatgaagtctttgcccatgcctgtgtcctgaatgatattgcctagtttttcttctagggtttttatggtttggggttttacatttaagtctttaatccatcttaagtataaggtgtaaggaaggggtccagttgcagttttctgcatatggcttgccggttttcccagcatcattcactaaataggagttcctttgcccattgtttgtttttgtcgggtttgtcgaagatcagatggttacagatgtgtggcattatttctaaggtgtctgtcctgctccattggtctatatgtctgttttggtaccaataccatgctgttttggttactgtagccttgtagtatagtttgcagtcaggtagcgtgatgcttccaactttgttctttttgcttaggattgtcttggctatacagggtcttctttgattccatataaaatttaaaatagttttttttttccaaattctgtgaagaatgtcaatggtagtttgacgggaatagcattgaatctataaactgctttgggcagtatggccattttcacaatattgattcttcctgtccgtgagaatggaatgtttttccatttgtttggatcctctcttatttccttgagcagtggtttgtagttctccttgaagaggcccttcacatcccttgttagctgtattcctaggtattctattctctttgtaatgattttgaatggaagttcattcatgatttggccctctgcttgcctattgttagtgtaaaagaatgcttgtgattttcacacattgattttgtatcctgagacttgctgaagatgcttatcagttcaaggagtttttaggctgagatgttggggttttcttaatataaaataatgtcatgtggaaacagagatgatttgatttcctttcttcctgtgtgaataatctttatttctttctcttgcctgattgccctggccagaatttccaatactatgttgaataggagtggtgagagaggcatccttgtcttataccagttttcaaaggcaatgcttccagcttttgcccattcaatatgatactgaatgatactgacgctgtgggtttgtcataaatagcccttattattttgagatatgttccatcagtacctagtttattaagagtttttaacatgaagggatgttggattttatcaaaggccttttctgcatgtattgagataatcatgtggtttttgtctttgcttctgtttgcatgatggattacatgtattgatttgcatatgttgaaccagccttgcatcccagggatgaagctgatttgatcgtggtggataagttttttgatgtgctcctggattcggtttgcagtgttttattgaggattttcgcattgatgttcttcagagatattggcctgaagttctctttttttgttgtgtctcttcctggttttggtatcaggatgatgctggcttcataaaatgagttagggaggagtccccccttttcaattgtttggaatagttttagtaggaatggtaccagctcctctttgtacttctggtagaattcagctgtaactctatctagtcctgggttttttttgttggtagcctattaattactgcctcaatttcagaacttgtttttggtctattcagggattcaatttcttccagtttagtcatggtagagtgtatttgtccagcaattcatccatttcttctaggttttctaatttttttgcatagaggtgtttatagtattccccgatggtggtttgtatttctgtgggatcagtggtgatatcccttttatcattttttattgtgtctattttattctctctcttcttctttatgagtctagctagtggtctatttttttgatttttttcaaaacccagcccttggattcattgattttttttttttttggagggtttttcgtgcatctatatccttcagttcttctctgatcttagtttttttcttgtcttctgctagcttttggattagcttgttcttacttctcttgctcctttaattgtgatgttagggtgtcaatttgagatttttctagctttctgatgtgagcatttagtgctataaatttccctcctaacactgctttagctgtgtaccagaaattctggtacattgtctctttatgctcattggtttcaaggaacttcttgatttttgccttaatttcattatttacccaggagtcattcaggagcaggttgttcaatttccatgtaactgtgtggttttgagtgactttattaattctgaatttgaattagattgcactgtggtctgagagactgttatgatttcagttattttgcatttgctgaggagtgttttactcccaattatgtggtcaatttcagaataagtgccatgtggcactaagaagaatgtatagtctattgatttggggtagagggttctgtagatgtttactaggtccacttggtctagagctgagtttaagtcttgaatatccttgttaattttctgtctcattgatctgtctaatactgacaggtgggtgttaaagtatcccaatattattgtggtctatgtctctttgtaggtctctaagaacttgttttatgaatctgggtgctcctgtattagggcatagggcatagatatttagaatacttagctcttcttgttgaattattccctttaccattatgtaattcccttttttgtctcttttgatctttattggtttaaagtcagttttgtcagagactaggattgcaacccctgctttttttgtttgtttgtttgttttgctttccatttgcttggtaaattttcctccattcctttattttgagcctatgtatgtctttgcacataagatgggtttcctcaatacagcacaccaatgggtcttgactccttttacaatttgccagtctgtgtcttttaactggagtatttagccatttatatttcagattattgttgttatgtgtgaacttgatcctgtcattatgctgctatttggttgttttgcatactagttgatgcagtttcttcatagtgtcattgatcttttatattttggtgtgtttttgcggtggctggtagtagattttcctttccatatttagtgcttctttcaggatctcttgcagggcaggcctggtggcaacaaaatccctcagcttttgtttgtctggaaatgattttatttctccttcgcttataaagcttagtttggctggatatgaaattttgggttgaaatttttttctttaagaatgttgtatattgacccccaatctcttctggcttgtagagtttctgctgataggtccactgttagtctgatgggcttccctttgtaggtgacctgacatttctctctggctgccctcaagagtttttccttcattttgaccttggagaatctgatgattatgtttcttggggttgatcttctcgtggagtatcttaatggtgttctctgcatttcctgaagttgtatgttggcctgtcttgctagattggggaaattctcctggataatatcctgacatgtgttttccagcttgtttccattctccctatctccttctggtactcaaatcaatcgtcggttcagtcttcttatgaagtcccatatttcttggaggctttgttcattccttgtcattcttttttcccttttcttctctgcatgtcttatttcagcaaggtggtcttcaggctatgatatctttttttctgcttggttgatttggctgttgatacctgtgtataatttacgaagatcttgtattgtgtttctcagcaccatcaggtcgtttatgttcctctctaaactggttgttctagtggcaattcctctaaccttttgtcaaggttctgagcttctttgcattgggttagaacatttcctttggctcaacatagtttttgattacccatattctgaagccttcttctgttaattcgccgatttgatcctccatccagttctggacccttgatggagagacattatgatcatttgaaggggaagaggcactctagctttttgagttttcagcattttttctttgatttttttttcttatctttgtgagtttgtctagtttcggtctttgaggccatgctgacccttggatgaggttttcgttggggcattttttgttgttgttgttgatgctgttgttgttggtttctgcttgtttgtttttctttcaatagttaggcctcctcttctgtagggctgctgcagtttgctgggggttcacttcaggccctattcatctgattcactcctgtgcctggagatgtcactcaagcgggctggagaacagcaaatgtgggtgactgctccttcttctgggacctctgatctcaaggggctataacctgatgccaataggatcactcctgtatagggtgtctgacaacccctgttggagcgtctcacccagttgggtggcacagggcacaggacccgtttaacagggaactttgtcccttggtggacggggtgtgtctccaagctggagggaaacccactcgtctgggctgcctggatgtctcagaactaccaggaggagaggctaagtcagctggtccacagagactgcaggcacccctcccccttggggctcaggcccagggagatccagattctgtccctgagcctctggctgggagttattggagttcctgcagagaagccccgcccagtgaggaaggatgggtccgggtcaggcctgaagaggcactctggctgcagattaccacagctggtgtgttgggctgtggggagaagtcttgatacagagccgtccagcctccttggcttcagcagggggaaaagcacagcctgaagctatagagatggatgccgcccttcccccaaccggggagcttagcttgttaggcagttgccagttccagtgctggctgctacccctcaccctcttccgaggtcaaactgtttagatagcaggcagccacagctccagccagtgctggtcacccctccccctgggagatcagtaggcttaagcagattccagctgagaggctgtaaaataatctgtgccatccaaggttgggacactaggccctggtggtgtagattcgcaagtgggatctttcaatcttgggttccacacatctgtggaaaaagcacagtttctctggctgggtagcacgctcactcactgcctcccttggctaggggagtgggttcccctgccccgtgtggctctcaggtgggccgtcacactacactgttcttccttctctccatgggtcacaccaggcttctagtaaattttgatgagagagtcaattttgatgatccaccaacccagaggccttcgttgggggtgaaggattcacacacttattatgttttgttttgttttgttttgttttcccatgggagcctccaaatgcctctgcttctagtcagtcatctcggccccacccccttaaatattttctagagacagggtcttgctatattgcactgattggtttcaaactcttgggctcaagcatttctcctgtctgtggcccacaaagtgctgagattacaggcatgagccactgcatctggcccttttaaaatatcttacaaatatcttaaaatgccatctgtaaggacatatgtgaaaaattaaatataaaaaactgtgttctcaatttttctcacttgctttcttagatgtgccttcatctcacatgtccttcaaagtagcccttgactgaattatttatttttttaatgataacatcaagcaagaagaaataaagttcagatcagactagttaacacttgttaatttggcattttccagccagccaactttaaaaatgctttggattatgaatcaatccaaataacttcaccattaaaaagggagtctgagtccaacttctatagtattttaatgttgcttaaaacatttctattattctgtacacagggcattgttacatcaaataatacagttgagacattacagaatctaacattttggcctacttttgaaaaatcattatctatatgactagttcctccctctccagacccagataaacctctcctgatatttcagagatgttttgagttttcatgaaataacttctgtttttcaaatgttcatgataatctacattcttttttttctcaactggaatgcctttcacttttctgaaaatgcccttttttttatatttctagggcctgcttaaaatcctcctcttcagtgaagtttttcctaacccccatctcttaacacaagctagaaatatgttcccctttttgagacattgtagcgatttttctctacctcttatatgatatttaccatttcctgagttgttttcaaatgatctcctattgaggtgagatttgttagaatctgtatctgatttactttcctttctccaattagatagcatagtgccttacatacatttggtaccaaataaatgtgatggccgggcacggtggctcacacctataatcccagaattctgggaggctaaggcaggcagatcacctgaggtcaggagtttgagaccagcctggccaacatggtgaaaccctgtctctactacaaatataaatacaaaaaaaaaaaaattaactgggcatggtggcacacacctgtgatcccagatgctcaggaggctgaggcaggaaaattgcttgaacccaggaggtggaggttgcagtgagctgagatcgtgccactgcactccagtctgggtgacagggcaagactccatctcaaaaactaactaaactaatgaatatgaaataaatgtttgatgactgactaaatgaacaaattaacatatagaaaaattactttatattacgttttgcttaataaaagtatatagttagtttgtccaagtatttatatatttctcagcctattccatatcatggatatcaaagatctgtagatgaaactacttaaaagcttattttgttagcaatgttgaatccttgtttccttaactcatgatcaaatgccgaattctgatggatatactatcagagtcttcattttttgggtggttgtctttgtggcaaagaacttctttcttatattcaacctatttctcatgttcaagaaatacttcaactcattttacctttacttcttgaggcactcaggtaaaaatagaatcctacatctcttttacagttggctctaaccttcctttttaaatagtcatatgcatagtgatttttttaattttgaaaactgtatataaatctcatgagaaaatgtatgtaaaattattttgacattcttaagtcctatgacattgtgattttgttagccagcccatccttaatgctctaactttatcccgcacttatgtccaagcttctttccttggttagttatgtttttgtttctacatataatagaaagtaagatccttaaggagcagcaagcaagtcttaaatatttgtctttattgcttagcatgactctggacagttctatgcttttagtaaatgtttgttgaaagcctgaataacatggaagctattcagtgataaacaactgaaccaataatatcaggcacaaatttggacaatcaccgtttgctcccctatagctccctttggcaaaatctacaacagaagaagagaggcaaagttctgccttctttactgtttccaatataaatccaggctaagcctgtattaggaaattggtttcctaggggcccttccacatttaaccctaagaaattctaatcaaggtgaatctttagtagtccagatttaaggtctgtttagtttcccaggtaaaataatgaaagagttcataagcagatttcccacatacctaatgtaatttcagagcatattctaaacacttagagagtctcttttaacatataatagtcatcacctaatttctcatcttttcttattatttaacatgtaaaagttaggagaactcaatgacttcacagcaaatacttttccttggtcaaatctaaaaattaatgtaaattataggttgaatgctttaagatgtcattaggaaacctacgtaaaaagaattggaaacagaaatatggcaactaggtgtcctgaaaatgatttactaacaaatattttcatatctattggtttttgttctttgaaacaaataacaaaatccttagcctatgaatgaagtagttatttttaggtaaatgttttctttccttaacaattttatatataattattgcaattcttcttggataatgttgtcttcagtaggaaaaaaaaatgatcgcaatttgtgaatcctaaagtaattagaaacatggtcttataagtttcctttccttagacatctgatgccattgcatagtcaaggaatttgggagttttgttcaatcaaacttgcccttttaaaaagttttatttataacaacaaacacaatagaattataactgaattatactaaaatgatttcctcttttttctaattttctaatcttttttcatgatcttcctatgtaagaatgctagctgttgctggccaggttgattgaagcaaattaagataacccttagtgaactataattattaacaatgatacaatttctttaagcaaattctgttcaaagtgcctttatttctaggaatttactttagttttatttttaattttttttaagagatgggagtctcagtctcttgtccaagctggagtgcagtggcatgatcatacctcactgcagcctcaaacacctgggctcaagtgatcctcccatctcagcctccagggtaactggaacaacaggtgcatgacattgcacccatccaggagtttatttataatcagtaagaatacttaatgagaaaggggatgtggtatttccatttcttagatgagaaaattaaaacaaagagaggttggagattttatatttattagatagtcacgtttcacatgaagttactcatactggaagaccacacataatggaaaacaaataccaataaagaatggtggatacatttgcatgccagttacactgatagaagatatacagttcaccatcattctgtcttccatatggaaaattatacaattcttattaatttttaaattttatgggaatgctcataattatgtttttgtgcataaagtcactatttctactttacgtaattctcaacatgtctgattttatataatttcatttactataagtgaaagttacatcgtttctttaattatttcttctctttgacagcttgggtttgtttttggcagagttttaatttcccagtctgcccttttttgttgttgtttctgcagattcaggaggatattggagggatcaccttgctagttcttttttctttttttttttcctgaaatgtggcttagtgggttgacaaagaacagtagttgttaaagtattttaataacattttctgccaggcatattattagtggaaggtgatttgcagccagaaatacctatatttgaatccatataaggtcattccttgcacctttaggcaagttacaacctctcttataaaataagaaaagcagctcatgacttggtaaaataaagaaatgtaaagtgccaggcagagtgcctggcaaaaaaaaatggtgctcaataatgttagttatattttcaattatgattgaccttaagaaactggtatttccagaagcacagcaagaagatgtgagatgaaagtcaacagtgattaagatttcatttcctgattaaatatacaaacagtgtacctcttaacttaccattatgtaacttagtttaatcttgggttctgtttatccttgaactgatatattttgccatttcatatacgcgtatgcgtaaagcacaaaatagtgcaggaatgttaggaagtgtggaatgccattaactttactactaaaagtttgggataaatgaactacataggtagaaatatgagtaagataggatgttcatcccaataaaatgataataaaatctttattgcatcccacatcattacctgctgtattttgcttatgttggatataaagaaaaaaggtattgcagactctttctctgcagctcttaaaagccttgattgatcatctttttgctcctttccacttataatgtcaagttccttaggcttcagatgaaaggacagaaaataaaaatgtaatgaaaaaatgtattctaatttcatttgaatcgtgtctcccagggtggggtaaataagctaagccctgtggaacacactgtagatataagcaacccggagacactaagccagaaacataaaaaatgttctcattcattcttagagcagtgaattcttgaattcacagtatgcagcattgggtgtatttggcctacaactctgaaacacaatggactcttaattcacaaatgtaaataacaattatttaggtggctctaatagtggaccaagacaacagagctaattatagcagtatcaaggttaccaactttgctcagcacacaaattctttttcaggttgcccaaaacattattgaatataaataaattcttcatttaaaatgtcttattccttcaagttcttttattcattattaatgtgattatgattatcattattattacatctttattgctaggttttatttttaaaaacccttattaccagatataatgcactgttcttagttacttagaaaaataaactcatgcttattttttgaccttttgccacagtataaatcattagagtgtactacttttacattgttctctgttcgatgaagctccatctttcccttcagtttatatcatttctcttgtcctttgtgtctgacacatgcttttaggagcttctagtactgatgtcccatttttctttcaaatacatgctgaacgtatccctttgacacataaccaaacttcggggatcataacaggagaatttacatgaataaaatgaccattatgtagcctcaaaagtctatcagagaagtcacatcaccttgattcaaattcgaataatttctactctccttatgccccagcccaactcttattctctctttgtccatgttgcactactagcctcactagttatttctttaagatcaagaatatcctaaattcagtccttcaacgtgcttactctccaatgaacatctgctttgctattttcacagattcttctttttctcctgtttcagagataaaaacaccagtttgcctctccaagtttaactccttaaccctcattctttgtcccatgtcttctgccattattgccttagaaaatgtgttccacattatctctcttatagtccacatttaaaggttctgattatgtactagaatctttttcaaaaactgttaacacaaataagtccttcatttctcaaacaaaatcttcactcaatcttctaagtttggaaatctaatatatcttttatttcctgaatcctataaattgcagtatagtttttaatttttcctttttgtaaaataatttcaacttttattgtagatttaggggtacattttcaggtttgttacgtggatatgttgtgtgttgccgaggtttgggatgtgaatgatcccttcacctagatagttagcatagtacccaacggttagctttccccgtctccctccctctcctctccatgagtccccagtgactattgttgccatctttatatccgtaagtactcagtgtttagcttccatttataagtgagaacatactgtatttggttttctgttcctgtgtaattctcttaggataatggcctccagctgcaaccatgttgctgcaaaggacatgatctcgttctttcttacaccatacgttttctacttcattttattccttacctatttttacactttttaaatttaggttcttctcaacctgttctatagatactacatagttttacaacttctctcaaacttcttactccttgaatcttttgcattttaaaatgtcagtagccctcttcttttatcctctccttactgacattctgttgtatttcattcattttcttctagcttccctaattaatgtttctctgttttcatcatggatatatttccttcatcctgttttcttaaagaggagtgtacttggaggttctgcctgacttttattttctctctacactcttttctttggcaatttatttatttccaatctcacttctatgtagatatttcccatttcaaaagctctagtgcttacttcttccaaatctggatcaacatttctaacaaaatgttgaacatctccatctggatgtcggctaccgtagtttaaccacaatgtgtttagagctgaattaataatctaaaccctgaactactctgtctgccatgcctatcctgtaaatgacactggttttattaaggttctaacaatcacctaatacccaggcttatttaacaccatctttagcttctctccacttcatatatccagttctgtttgctcaagatttcagaagttttcacatccctttccaagcccaatttccatttctgctacctctacctttattgtctcatattatggtattatcatagtttcttaattggtcttattgttcatattaattaattctctaatattccagggtgctttgagataaaatctttgtttccatatttctagtgaggaaatttccttcctcaaaaaatatgcaattattaccagttgtctacagaatggagtctaatttccttgccctgtattcaaggtactcgaatatttgaaattcattttccttatgacctaggttcttaagcacgctcatacatctagccatttaaacaagcaactttcttttaaacacttcttactttgttttacggagtgaagccagcggttgtgcaactttctctgcctggaatacccttgcaggtgcctgtgaagatctgatctacacttcaaagtctgtattctctggcccttattatggagctatgtagagattgccagagataatattaagtatgcaaatgcagacatcaggtttagtgagtaatctgcaaaacagaatcatgaacgtgtagtagaggtcagtagtggggagtaatagtaaattaattagtactatactgagggagtaagaaaaactcagtccattgcctctctgagttttagataagtggatagctattggatatggaaaagaaatctctgggtccattccaaaaagctttatccaaatgactgaaatgttatcttaggtttcctaaaagaaaggtacctcttagcctctgacatagttcgtgtgacaccgtgctcataaatccttccctgaattctctaggtcagcttagattgaatcgacttctcagcctccattatacatcctttttcctcttttatataacttacctattatttttgacccaatgttaaaagtgtttctgtgtataacacatctctccatttaaattgtagattcctggaggctgggagctttgttttacttacatttatatcctcatttctattctgtataacccttgttgcaaagttgacaggcactactaaacatttgttaagtgaatttgtaagtaaaacataggagatggttaacttctattggcaatctgttctggaaataataaaatattttttaaaaataagctatcgtggtaatgttaagacttacagtatatagattgtgaagaattcacttatttttttgcctaaaattctagataagacaaacacattttgtctttatattagagtatagtagaaagaggttgtctttgtactataacatgtaaccattatcactttaattacagattagaaggagaggaagatttgtgaaaagtgaagaaaattgacaatctctgatttcaatcttagactaggctatgtcatgtttaaacaaagacatttagcctttctgaaagaatttagtgcacatgttgtgggaaatgaaaatggccaggtcattgtaaagaggtgaaattggtaatgcagaaaggtaataaatggggatattcacagagacaggatgtttaaatttccaagattcccatctttgctgtcttctagccctgaggcattagttgtcctagtttcctgtttaacttttaaatttattttgaacacagataaaccaacaaatagagataaaataggcccagacctttctctgtaatattaatctattggagaaaatgtttaggatttatagaagttggcttaagttctggaatatttaatttcaatgttagtagattttattttatatggagtttcattttaggaacataatggcatatagcatatctaaacctatatcatagtaaataatcctgtgatatcatccagtaagaattacatttaacctttattttctgctatgcattgtggtgttaggaatattttaaaatataatttccctcatttcaaaaagctcataatctttaaccaagttctaccctgcttaaaacccacaaggtagactagttaattcatagtttgattactcaatctgcattgcaaatgcccacctttttctgggagtcttagttataagtagcatatttatcaatagtagaaagaaaagtaaataggaatcttgcatgttccacgagtactacaaagaccttgctgtaatccagcagttaatgattatggggaaaatagaggttatatttcctgacacaatttcctctctcatattcagatctactaagtatacttaattatgcttgattattactaaatcttctgacctgaaactagttggagttttctataaaacctcctaaaaaaaagtactttatttttaaagaacatataatttctttaatgtccacaatttatcaaatttgtattgattgcctctgctacaaaaatttttctcctttcctttctccctagagaataatttatcatcagtgtgctaaaacataaacagaatttcagaatttcatctagacttaggcctaaattccctgtaatccactgatccaactagctaagtgagccagagaaaggatcagttgaattattacataaattccctttggaaaagttgaataaaatgcaacgtctacaggatatatactctccatgagagttgtaaaaaacctacaagcctagtaaattggaaaagcaatccagcggtttagctatttaagtactaatgcagagataagattgcttttaaaaagtatcacaccctcttcccagtatacttttgtttctttcctattcaggttgccttggggaaaggagaatgaagttaatgttcctttgacataagtgcactataatgctggatgcattaaatatcttaaagtggatggaatagttaggtagctaatttagtatatcgtgaatggttttagatagtgcatgcagcttctgttatttttcttaaccattttcttttctttttgcatgtctcaggggtcaaaagagtaagcacaaagcccaaagcaattaagaaggcaggtggtataaccagaagaacttagccttagtctgaagttaagggtacagttcaaggttttggatcatggaaaatccatttaaattctcagagtttctgtttttttggatgcaaaataaggaacttggatgaaacgatttgtttctacctcgaactttacaaattttacaatatcctaaattctgtaagactaaaaacaattatttatattatacaatattatataggtaagtaggaaaatgtatttttcaaatgaatttatcacagatttctagaatgcagtttaggccaattgtgcctcaattttcaattactttttcatcctcatgatcaataaaagctgtcatttaccatgcacctacaatattcaatgcatggtgctggcaatgataaaactattccctatttaaaacaaatttactttatcacaccaatgcatacccatttcttaaaattacaacagatatctactacccaaattaatactgacttttaaccataaagaaagcacttcttaaaaataatgatacatctaattggatgaatgatatcatttttaatgggatgtgataacaagaacagacataatctaatctgatataaagtgacacctcattttatcagcatcaatttcatttggcttagatatgttctctcaattgtgatcatgggcatatggttagtattcttattcaccaccgaactaaataataaggaagttgtcagttgcactgctgacagaaatcaatcatagacctttgatagaactagtatttttctctgagaataatcatttaacaaatttctggaaaaatattcaccattcctaaaacaagtaaaaaattttaaatttaagaaatgaaagaaacataatagtgatggagaataatatttttaaatctttaaaaaaatggccaaacttcaagtattaatatttaattatgatgcatcaaaatagtgtaccaaaacaatttaaaattttacattaaaattttagcaatcgttttttcttgagtttcttaaaaccaatactagataatattaataacctaaggctaaagttaggagcaagactattgacaaaaagatactctggtctgtagacttgggacaaaaatgaggtacctctatttatcagttcttgatatttttattccttatggccttgaatagattcatagcgctgttttaaaatataacaactgagcagcatattgatttttgttattgtgatcttacgctgaagatgatttcctatttttcaggctgttgacctacttaggtcttgaagatactgattagagattgccagaatccattagtgcgtaaacatagtctacagctaagattgatcttagctgaattacttcttacttgtattactgttatatccatgctttaattttggctgttgagtcatgatacaacaggacaaagtatcttggacttaaaaactcaaggttaatttaaactgtatattaatatgctctgtagggctacccaagacatagtcataattttgctatgaatttgttattgttgttaagaatgtatagagaatcccattttatgtgaagaagagagaaggtactgaatgtgatttgattttctagggtcatgatactccaattaggaactctttaggtactgtgtagctgatctcttttaacttgccaagggaaaaaaaatatctacctcttttttctcataaggcctgacgaatgatgaggagatgcccaccagcagcctttcctaacataactttactccagcataggtttctggcaaagtaaattaacaccctaagtttaggtgtctccttggtgacctactagttcacatctattgctcacctttaaaagtactctaaagactaagtgcctaatagaatgctgattagaaatcaaccacttcaattccaaagagcaattgactcaggaaagtgaggagtttccatgagcaacaagtcattaattgcccctgagattgcagttatcattgcagacctgcaaagcctcaaatttccagattcctgggtaatttaggttgcaggccatgggcagagagcattttttagagcaagtgtattctggccaaaaacaactgtgtaggtggctgtggctgaataaggaccatctgtttcctcactgcccacagcccaactgctaagttttggttatggtacccacatgtaggtccctatttacatattagttatggtatagacacagctaccataataagatccaaaaattcagtgactcaaacaaaataaaaatgtgttatacactcttagtctagagtctagaggcagggtggccctctgcgggaataggaaggtttattccacaaggtttctccaggtttcttctttctcgtggctcactatttctaaggatgtctggatctgctgtgcaccacatcagtgttccagcccatgaatgaatgagaaaggcagtgaaggacatggatcttcttttcaggaacggatgtggtagttgtgtgaatcacctttactcacatcccattcatgagaacttagacatattgccacatgcagctgccaagaagatagggaagtgtagtttctctctgcggttattcacatgcacttaagaaaaaattcttgcatttcaccacccaaggttttcccagtatgttactatggtaatccatgccacactgaaatggtggtttattttctttcttgcattatctccataaaatatggactgttagtcaagaattaattatttgcttacttttctttctgtgcactctcttcgtttcgttgttgtttgtttgtttcctgtgtgtctttgtggtagagtttttttgtttgttttgcttgtttttagccatttcagacattttgttgagaacagaataaaacctctctactgtacaggaatcagtaagtctatgaaactttctctacatattccccttttaccgtgtgtatttactattatttaaattatatttaaactatgctttttgttcagcaacatcagcagagaatagagtgactatcaatgtaaatattatttacatccaatcctctgggaagaggaatggaagaaaacagagaaaggagtgatattataagaagaaatatgtaggagttgtatagagtagatctgaagcttagaacttttctggcttacttgctatgggacctggagcaaattacttaacttctctcagccttttcttatctctaaaacagagatactattgattacttcctgacacctgttcaatattttcaactgttgggtagaaatgagcctccgtatattcagccaagaaagtacagaactgaaaactgatcctacttttacctgatttaaactctcatgttcttaacccatactaacctctagaagttttcttggaagtgatatttgtttaataaatatataaggatctatttgtatctaataaaggagttcctagtagattttacatacagctgttaataagtacccccaatcaaatcacttagataatgtctggaatttgtgaagatgtaaccaagtctctatgaagatttattcagtatcatgcagatggtgaatgtaccacttttggagggattccctatttttcaaatcccaacaatcaggacattgacagtgattaaatttcactaacagtggaagctctgtttctaaattctgcctggaaaatgagtgatttcacaaaagacacttgccaaactggcattcctatgaattagttttgtgcttctccttgggtagtttctggcaaatagttcagtgtcagtgcttcaatgcccgtacattcttacaaggaagtacagctaattgtctccatttttacctaatgtaaccctggcagtgaacacataaacctatttgtggtagtccctagtgaaccacaagatttaatattaatggataacaggaaaacattgagattatgcaggctcacgggtcatcacccatcatgattattatgataaacattagtttagataaatacatggattaggctataaaactctagaatgtgtgtagcggccataaacaaacagaaaacggaaagtcttcactttaaacaaaacaaaacaaaacaaaacaaaaccctgcagaaataaaagatttaaaactggcttacttacccttttcctcacgttagtatcctggtatagaaagtgcttttgaaagtgcctgtgatttggaatgctgaataccttttcaaagactcttttaatctgtataaagatgtagaatatatataaaatacagtgctctacactcaccaggtacctcatcaacgtggcttactagaaagctgtgtaggaggttgtaataagggtttttaacatttattcaaaattttacaaagcatgaaggcaatttttcaaaaaacacaaataattcagataatgacgagcttgttccttttcactgcagaaattttaggcaagatgacattttaaaaatcttcttttatgaagaatttagccaaacgtatagtattttcatgtttactcatttatttaaccagagattgattgcatgcctgctgtgtgcctgccactctgctttgtccaggacttgaatctttagtctcagagacaggacctcagaaacagtgcttggtacatagtaagagctcagtaaatattggttagattttaaaaattgttttatttttatttacttagttacacatataattgtggctaagtaatttgacagtacttggtttcaatgtcaccactccttctgagcatttcatgacttcctctgatcaatctgattgctacagtttctgtgcctcaccagctccttgtttgtacttaagaagaaatttgtagtggtgtttgtttatttgtttacatatatttcctttagcagagaaaatgtgtgcatctgtatgtgtatatctctacatcaggcattctgtccatttccagtccttcatagagtgcatcacagctagtggaagttgaacgtctgggcatcttcccctttgggactttatgtcttcattctgggacagtcactaccaacagatggtgctattaggttacgcagttcccaagaacgaagctcttctgtgcattaacatcacctgaagaacttgatacaccacagagtctttggtcttacctctaaagattctgattcagtaatttgggagggactcaagaatttgcattcctaacaagcacagtgatgcaggtgctgcaggtctgtggaccacaatttgttagcactaatgtagaccactaattttaaaggaacaaaagactattcaaggcagtcattttttgaactaaattaaatctaggtaggtatatgtgagaatatttatacatattggcttcttagaaagattataggtcatagaaacatatcattaaaaaatgtaaaatccataagtaaggtattttgagatttctttgatttacagtgttcctgctattatccacattatttgtcttaatccaagtatgtctttcctttcatatatgagtggtataaagttatagtaaaaatgtactctctaatcctgcatttcattcttcaagaaaacaattgttaacagtttcttactttttacagaagtgttatatgcagatatatgtatctatatctattcctatagatatataatgtatatctattcctatagatatataatctatatctatgtctattcctatagatacatataatctatatctatgtctattcctatagatatatataatctatatctatgtctattcctatagatatatataatctatatctaggtctattcctatagatatatataatctatatctaggtctattcctatagatatatataacccatatctaggtctattcatatagatatatataatctatatctatgtctattcatatagatatataatctatatcttgtctattaatatagatatatataatctatatgtctattcatatagatatataatctatatctatgtctattaatatagatatataatctatatcttgtctattaatatagatatatataatctatatctatgtctattaatgtagatatataatctatatctattaatatagatatataactatattaatatagatatattatataactatattaatatagatatattatataactatattattatagatatattatataactatattaatatagatatattatatacctatatctattaatatagatctataatatatatttctatatatttatatataatataaacatatataatatattatatattttatatataatatattatatagatatataaaaatatagatctatataatatatattctatatgatatatatctatatgttatatataaaattatatattatatatgtaatatacacaattgtttttaaagatagttttttaaaggtaaacatagtaacctgctccaaaatcaacatggtgaagcaatgttaaaatagcagcatgaatgtttcctcaactatactgtcctgtttatgcagatgtttgcctgttgaccgagaaaaaatttgggataatttgtccagtatgcacatgtggctaactattcctgtatatttaaaagagagttcatgaagatacccaggagactattctctttatttcctttccttctgcacacctcttgcctttgatactgatattttaatacttaatttctcacaaaagcagccagtctcaaggttttattcataaccctttgcttgcaacttgaccacttataaaccaacattatgtttcttaaaattgaaattgatcttagaaaacgccctcttccttatctcttattctgcatgagcttggatgttatcagttataggcagcagtctccactggaaagtagacagccattgtctttgggaattagtctacattaagtgtcctcatcctataaagtgcattcattgacactagaatctagcactagacaggaaaagcctgacactttccaaggaaagttatcatccctttcctctttccccttctcccactacctctccatattgtttcttctacatacttaacttactctggtcttctttcaatgtttctcatataacgtagtttttgaatccccttattatccaagtattcttatatgttccaacatatcagtgttcttttaagagatggtgccatggaaacagaagctttcttatttttttccaaatagtgatgctccccaataatcccagtagaattttttttattggtttaatacacattaggaatcctagaccacattttcttcataatcccaccatacatttttccgccaagccaattaactacctgaattttctcaagaacatttttttaatacaaagggaatttagaaacttctataaataataatcatacatttgctatgttatgaggctgtgagcctcctatcactagcagtgctaaagcaaggatatgcaccagatactaggtaagctgtggaagaatctcatgtagctggtaattagtccaaatagataacctttaattctctttatggtcatatctactataattttactattacttaaaatgaaatttggagtctatgatttgttttaagcatattaccaagctatagtagattcatacaaaattgctctgttttaatactcacaatgagagttcattattgtgtcactcagtggtgctggagtactagacctttgagttccaaaaattaaaacgcttgggaaggaagtaattgacatttttcactagaaataatctcatgacaccaatatagcttttaagtacaatttggagaaataaaaaataattttgtccttgagtctaattagtttccttgataccaatgatactgcatttctctgaaagaaacaaatgataggaacatagctatcctggcataataggtttctaatgaattactgatattcatataaaaaaagaaagactttgcatttaaaaaagattttgtattaaatatcacactgtgattattctcacaattattacaaaatacactggaaccccagttggtgctaacagtcaaataataggctatttagggggtagaggcatcttaattttaagtagttgttaactatttacaatgcacaaattccataataaaaagaaactgaggaatattcctgaacaccaaattggctgtggaaaataatggggtgtttattatttttattaaatgagagcattatgatccatcaatccacagataaaataactggtgtcttccgcaggactgtcattttcactttagtatttttcatagggccaaatttggagagccaatgtggggtgcaagagttgctttaatgtaaaagccactcctttccacacatttgcatgctatgtagccaattataagaatggtccagtttaggtttgaatatattccaaggaaggtaatacagactctttgctttgtcattttgccaaaattgttcgaccagtaagttttaattttgctgattgggggctattgataaaaactcctaataaagaggtcaataaaaaaattcatttaactgaatgagagttttggtgtaaccttggatggcatttattaatttctataatggtgaatcaagagctaaatctagttcataataacaacgttccctgataagttttagaaatagagggcttgaagaagctcttttttaaatgtttaatgaataaccttggactattgtaaaatacattaaaaaaaagcaaacaaactaaaaagttctattaatatgtgttatatatacatttatttttatttcatttatcacaattattttatttcaattatcacaattattagctacagtgtccaactacacccttattaacaagaaatacacatctatgtaatatttatataatctttgcacagagttactaaggttgcagaccataataacttatttcctatttctagcacagaagctttaaaataatataaaaatatcttgtaatatgcttcttagtaaaatgtacttattcagtatttgtgtttcatactgataggatgtaaatttttattgtatctactcagattatatgtaaataaatgatgttttctcttggtaaaattacattccaagaagataaattaataatatatggcatatgacacatcatcctttcaaagcactttaagtgggaaaagtagatgaggacttgttctggaatttgaaggaatggatgaatacaggaaaacattggggaaggtagattgtacattcttattttactggtataagcaattatttaaattaaatttgcttctttttaagtattaagaggcttagaaaaaaattagaaagcaatctagaaaaagtaggagagaggtgggatgtctattaagaaaattagggagatgaagaggttgaacgaatatccaaagacatgtatattgaagggtaatttgaagcctttggataacgcagagccaataattctaattctaggttcattttactttacgttatagtactttttgagaagcactctctataagttattgtgagacattcaaaaatcaatttgcattggacactttttttcctgaaggagctaaaaatctgtttacaaatggcaatagttctacgtattgtagaatgagaaaaatttaaaaatctatacaaagagcttattccaggagctgaagtgagaaaagttcacttccaaataggattttaggaaatttaaaaaggacaggtttataaaattcaccttctttgtgctttttcttcttataaaggtaacatatggctattgaaaaaagttgtaaaacatcggtaagccaaaactaataagttaaaactgcctgtaatctcgctacttggagataaattagtcatgaatttgagagtcagggatgaatgagaagtttcaattgaagccaaacataaaatgcatgtagtcaatgacaaaatatacgtatgaggattgttttgtgtaagttctaacttaaatttctacatttgaacgcagtgtttctttttctttttccgagacagggtcttgctctgtcacccagtctggagcgcagtggcgcaaccttggcttactgcaacctccgcctcctaggttcaagcaattctcctgcctcagcctcctgagtagctgggattatgggcatgcaccaccacgcccatctaatttttgtattcttagtagagatggggtttcaccatgttggccagtctggtctcgaactcttgacctcatgatccacctgcctcggcctcccaaagtgctgggataacaggtgtgagccaccgctcctggccctgaatgcagttttatatattacaggaaagaaacttgtttttgctttaaaaataatgacatatcctctctgttttgtaattcgcaaacactggctactaaggctgtttttaagattaaagaaaacaagggaataaaaacatataaaaaagagaaaggccgacaaaagattctcttgctaaggctgaggaagtaactaaaaagagagactggtatcagaaaataccagtcttttggggctgaacaaacattattttcttgggaattcttccaaagtaaactttaataattgtaattactgccttctcttaaatgtatcatggtaatatgattacactctattcccctatatgttgcctcaatctgaaaattagctaacagtgagggctcactttgtgccagcttctatcctaaaggccttatgtgcaatgtcttattttttcctcacgataacgtcatgaggtttacatttatcatctccatttttgggatgtggatactgagagttgctgccccagatcttataccttccaattcatagaattaagattgaaactttgttgtctaactccaaaatttgtgctcttaaccacattactatatgtcttctcaatgaaacagctaattttatataacgtaattttccattgaatgtgtggcattatatctttctcaagtacatggttcaaaaactcatcatgacatctggtctactgctgtagtagataactgtatatctttccaactgtatgctgtcattttttttttaaccagcaacgtttaaaaagacaccagatatttcatacttcaggggattatgttgcattgttttaaagtctgggtagcagattctaagatcttaggacatgcaatgagaaaatgttagctctttgttgacacaagcaaccacataaatactggatgtcttattattcagccataccatatgcactgtcattaagcaggatttatacatacacccatctaataaaggctctttgctggtgcctaaacaaaatgatttgctaaatcagcacagtaatatggattaacaatcaagcagagcaagtcttgggtcatgtaccaaaaaaaatcctacccaaggtcaaagatctttattggaaatactgagctgaaagttttcactgaattttgttatctcagcagaacagtaacaatgaacaaagggcaaaaaacctcaaaggtcagcatgtcttttgggtagctagcaagcaagtaagcatttccgaagccagataaatggctccaaagcatgaccctatgtaatccacatctaattcaccactatgcctaagtgcctttgcacatgcttctggaaacatagcccccttcattttatctacctatttagttcacagtcatcctccagttacagtgacaaaatgataaggatgacaaagactacaacaataatgacagcaaactaacatttttgagcactgattgagatgctttcaaaggaacatgtcattgaaatctcataatacccttcaagttgcatattatttattctatctgttgtatagatgaggaaattgacattaggaaaggtaaaataactttatctaaagctacatagctaataagtgccacagctagattttagatacaggcctcccctgggtaactttgaaactcttgctcttttgtgtatattcaagacatacagcaaatatcatcttctctgtagtcttccttgttcctttctcaaagtctctgccactgtcacccaacagagctaggtcgtcctcccctctttgtgctcacagttcctcatacataccgattttgaaaaatatatatgaagatacaacattccatttattttctttctactagacaataaggcccaccttttatctttgtatccacacttactataataaattaaatagataattgattcaggattaattagaccaaaggaataaaaggagatattaaaaagaagggatcattgaggagattatgaaagtacagctacatggaaggtgaggtaggagatgagaaaaagcatgcctgctgcacgggacacatgaaccaaagcacagagacgtaagagtctattgtccttgaaaaatgctcagtagtttttgatgattggagtgaaaagtggactggtgaaagtgggaatgctaacagttacagctagagaagtaccttagaccagcttgtaaaggagtttacatgtcaggctaaagaattaggacatcactgggttggcaacaggactgtcaaagagtttttactgggaaaaaacatgtccagataattgtttttaaaagactacctctgcttgcagtgtggaaagaacgaattaacgcaaattgggaggccaattatcaggctgctgcaagagcttttaaaaatagaagcagagaactggcaccaaagcattggaaattaggatgtaaggatgatattgatctgacagacattagaggtgaaagcatgtgtagggagaggaatgcatttatatgtctctgcgatatcttggcccatgctggaaaatgagactactaattaaaaacattgagagaagaaccagtttgagaggtagagtacagttttagatgcgtttggtttacgctgtttgttggacaaccatgaatgtttacctacgacaatactggaaattccagcttagacaacaaaagatgttaaaactgaaggtttccatttgggaaccattaggaaaagggatgctggaactttggacatcaatgagcaatactaagtaaagaagaaagcaggatctacaacccaatatgaaataatgctttgtttaagtattaggaggaaagaaacaagccagtgaaagaaacagaataattggagaagtaagagaatctgaagagaacagtgttggatatgttgaaggagcaggcagtttctaactagcctggatgtcagcagtgtcagatgctgaagatgatttaaggaggataaagattaaaagagggctgttaaattttgtgctgcaggcctcaatgctcattttcaaaagtaaaatgcaagcttaagaaagggaatcttttctccttcctcattcattattgatatgtctggtaaatgatatgtaattcctcacacaagttggtactcaatacgtgtttaggttggctgaataaatttggtttgaagacactgaataagagtagccgacaaaagatccttagaagaggaagaaattggtggaacaatagatgaatagaggagacgagaagatgggacccatgatgtagctagagcaggtaagtagaaaagaggaaaaaatacttctaaggggaggcactgtgcttaggatcagcagttagatacccagggtttcaattctgcttgcccgcttactagctttttgaccatgagcaaattattccaactatctgagcatgagttacctcatctgtaaaatggtgcctacatgcctcccccagcagagggttgccaaggtgaggttaactgagtgagtctatcgtgagtgggttcagctgcaagtgatcaaaaacttgatgatagtagcatgttcataataagaagtgtgaacttggcagattctggtttaattgtgtcaaggtcagtgtggagtagaacttacctaggtttgggggctggagtggtagatctaggaggaggtgaagggaagcatcaccaagatccatgcggataaactgtattcattttctgttgctactggtacaaattatcagaaatttaatggcttatatcacacaaatatgtaattttactctttgctaagtcagaagttcaacacgtgttccactagtctaaaatcaaggtgctagcagggctgtgtttctttatggaatatgtgggggaaatctgtttcctttcctattctagcttttggaagctgctctcattccttctctcatggcctttttgtcttcaaagtcatcaatgccacatctctctaaaattcttccgttgccatgtctctttatgatcacaactgggagaggttcttcactttatttattattactattattatttagagattggctctcactatgtttccaggcttgtctcaaactgctgggctcaagcaattctcccactttggcctcctgaagcgctgtgattacattcatgagcctccatgcctggctgcttctttgcttgaaaggactcatgtgattgaactgggcccacgtggataatccagaattatcttttcatctcaaggttcttagctttactctcatctgtaaggttccttttgccaaggtaacatattcacaggttctgggcattaagacatggacatctttgaaggcccattattttgcctaccatgcaaaccatgggccaaactgtgtaaggaagtagacaagcctaataaaacataatagaaaacaacagtgtggaagtgcttagaaactagaggccctagtcatgagacagagaagattcatttgaccatgagtaaatatatgagatgggctataggaagactgccactagaagaatttctaatcactgtggttgaagaaggcaatacattttgatgtgtaggattatagcttttgattcttaatgcaaacatgcttcttcttagctgtgtgaatctggacaagttatttgatctctctgatgctttgtgtcctcacttgtagaaagaggatactagtacaaacctcatattagtgttgtgcaaattaagggagataataaatttaaacacttaacggggaatgatatggtttggctctgtatgctggctcacactaaaaatcccagcactttgggaggccaagccagaaggatatcttgagcccaggagtttgagaccagcctagaaaacatggtgaaacaccacttctaccaaaaatacaaaaattagctgggagtggtggtgcacatttgtagtcccagctaccctggaggctgaggtgggaggattgcttgagcccaggaggtcaaaactgcagtgagctatgatcatcccactgcactccagcctcagtgacaacgtgagaccctgtcccaaaaaataagaaataaaaaaataagaaaactgagtggtgctggatcccacaggaaggtgaaagtgtgtggagaagtctgtgtttataagagcggtaaacttctctctgcatgcagcggctcacacctataatcctaacagtttgggaggccaaggtgggaggatcacttgaggccaggcgttcaagacctgattgcacaacatagtgagacacacctcctctaaaaaaagaaggaggaggagaaggaggagaaggaggagaaggaggagaaggaggaggaggaggaggaggaggaggaggagaagaagaagaagaagaagaagaagaagaagaagaagaagaagaagaagaagaagaagaagaagaagaagaagaagaagaagaagagtggtaaatttcttaagagaagactttctttaaactgatttaaagtgataatttaaattatagccttcataattgaaattatgatgactagacctatttaataccctaaacaggatcttcctgctagatcttccattatcttgaaatagcctaaactaagacaacaactgcactgataatatttctagagaatcaatggaaatgtggggtaagaccacgaaaaaattaacaatgctctggttcaaacatgattccagtagagatttttagaaaaatgttatcaactccaaaattttagtaactctcaaggaactcttccaattcatctcctttatctccatggtgttgggattggggaggatgggagaaaggaaaagagctgtgaggagaatcagtgtattttgcctcattaccctatgtcccatgagaccttgcaccatggacttcctcatctcagtattcctggaaggccatgacttcttgcccatgataaacactcaaaattattgtgctccatgttcaataagtttttgtttatctgtgtatttgttttttttttcttttttcttttagagacaggatcttgctctttcacccagggtgaagtgcggtggtgtgattgtagttcactgtaaccttgaatccctgggctcaagcaatcctcctgcttcagccttttcagtagctaggactacagatgtgtgcaaccatacccagcttgtgtttgtttttaaggaaagaaaattatatggtgtaacttttttttttttttttttttgagacagggtcgctttcttacccaggctggagtgcagtgacacaacctcagctcactgcaacctcaacttcagcctcccgggctgaagcaatccccctgcctcagcctcttgagaagctgggactacaggtgcatactgtcatgcctgaataattttttttttttgtattttttgtagagacagggtttcaggatgttggctaggttggcctcaaacttctgggctcaaatgatctccagccttggcctcccaatgtgctgggactacaggcctgggccaccatgattggccttgtataatatttaaatgttcaagagggtatgcagtgaaactaagattatctgcaaattcttcctgactacacagattcctctccaagagacaaccaattttaccaagttcttatatttgcttatcttcatagtaatggatttctatcattcacgggtatatttagggtatatggataataaatatatttagtttttactcaaatagtagcaaactgtcacgttgttctataccttactcttttcacttaatgagatagtttgggaatcttctgctatcagtacataaaaaactaccttaatcttttttaatacctgaataccatatgtaacttttaaccttttctatgtaagttcttattttcaataggactgcaaataggcactaaaagaaattaaagctagtttaacagaactattctaactctattagtaggaaggaatagaaaaaaaggtcatccacacttgcctaccttaaaaatgagacaaagagagcagagtttgaaaatgttctacctcttcctaatctgctgctaattctgttttaataccagacctttacatgattaacagtattatattccacattatcctgcaatacttggaggctctaatttttgtaatgtctttttatttaggaaaaagttcagatgaaaaatcaaagcatacaaccttctatatcagaagtatggtagatatccattactataaagataaatataatatttcaggaagtcatggtattaatttgcttaaacattatatgagaagaagtaaagctgcatatttttagccatacaatctcatgttaaatataataaaatatttgaatagatatctttaatattctttccaaatgtgaattttaataggatgggaatgttgacattaaaaatcatagaaagcttataatgtgccaaaaatctgccctaattcttttagttaaattactttatttaatcttaaaaataaagttagaaagctggtattagtatatttattatacatataaagatactgatggagagatgttaagtaacttgttcaatctgcaaagcttgcaattgttcaaatctgcaaaggtgtaaggttcacctagtcataaatcatatgctttctgtctgatttattcaccatcatttcatatttgtttatcgcaaaaagaatagaacattacataatttgaagtgaaatattgcaggaataatcttttagggttgactcaatgccaaaaaagcaaagctattagaaatttgccatgatgcctgccataacttctagaaaatttccagagacttttcctcctacagcagatattatgtaatatatatttagcaatttacagatttctagctttcctcacatgagaacttctttgaaatgctttaaaacacattaaaaaataataatggagaatagaatgaacttacatttgaccatttctaagtatctatttatgtattctattagattacattttttaaaaatattgtttacatttatttattttagccagagacgtactccaagttaactctagtttatagattgcaaagaataacaacttgatcttgtttgaattctaacactcacaacatgtgtattattgaatacatgggactgagaattaaaattgagctataaggattgtgctcaatctgtatgtgtgaatgttcatagcaaaaggggacaaaagagatgaaatttgacatgatattttcaccaaacgacaaacacttcatgaacacgctggacattggatttggtggtagttaactatgaatatgaagagtttagattaaacagagctttccaaattactgtttttaagacttagctcaaatgtcatcttacttgacagctacaggcagaataatttcatctgtcttattcttccaaagcatgtttaaaactaaaacataaatctgatctcatgtctgtctcaacaaaagatgaatttctggatggcagagtccactttcttgattatgcctgtattcaaatacagtaaaacacctggaacctctattggaaatgtttgttgaagaaattgacattgtttgaattttaataattcctccataacctattgactttcttttaataattaaggagtaagtagacttgttattcatgttttgttataaaaaagctccttgtttggagggaagattttaacttgaatgatatcttttggaatatgaaagtgctattttggatgttgttgttgtttttttgatgttatattttttagcagctatatagtatgtcttgcatatattttcattttgtcaacagggttttctttaatatttatttgtgcgaactaaaaatgtagagcatgattcaccactattgacatggcattttaatattgctttcataagagtagtactggcagtttatgagcacaggagatgttaacacaggaaatctggaaaaggtataaggaatccaggtaactatatttcagtgatcctaaaatagcacaagttcatcataacaatgtggtatttattgtaataatgtttagtctcattttttaaagaccttaactaaatcatttgttatacagtttagaaattccaaattactactaattaaatcagaagccaagcaccattttacaatcacgttgcccttcaaaaaagtcaagagcatctcaaaaacgaaagtctctggctttctatgagtcttgaagcacttttcttcactaattcaactgtcattaaaattatgctcttcaaaattcaaaaatttaaattggctaaatattgaacatatatgaattactctttaaaactcaaattagaacacacactccaatgcacttataaatgcatctattaatgatgacaatatttgaaagtcaccaatattgtatctgtcggtcaatatgagggtgtgatgtttttatgcttttttttttgttttttaacaaaaatgacttgcatactccctaatgtgttaaattttcacattggcttctttgttctttaaggtgtgaagtaggttttaattgtgtgactttaggcatattacttaatgattttcaatctcaaattctccatctataggaaaagggaattaagtgaaataatatatgtgataaattgttgatggtaattgatggtctattaagcacagaacaagatttaagtggcattatcatgacttgagcagcttagttcaagttaggagctattggaaacacctattttcccaggatgcttttgattatagtaacatacattgtctgggtgaaaggctctttctatttcaataacgcatttgcctaacctaggacgtggaaaactaaatttggcctgtggcttacttttgtaggtcccatgctcttacatttttaagtgcttgaaaaaggtcaaaagatttgttacacacgatattatataaaatttagattttattattcacaaatacagttttattggaacaataccttgcttatttacttttctataatctatggctacttttacactatcatggtagcattcaatagttataacagagaacatttaggtcttcaaagcctaaaatatttgctatctgaatctttcaaggaagttgtgcaaactcctggtctaatcctgcaaccatcaactgttgtacatccttgaattatgagctggaaatagaaaatattttgataggcttggatttaaaaagagtcataaatatctgaagaattagaaaataggagcacaaacttccttgtcatctttggaaaacttagaaatacctacggaattacaaaatgggaacaataaaatttttcatagaatttgattgagaaaccaagaaatagcaaaagtagtggtgggatcatgaacatgatatgactcatgtaatcaattgcttagaaaaatgcctgtttttaaaagcacattaaaatgaccagaggaagagctgaatcataactctgttgcctgtttctctaaatgctggaaaaacagccggcaccactgtagtactatatacatccttaaatctatgataataacttcctgggtcatcactatttctgtacaccaaattccttgtattcatgcacagtttgtgttcaattcaggaatgttggtaccacataaatcattgataatttgtcagctgatttgatgaaatttttgcaggtttataactattcaagtgtattatttctataatttaactttgagtgccaagagcatgtagcttattgaatatatacatgtgtgcacactgaaatcttatttccagagcaattgtccccataaaatgtttctttcggccagggacagtggctcacacctgtaatcccagcattttgggaggccagtgccgggggatcacctgaggttatgagttcaagaccagcctggccaacatgaggaaaccttgtctgtattcaaaatacaaaaattagccaggtgtggtagcacatgcttataatcccagctacttgggaggctaaagcacaagaattgcttgaatcgggaggtggaggttaaagtgagccaagatcattgtgctgctgcactccagcctgggtgacagagcgagactgtgtctcaaaaaaaaaaaaaaaagaagtttttttcagggtgtctttttctctaacctatgagactaagggatgaaatacactctttgtgagtagatgtggattaatcactggcccatctgtattcagggtttaaaatgaaccatattttcaaagtctgaatgatctataactcagttgtaatagattgctagaataatgagtgatgatttggtagaattaaaaaagctaaaaaggctttttagtggtgattccaggaaagagcagttaaagctttgcactttaccatcgtattcttgtcatttactatagaagcgagagagggaagattttgaactaaagctcacatagtaataataaagatagattgacatatcaaattattatatcatacattttctcctctttgtgctgtttgatactaaacatctttggaattctctgaaagactggagcctgcaaaaatcttgctcagaatatcaagcaaatggcggttgtgtggactttttgcacaaagacatcaggatcctatgaatgtacgcatatatgcacagatgtgtgtctggtagacatagaaacaaatttacattttgcaataactcattaaaatttaacaaaagaccaagagagaaaaataaaacactaagagtagatttcaggacccaggatacaatgttcggagaaaacttttatcctacaggtttttgtggttgggagcggatccctcatgtggatgagacacagtgttatgggtggaattccacaagaggattgttatggagtctgaaaaggtatatatttatagaatgaagcctgtcttatctattagcacaatcccgctccccactctagataaatgaggtcctggaatatttccatatatcagaaaacctcttctctcttagcttgattctttttcatagcaacagtaaattagcatcatacattcacataatgtgataattctgaaaatacttgtgactatacaatctgattttaaattcactgaaagccggtgaaatacacagaatggcaatacatatttatactttacaattgaggaaatagaaattcaaatagatgaagtgatttacctaaagttacacagttttatgtgaaattgatattcaggttaattttctttagactaatgttctttgcattataaaacaatgattaaacagtcagtaccatttttcctttttaaagtcttgattcgtatctgtccacatggagaggatcaaaagccaataaaatctatttcattttctttactcatgatattgagtattaaaaataaattacttgcatagcttcaaataaatgattccacaccctgctgttttgttatttattttaaattcatataaaccattgagatttatccagaatttttatatgtagtttttcttaatgcatatattttcctttattacatttcactaatatgtacttccagcattttgataagtcaaattacatccaaaagaatccatgctgtactcaaagaagttaatctttaatagttatttgataaagaaatgttttaaacaaagaggcatgtgctcttagttatttcaatttgtaattcttactcttggaacaatcatttactagtttcctttgaaaagcagggattttttttttcctttttcctattcttttctcatttatcatttcctcaattattgattattgcaagaggataggtatggggagaattggtgagaagattttctatttcaaaaatgtgtgtcctcctgacagtttaatttcctggtctctggcacagatattttaattgtgcattttcattgattctaattaaatatcagactcataatttactcacattctttcctcttctatgacacaagaaaaaaattgatattatgtttccttcaatttatctcttaaatcaacaatcaattttgttatagtgttggtcaaagaagtctctgtttaatatgagtctcaaaataagcttctctagttctagaggagcttctagtcagctttctttgcaatttatttagaaaagctgtgctagggcattattgaatgtgaaacttgaccctctcatgaatttctagcaaacaatgtattattttattgataacctccattgtcttcacttctgccatatggctgtttaacatctgtgtctcattacttctgcttccctaataattgattctatattaggatgggtatagcattcacaaaacattttaaaataatttcatcatgcaagcttataatgttctctagagagaaaggagggtcaatttaataacaacaagttaaaaactactattaatggaaaagctactgaattaatttcagaaaaacataaactaccaaattttacatctaaaattctaaccattagataaaaatgtgggaaaatgtaagtcaatgctcaggttatacaatgaatgatgaaatgctaaaattaattaaactagttgtttatgaaatagtctttcttatttatggaataatggtttaaataaacattttaaagtgttgcgcttttggatcaaatataggacaataagacaaattctgttttcaacatttactgtttataaagaagtctgattacactgaattttaaacaatcttgcatgtacattgagcattctatttttgtatgtgttgtgttattgtgaggttatgacaagtgggtagattttctataagtaagagatataaacttaggctatgcagttgtcaatgttgataaagtaaataataattgcagatatagaagcatatttcagaactgcttaaatggttttacaggtaaagggggtttcttaaatatcatccaaatgtgatttgatgacgtgctaaaatagatgcttttgaagggtcattaaccttcataggccatgggaccatcatgaagaatttcaagatggtgatttcttaaattgcccctaatggaaagttgctttcttgtataaaagtaccaaacttttgcctgaggagtggtttatttgccaggaaagatccttcatttcattttcatttctgttaacttgctttagtttttcactaaagcattgaaaaagtcttaaggctacatctcagtccaatttacttcttttttttttttataccattgcttcaatttcgagaatactagaaatggcagttctcttgggtagaaaaagctcataggagaaatcttgaatcttctctccctgagctctaacatgtttacacaacagtaatagtctaagtattatcctattatttcctctgtgctaccttttattttagccatgaactaataccatactgcagagtttatagataataagttttgctagactttacgtgcataaaaagttgaaagggaagtattccgcagctactgggaaaatagattgcttccagaagatgtgtattagaaaacatgaacccatttgaggaaggactgcaggtcacagagaggtctgctcagtcaagcctgagtatttaaagtgttaccagcagacgctaaggagagtgatgcatgagaaaatagagcagtcagataattgttagaagatggactcacaaaagtgattgggaagtgcacagccatgtgagagagcctccacaggaattgatggctgtgtaaaagttaaaaacaacccaggccttaaaaaggaagtcataacgctagaaaccaattttagaaacaaaaagaaagtgttggtgttcaaaaaagatataccaaaccaccaggagacaaaaaggaagtagtggggggaaacagacacatttgaaagtacattctctccctgaggtcatagattttctttctcagccccatgccctgaagtgtactgagtttaggaccaaaaggaaaatgccctatttgaagtctgaagggaattaaaatgcagtacaacatttcctcttctgtttttagtttgcagcctctgggcaactgccaactaccagtaaaaagctccctatctcagggcatataattctggtacgaaataggcagcaagtacaaatgagaccttgactgcaacttttatatatatacaaatttgtttccctgttctgtgtgtgttgagctggaaagacagtggcttatttagacctcaggagtgatgatgtaggttgtcttagagtttggaattaatacactcacgacaagagagatttaagtaccacggaaaaacttccaaatgcttctatcatggggttagtttcttaaaaggcctttaaaagagtaaaaatgatctgtcaaaaggcttggtaatgttttgatatttggatacgcaagggaacgatatgaatcttccaatggaaatgggaacctacaaaaaacttccatatgctttaaaataattttcaatgtagctaatgcccctcataaatgagcacaattttattttcatttcgtagcctctggttggctgtcagtcctcatctgaacactctctcactgcatccattacccacgaatatttaaagaacaaatatggcccatgcattcagaggatatcctcttgatggactacctctgcaatttccttttaaccctatgtcctctgatttagaaaatgttttagaaccttctcccctctctctctctcacactctctttctctttttccttctctctcgtgtgtgtatgagagagagagagaatcattaaccactcttgaaacattgtttgtttctataaccttcaggtataatgtgttaaatgagaaaatttaggaagaaaaatatttacatacatttgaagctcttagatcataaatctgggtaggaaataaacatcaaatctgtttacttggcaaatggtaagtgaagatagggatgccattaacaaccatggagtaagttgatgatgaaggaatgcaggtgattaggcactgaaacccttagacctgtgcattgtaacaaaaagaaacagggacgatggcccacatggaccccatattgagcaggagagatttcaagtgttaagacagtcatttagcggtagccatttgtgacagtataagttaatggtgtcctcattttagtaggagattccgatattaggttgtttaaaatttagaatttcaggtgagagtaaacttatctatggggctcagttgattcagtttaggaaacttgtaaatagcatttatccgtaattggcttaccaagtacatgtataaatgtatacttacctaaatgcacctgtgtgccaaatggagattgcttcctttccacatttagttctcatgaaaagatgtgagcagttggaatattactacatataattataaaagaacacggagaaggctgatgcttgctttctctctataaaaatttgttgtctttcacgcactaattaattattgaactaatgaattcatttcatacgctaatgaattatcaacaccttccaaaagtagaatcatattacagaattattattttggattttgttttcattgaaagtgttagccagttattaagctttggattcttattttaatttttgttaatctacatttaccgtcttagacaaaggaccgaggataagtcaagctttgactctgatggaggagaggaagctcaattggttcaggcattgaggtgaacgtaatatgacctatctttggatataccacacctttataatgttcttgcttttttattttctttttgagatggagtcttgttctgttgcctaggttggagtgcagtggcccaatctcagctcactgcaacctctgcctccggagttcaagcgattctcctgcctcagcctcccaagtagctgggattaccggcatgcaccaccatacccggctaatttttgtatttttagtagagacggggtttcactattttggccaggctgttctcaacctcctgacctcaggtgatctgcctgccttgacctcccaaagtgctgggattacaggtgtgagccactgcacccagcctataatgttttttgactgtacactgtgagtctctcttttaatcccaaatagctattctgaaaattaatgacagtaaagcagcacactcatttttgcatatgaacaacccatccttgtaccggaggatgacaatactgtttatatatgttctgatacttcctgaaataccaattctgtccatgctgaaaaaaaaaataaaaatgactttgagtgagtcgttataatcactcttctaacttctaactcagagataataaagaaaagatgtctttcaaacgtgtagatagttcttgatattttctagactgaggacatgtttgttcagtaataaatcattgatgaatatggcctgattgtgcttaagagcaacagaatttatttaagttcatacaatgtaatactagataggcaggaaagagcccaaaaaacaccagaaaatgaatcctactcatacctacgtcttgaacttttcaaactgtttttcatttctgaacagatgttcttatttaaatgtaaaaccaatgatattgatgtgattatctgtttaatggatgttcagatgccaacaatacaattagttgagctctctacagatacttatgtgttcacacaggaaataatacaggtatttcaaacattatgaatttattcttcccaagctgattcatctgttagtcaatatactgtactggtaaaagtctcaggataaaataggcagcacaaacagtgacttttctagtttgttacactctaatcaggggctagcacttataattccaattttcaacagaagaaatataatgaagtatagtggaatgtcaatgtaagatctataatgcctccaccccacacacttgtgggatgcccctacaaaaaattttgacatctgtatattcaacagtttttattctctttggctttgattttaattacaaaccctaatctgtcagaacagaaatggttcataattgtttgaccatactgaatcatttacattgtctaatccatccttatgtaacatgatgagtttgttttgcaaaacagatcaaaatttaatttctttgaattgtctttcagtattgactttggtgtgctcttggttaagcagcaatcttttctgagaaatggtttattgttgaaacattttaaacaaatcaattaccttcctgtaacgcaataatattacaatatgcaggcaaccatagcttccattgtacatgacacagtcgattttatgaagccgtaaacattcatattggtgctatttagcctgtagtaatataatttgaaaaggagatattgaccaagttatgttaatacgttatctgaaaaagctcaatatgtcaggagctccctggaaatagacatacggctttcaggtttggaggttaaattaaagagtcagaactatatgaggaaatattaacgtgataatatagtaaatatcaagtcctttttgcactaggaaatgacttggtttgagaagtaggtttgctaccatctgcctaacgtgttaattatttgtagagtaactctcccaggtacagagcggcattctatagctacatctatccaatgcagatacattcactaccttcttgccccatgtttctttttatttttttctggcacgtctaagtagaaatgcttaactaaattattattttaaaaatataaatcttattatgttctttctttgcttaaaatttactaatagcctcccactttactcagaaaaaaaaaaaaatccaaacatcttgatacctgtaaggtactacctgatccatttagcctctgtctgcctctcctgacttttctcccctttatttcctgtgccccaagcgtactgaactttctttattcctcaaacttattatgttaattttggtcttattgacattgtatttgctattctctaggcctggaatgttcctcttcacagctacctgtagctgacaccacccatcttttgggcatcaattcagatgatctcctaaggcagatcattttctgataatcttatctaatacttttcccttccctaccctcttaatctctatgttattctttgttttatttttcgattgcactttgcgttatctgaatttattggctgttctgcttgtttattttctcatgagaataggtacattgacttattcactgttctatccttagcagctagaatagtccccatgagaaatattcaataaccatttattggtataataaataaatgaagaatgaatacatattcaagtaagcaattgacaagactattacccagggatcagagatagaatcagtggtaggtgaaaagaacagttccctcctgttctgtcacctctctgcaataaatgcactttggtgatattgaccttttggtaaaaacctaattctctattccacatcttctcatcctccagagaagagaaataatctaacccataactttattaatgaatgaaccttatttagaaaacagttataggcattacctataccagcagccaccactgtattacttataaaatagtgctttctgctagaaaaatcaataatcctggagtattatgacaatgactttggtttcctcttaagtaattacaaatccaagtaatcagattgctattattagaatgacaatgctttatgagatttcaccttaatcgttcacaataactcccttttattcagtgatagtttaaatgatgtccttgctgtatatcattatttttcacagaaaattgcatgagatcttatgcagtagttttgaaattactgcttgttgtcaccactatatacaaccacataaacagtatgtggtttgtacagtagatcatttttcttgtttatattcagcaagctgtcagtgctacacactaacaccagctgttaaaaaatgacagtagtattttatctctcactaccaagatcctttatgtagagaagtttttttcccaaacagtatgtgttgctgaataatgataaaggttggtatgattaatagtggtattttttcagggttcatttgcaatgtaaaatagaatgtaaatagaaaatttacagaaaaattcaagtattgagaaagtcagattctatacttgaatccaagtcagtttgattattcaggaatatctgaaggatagaataagaattatctcatttctaaggttgttcaaggtgaatcctaaagatatatatgtatatgtgtaacatataataatctaaaataagttagtttcaatatcccaaaatgtttattgatatctctgtttgctactttctgctgttctctcttcttaatctttttcctttcttcaagagaaagtgagtgcctcaagggcaaagaccatatctttcacatcaaatatctattaggttttgaagaaatatacacgtcagctaactaaaaatggaacagactttcttgaaaccattttctatatttagaaagcacaaacacacttgcttagactaatcacaaaaccagagtcggaaagtttctttaagtctttgtatctttaatggtctctatcacagtacttaggtaagacacttgcagccagctgcacacaaggccaggccacaggccaggcttcacggtcaatgttgccaaacatgtttcaggtaaaaagtgtcggacactaataatcatcatgcaggctgaggccctttcacagaatgtaaaacattatactacgttaagatctaagacattttgttctttagataaacatctaagactaagaattgtgcacactaaaaacaaaatgcagttagaattgttatttattattaaatagaagatctttatatgtggttgtgaataaaaggtaaacagtacttaagtttagaaatatattctcttaccctataaacaattgagtttttcttataaaactgagtcgtgagtcttgttctagcttcagcagtagctcaaccagggcttctagatgtacttaacatttccaggggcagagtcacattagatttttaccctagttctaatttaattcagatgataaagtcctatggtgaagaaaattaggaagtttccaaattgtgtatactcaaatcacatatctgtcatatattgaaatatttgtgtgtactatatatgtgtatatattttcatatgcatgtttatatctttatttgaaatgggtgggtttatgtaaaaaccttcaaaggttgatgactgctccattgcaggggaagctatctagacaaactttggctttcttatatctattttaagtatacatttaaacatatatagacatatctgacttctattatattgtgacattttggtgatattctatgaatagcaatgtagtgatatgctttttagtaacacaacttgtccaaagatctcataaccagttaccgtatcaggaatttatcacaaatttttctggacaactacaacgggtattataagatatacttaacccgttatgagagaaccccataggttgtcactcaagatccatttaattccagcttatatccaaacgaacacacttggatgtttcatctctaagtcaaagcaggccaagcagaagccactggaagagggagcgtggagacatctaggggagtaaatagtgagaggtcatgactgagccggcagagtcaaatatcagaggccaacaagagaactttcacaagtgtctgttttagaagaggggcagatgactgttttagtagacctcatctgagcctctgagtttatcataaagaccacagaggaaaacatgtaggaggcgtattatataaattacatacaactatgagaagagttaaatcatagccctgagtcatcaagattggattaactgttattcaacaacatactctaagaagcctggaaaagctctgtagtatattttagaaatatttacagcaaaataggtacacatttttaagtttggtccttgtaagaatccatttcaattacctggaaattctgttttctagaactagtattagtgtatagcatagcatattttcattctttttactttgataagtaaaaacacaccattcattcattttggtatagacagtaatcaataggaggtctagaatgtaggtcttcaataatgtttgtttgcttaattactaaattgaatctgatggaattccatttgtataggtgaaaaatagttatctatcagcagatatagatggcttgatataataaatctataatgatggcaagtaatgaagagttactaaatttcctccctggttgtgactagaattggtgatttttttttttgtaaaatgcctgtatttttctgtttgccagtaagaagttcagaaacaatgttttttttatacatcatgtctttacatggaagaaacttagacaaaaactaagctaaataacaaaacctgccttgttatattccttgtaagaagaccagaaaagaattatgttggtatttttaacaaaagatacagctatcttcatcggtgtcataggtggtgaaggaagcattaattagtcttgtcctggaaaaaagcaatgagcttctgcctaaaaactaaataaaataatataaagagcaacaaaacaaaacaaaacagaaataaaaagccctcccatacttggtgtccaccccatgactaggtacagttttgaatggtcacttgaaacatatgaaaatgtattcgtatgtttctgtctataattcactgtcagtcttgatactgcagaatctgaaatgctgagattgcaagattttcctgtaatccggattctaaaacctttcaaaaaccaaaaatgtacacatacacatggcaacacaattttaatttatctaaatggttcatatactctttactcttgtttatttttatgcattcaaagaaaaacaggaaaaatagagactagcagtactgttctgggaagcttgggcaaagcattaagtgtagtggtgatttattcttacaatacccttttaccagacacctactctgttccaggtccttgaaaaaaatactcctagtaggtttatgctggtggggtctacattacaattaaaacattaagcaggagagcaagtggaaggcagtgtcagtaaggttataatagtcacttgatttctttgcttttgtgtgacaaacttcaaattccacccactctagaggaagaataaaatggaaaaattgaatataggagaatagtgtaattattctcttttcaacgtggaatcaaagagtaattaatattaatgttgcttcactgacaatcaacatttatcggtcaagaatttgaaaaagtttccaaatctgcaatgtagattaaacagacttatggatttttgcctttactgcttgagacctggaaaattaggactgtccttgcctaattatttttgtctttcaagttgggtctgaccataactcaccgtctgctaaaaagaaactttatgtgctactaaagagaaacattgattgaatatggcttttctcaagtcattctcatttacacttgtgaaaatgtctaactattgtcataggtaaaacaacgtttctgtaacctaaggagacagtatgcatagcagttaatacaaggctttagaaccaaactgtctaactttaccacacactaactgtatgactttagaataaatattcattctctatgtctcaaataacttataaagaactggaagataatattattcacctcattgaattatatgaagattaaatgacttagtattagggctggcagattcagcaaaactaaaaaataataaaacaaagaacacccagctaaatttgaatttcaaataaacgatattttttgtgtaagtgataattatacttatatgagacatagttatactaaaataccctgagttgtttatcagaaatccaaatttaactgggcttcctgtattttaattgggagccctactaaatatatgtaaagttgtgttactttgtcaatattatgtatgtattttctcctatgaccagtgaaatgacttagtatggcatatcagttccttttcttttaattgcttcttccaggaccagtccagtgtaattgttcttacatatatttgctctaaaaagtgctatgagtgaccagttgaaagcataattatttaataaactgtttttaagttccctgagtgtcttacaaaaataattttataggaagataaattttagcactaaaagcccctcaaaagttgctttctgttggtaatgatgatagtgataatgagatcttctacaaaattgattacacagctaaagcagtgaagaaggatgaaaaaaaccccaagcagtagcctattccagttgtctacccaggtataattcctagatactttcaaatacaatgtcaattgtccattagatacaagtgacaataactaaggtttccttctcctttccttcaaatcctctatcttctctccaggttttccctttattaggaagacttccatatctttctctcagccgagcatcacctaaaacccactcatgtgccaggtgttaaaagattgcttatagagttaactgatgactgattcgggatgaaactgttgtttgtccagggtttgtaattatgtaagaaacacttaaacatgcaatgtatttcagagtcaaaaaaaagaaaacaaaaaaacaagagtcgatattaatgaaaagcaagaaggtgtttcaggccaaatgacctgcttgtatgattttgtgtcacgtgataagacatggtgcaaacatctagctcattactagattctttctttataaaacaaaataataatatcctgcatcaggttgcactgttttttcttttaaaaattctttcaaataatttttttttttgcatagccataatttctgcctttctgtctctctttggctctgtctctctctttctctctctgtctctctctctctttctttttcataagagttgatggggtaatttcaagtctctgcatagtgaaattatagcatagaaagtaatttaatggtaattacatagatgagggctgcccaatcttttggctaccctgggccacattggaggaagaattatcttgggccacacttaaaatacaccaacactaatgacagctgatgagctaaaaaacaaacaaaaaaaaacttacaatgttttaagaaagtttatgaatatgtgttgggctgcattcaagagctgtcctgggccgcatgtggcctacagagccatggcttgcagacaagcttgacctagatagacccaacaattaaaccgagtcttagtgaactctagatcatttcctaaatgttctctctatccagactccattgcaacagcagaagaaggaatagttgataagtaggccactaagttgctcacttaagaaaggcaacataacatgttcttaggcattgagttttatatatatatatatattctttgcttatagctttcacaggcagatttcaatggaatagaagttttattgagcacccactgtgcacaggctttgagctagtttcagggaatataaaaaacacagacattatacttgattcaggtacagtatagtggaggaaagttaagttcactaaaagctataagatactttaagtgcccttaaattgtgctttggggagtcagagatcacatttaaaatacttgacactgcaatgaaaaatttatacagaaatatagttgatacttaatctcttctatcagacaaatgatcttattgcgactttagctgaagacaattacaagtgacaatcattggtttagttttagagcctgtgcagtgacagcacatagtgggtgttcaattagcatgtgctaaatttcgaaaagaatccatgaatcgtaagacagtaatggaccttactcggctatgatggtagcagggagaacatgtaattcatttttgcctgacactaacaaagtgtccttctgcttttctgggcagccactaaaatgtataaaactgctctggatgattatttagagtcctctcaacctgttcttttctatttttaagtatgtaataatttacgttaaagaaaaaggaaggggaattttgaaattatttgtaacttgtgacctcttggtttttatcttggtgcagtttgtctaaaggatgaaacagcataaataaccatacacatttttattgttaataatttattatttcttatgaagtgttggaccacatgtaaggtgcttgtttatgttaattcactgattcattgtgactcttggcaattactttcattattaggattttgtagacaaagaaactggggtttgagaggttacctgtcataactagaaagtaaggatttgagatgtgatctcaagcagcatgactctaacagaaaacccaagttcttaatgactttgcattatcatttcaaaaactcaagactcaatttaaaatatttatatgtcctgggtccctagatcatattaaaatgtactaatctcatttggaatagtgtttaatgttataatcatttctctttcatgccctgagcatgtttaaattctaagaaggtttacagcacttacatcatgatgttttaaaataactgttttagctttggtttctaccatgaccttaatgcagttgattctgtattaagagaagaaaataaactggtggtcagagaagatgtcagagtcctcataatatacaggaattgttctccaggacagaggagatcactgaagcctgaaaaatactgattcctggcagatctgacagtcatttggatctgtctatgtcattagttcattgatgacaagaggttctctggctggatggaaacagatgtcagttgctcaagtggtattgctcacagataagataaaagctctctcagactgcaaatagcagcttgcagagggcaaaagaacctgccaaacgtggaccttttttaaaagcaatttttcattgattcagtcctgattcttggctttacctccattaagccacccacacatggcctcatggtgacatattttatgtttccaatatttgaacccttggcttctcctattgattctattcacttttaaaagatctccccgagtctgactctttcttagctcacaattgcttttctgaatgtcagcagtttctctaactgaagagacaagtaaaatacttccaggccaagatatagatacgatctgatcttcaagatgcaccttcataaatgaattattccattttactttgtaaatgtccgggaaactgatgtattggcaacgtttcccttcttcctgccacattcaggctctcctttcattggctattcaaatctgatgtctgttctgaatcttatctagattttcaactgaagatgtttacataatgcgactgaaacatcaatggaaaagaagaatctagtctagctttatattcatttttctagatacaaatgagtcagaacatggttctcagacttgagtgtgcaaaacaagaggtcatgttaaaacagattgttcggccactgtccaaaagtttctggttcagtggatctgggatggggcctgaaaatttgcatttctagcaagttcctaggtgatgctactgctgctgtaatctatgagccacactttgtggacctctgatttagagtaatgtatgctgttgccctgttttcctacttaatagtcagataacagaaacccaatccaaactggtttaagcaagaaaaagaatttagtggatcatgtatataggcaattgaatgcctatataacctagcatgatgctgtacacgtataactactcagtatatatttgttaaaactgtattaagattggtaaaattagtacaaatttaactgtaattaaatcactattcctggacttagattaatttgtccttaatagaatccagacttggaaagcataggttaaaattaaatatctaacaaataaagatattattaattttcttaatttatttcactaaatgttaattttcttacttggattgaatatgtgatttgacacaatataaatagtaagtagaaaggcaatagaaggagaatagaatcaattacatatataactatatatgattgttttatatatatatatctcaatctgaaagcaaatctaaattatgcaactggcaggatcaatactctatttaatcattagaaataaaaaaaattacttccaagtaaagatgaaaatttctccaattttcttagttttttacactatggatcctagtgtctaaaaattaacagggagaaaaaagaaaggaagaaagaaggaaggaaaggaaggaaaagagggaggaagaaaggtaggaaggaacaaactggaaacctcacactgtaatttatatattgattgtatatacttgaaaatgtggataaaaagtttccatgattgttgctgatattgataatttgagatttctgaaagccttttcattaaaattttatgtgtagcacagggtttaaatgtgaaagggttttataaagggtcagacccaagaacctgaaactgccattcttaaggcaaaattctgataatatccccaaccctgacttgttttcagcacagaaatgatgcttattttttttcactgatatatgtatttttctattaaggttgattgtatgcctagagcaagcctagtgacagggtggaggagagagatgctgagcatgaattgttcgcttaagttttagcactttaagtacccctccttcttctatcaccgaccaaaaaaagtaaggagaaaagtcaccatcaccaagggaatcagatgaagggacagaggagggaagcctggcaaccagcacactgacctgcttttttcttataaaagcagctgggcgacaatagcaaaaagaaagggaaaaaattaaaagaaaaagaagggagcctcaaaacagccctcttgaaggtgtgttattgtaaggagttacagatacttccacttttttttgtgtgtttggcagtttataagctctatcaacaaggagagcaaaaagcttttgaaaacatgaaacagaggtgaatttaccctttcaagtcctctcccgacccgtttaccatcgccgtcacagttgaggcagtcagtcagagatcagaaagggaatagccttgagatcctttctggaaccaaacccaggatttgagttttgtttaatgactgggctaaaaatcacaatggagaatgaatataaaggaaaaaaaaaacagggatgattttaaaaaatattatcctttccccccatgacttcatgacagggagagttaagcgagctctgttgaaatccatctgttttaagtggctttagtcagggccttttgttttacaaggaaatggcaattacgactggttttgataaggatgctctgacagaatctttttcttcatgggactgcttttcatgatgcagcaccttgcagtatttctctttctttgaaatcactggtattgccctttattaaaatccacttgccttattcttatttaggaattactatgttaccaaagtttcagaatcttccagactgaaagagccatgaatgaactttttgtctgactccaaatgcaccagtttctttattctccttctacactggcctcgttgttgcagcccaaaatggcagctgtatggttcaagtgggtatcctctctctgaaaatcaaagagaaaatacattctgtttcagcataacacaactattatacacttatattttacttattcttcccctattgtcgggctttcataccagaggaaatgtaaggctactgtctggtcctcaaaggagcttttgagtcaacacgatcatccagtgtaaaaaggccaagcatattccactgctgatcctatttctttccttaggatgccctatagatgaggctactggcaagaaagaacgctttttttcctactcagtctgaatttctgttttccttacagccaacacattgagtacaggtctacatatatacgcatatatatatagaaatctgtagccaaatttgccattggctttcaagattttccagcatgtggagaatatatctaaattcgagttctagtaggtttctcttgattttcacatctcaagtcaataagagtgaaatataattgaattcttccactgaagagttgcctgtcatacctaaaatgctatcttgacatggcatacttcaactgagaattcagaaatcaatattatttgttctttgaaaacacttcaggttagaagtaggcaagctttgcttaaaaactaaattcaataaatattgcatttcatatatatatatatatatatatatatatatatatatatatatcattgacttaagccccacacatggtggaatatttttccacttttttctatcatggccatgatatttaacattgaggagctgtgaatctgggcacatcctgattgataggtatccactgaaaaccagtaactattagttaagttttatttggctgactggcttatttaaatattttgaatgaatccttttagctaatgtaaaagaaatagtcttgacagcaccgtttcctctttggttttctctcacagcagacaaagacacttttaaatagtaaacttatgaaaagcccatcacttcatgacagggagagttaaagcgattttctcaagttctcagagtcttgtttgcaatggaaatgtctctctctccccacatcctctttctctctcctattttatttttatttttttgagaaggagtttcactcttgttgtccaggctggagtgcaatggcacgatctcagctcactgcagcctccgcctcccaggttcaagcaaatctcctgcctcagcctcccaagtagctgggattacaggcgcccgccaccacacctggctaattttttgaatttttagtagtgacagggtttcaccatgttggccaggctggtcttgaacttctgacctcaggtgatccgcccacctcggcgtcccaaagtgttgggattacaggcgtgagccaccatgcccggcctctctctccctcttttattctatcaccactcacgttggaagtgatagctctctgaggacactaaaatatcatgggaaaaaatccaaacactttaaaaacaacaagatcaattttttagcctctgctttaagttttatgtgagttctctgtagcaacacatttttgcttggggaaaacacccaaagtgaaatttcttcacttgaaattgtcactaatatttgctgtgagaaataaagtagcctatattcaaaacaattttaatcactaagaaatcgttaagaatgattatataaatatatatataatttattaaccatttttactcaccaaatctctgacttcaccttaagaatacagtggaaatccctgagcttccacctactgaacattagcacaaactcccacacacactcacttttgggcctgtctgaggacaggctccttcctctgtctaccgagctctctgctctttcctttgccttcatcatggttacagttttcagcttcagacccatgcctgcaatttaaagacttttttttttttaaagataaccttgctcaatttttaacctacattatctaccagattatttgattaatgtctacctttcccacagttttgtaaatgtcataatgtcagggaacatgccaggtcttctttagcttatctcctcatttctagtgatgacacatagttttgagctcagtaaatatttgttgagtgaatacatgagagccatcaaaaagaatttttaccagtataaagtttgcttcaaaagaaaggagtttataattactttttgattttacaaaagctttcccacatcctttaaatgaaattttctttattataatagttcctgtcatatcttaggaagtaagcttttctagatataaatgaaacatctttggtaaaagcctggtagttccttgtgatcacgattccctatgttgactaacttcttggtgggtaaacattgaagaagatggtctggacttttcttttaaacaaatacaccagttacaatgttatttatttttttattttttgcattttgcctaatgttaaagagaaactcagacataattaaaatttaattgaggttttcagaagatgggattcctgttaatcaaagatcttctataatcaggtccagtattgcatgtagaatattcccatgtattgcatacctagtgatttccacagacagaatccccgctctgtgagaatacaccatcaacacttctaacagtgaggcactgagcagcagtaaggctgaggggttaaaccaggagtttgccttgggggaaagattagcatcagaacccagaggtctgagatcgaaatccagctatctttctcaacaccattttaaggtgtgtgtgtgtgtgtctgtgtgtgtgcgtattcttgtccttctaagacatggtcaatctaaaggccacaaaaagaaaagaacatctattaaatgcacgttttgttttgctaacttaaaaattacaatgaaaatagtaactcatgtaaacagaacataaaagggtagacatatttatgctgtagccatacaaggttggagaaagagaatttgacttctacttaagaaaataataattaaattatttcattgatttacttttttttttttttttttttttttttttaagagacgggccagacatggtggatcacacctgtaatcccagcaatttgggagaccgaggcaggcggatcacctgaggtcaggagttcgagaccagcctggccaacgtgctgaaactccatctctccaaaaattcaaaaattagccaggcatggtggcatgtgcctgcaatcctagctacttgggaggctgaggcaagagaatcacttgagcctgggaggcggaggttgcagtgagcctagttcacatcattgcactccagcctgggcaacaagagcaagactctcggaaaaagaaaaaaaaaaaaaaaaaagagagagagagacagggtcttgctccttactccggtggaatacttcattgtactccattgcccaggctggggtacagtggtgcaatcatggctccctgcagcctcaaactcctgggtaaaattttttaacaaggtttagtgaaaacaaatcatattggattgagcccattacttttccatttttattagaataaatacattttctcaacaaaaggtagcccaggaaaataatagtttagatctgtaacatttaaatctaagtcgaaaatcttgtgtgatctaacattatgattagtatttagaatatcaatgatggtttggttagataatcagaacagttcattatcaggtatataaagaggagatttgagcataatcaatattttatatttcagcttactatggggatttggagatagaaatcaacatctttgaaatgcttctgagtgttatagaaagagaaatgtacaaagcaaatgtccctgaaggctcttgtaacctttgagaaattcctgaagccaaatcatagaaatgtggccagaaacagtttcctgagaaatggatgtggtttggcctagattttagatgaaatctctgtaatgataattgaagcatcacattactccaaaaaaaatattaaccaagaggtgctggccctgaattgtcttctgtctgtattaacaaagccttgatttaatcatcacagacaatatatgttttttaaagtattctatttctaccaaatatgagtcttaccaaaagctgaatgtaagtttttctctcttttcacattctgatagatgtaaacccaccgttctatgcatgagaacattcttaagtacagttcacttgggcgttcatattaatgttacttctcactcattaacaatttgtttagttagccataataaactttttattcttataaatgtcaaactagttgtgtatcatatcatatcatttccccttgtacactagccttcagaagcttaagaaatacatacatatctttatgagtagtcttactattcagaatgtaaagccccagtaaaaatttactgtcagaatttttaaagtgaaatgtttcctagagtaagtggtcagatgagaaatgtcaattttcttattggcaaataaatatttgttaagtatctagtattttgcaattttaagtaacaattgttgatattttattaccaatgttttccagcaaataaaaatgcaaaatcaccttattgaattatttgctttctaatttggtcttgatatttttctatggagagtggatgtaaactttaactctgctctgatgggactgcaggagatttggtcatgaatgtttacagtatgtccttcatgggacatgggatacttcttttttttttttcttttgacggagttccactcttgttgcccaggctggagtgcagtggtgcgatctcggctcaccgcaacctccacctcccaggttcaagcgattctcctgcctcagcctcctgagtagctgggattacaggcatgcaccaccacattgggctaattttgtatttttagtagagacggggtttctccatgttggtcaatctggtctcaaactcctgacctcaggtgatctgcctgcgtcagcctcccaaagtgctgggattacaggcgtgagccaccatgcccagctggaatatttctttatcctggtgggtggcctaacgcctaagtgtctgacccatgaccaggtttcctctcaaaagaaacttgtttatacagatggcccctgacttactgatggtgcaaaagcaatattcattcagtagaaactgtacttcaaataaccaaacaatcattctgtgttttttactttcaggatagtatccagttaattagatgagatatgaaacaccttattataaaatagatttgtttcagataattttgcccaactgtaggctaacgtaagtgttcataacatgtttaaaggaggctaagttaagctatgctgttcagtaggttaggtgtattaaatgcaattttgacttataatattttcaacttatgatggttttattgggatataaccttatcataattttcggaacatctgtacttgcatgtaccgttatggctcttttctgacctgtgcccagcttatatctaccacgatagccactctctaggagaaccctgatataagaagaagttaggtttggccactcaggtgagacacagaggagacaacacaacaaaacacatgcaataacagaagcatcccagagacgtgagcagagcacaccttgcagggccaacgagaaaggggggcccaactagaacatgcatgttcaacaagatcccgtggatggagagcaagatagagagggagaaatccaaggggctaagcctttattgaagtctggggcattacataaccagatttcccttggggagttccaactggtaggtttagagcaagcaggctccagctctatggggtcacagggtgactgagaggtcgtcaaaatggcatgatcagtgtagtccatgagggttgagggggtcagtggagcaagtcaagtaggttatatatagctgtcccataggtaaggttgtcaccagggggcagtttataatgtggatatccagaatgaccacactgaggaactgagaggaggcagagtctcagaaactatacataggtgactaagccctgcttctggtatgactgttgaacttaactttaaaatggatgccaaggcaacaattataagaattcagtggatacttcctacagtttaacaactgatgaccattttttggggagatgtaaaatggacttcctccacgaccagtccagaaggttccagcctccatttagaaggtctaaattagaagagcctttactttgtgaactgagatccttccctgaaaggccctatctggagtgtgattttattttattttattttattttatttttaagcacaagagactttaagtttgtcctttaaaaaacaaaaaataaataaataatggtctagagttaaatctttgagaatcatggtgtctacttctttaattacctacttgcataactagttatctgtcataaaaatgcagatattaaataaaactcaatgctaattttaataccaaagaataaagctagttttgataagtagtataatattgtcctggctagataatacatctaaaagtcaatagaatttagattttatttttactatgaatataaatcttacaagagtttaagcaagtcaatgttcataatattatacatttttaaagtcatttaacattttatctttcacagtcattcatttagaaaaaaattgaaattaaaataacttaaaattaaggaattaatttctataaaagccaagatgatggttattaagtcataactttaaaaaattctggaaaaaagttagataattataatcaaattaaagctattataaccctacttttctattcaaagttagccttctttggtttttaaaatttatatactgaaccttagctatctagagatattaacattctttttaaaagaaaacacatttatcaaggataacctgtctatcagtttcagttctaactgctgaggctaaggagctaagagaattataatggaggtagacacattgtaggacagatataggaataaaatttatgttatcccaaatattaattattttgatggttttaggagttcctggctttctttaatgcggtaatgtatagatcaagatgatctagtttatttggctatttgctgtcctagagtacttagaaagacacagtatgggattgattttaaagatttgaatgttaaaatccatattacattcagccaggtctacttttgatctgtccttggtcaattactcaaagttttgtggattttttttttaactgaagatgtactatgtgtaggatactctgtataatcttgagcaagtaacagtgcttttctcaccttcaggtgtattatcaagtgtattcactaagctaaaagctaaactgctgtaatgagcaaatcctaaaatacaggagttcacatgaaatataaatttcccttttacataacagtttgtgtctgacaggtgtgctcagctccatgaagtcattcaggaactaagctggagggagctctgccattctcaatatgatacctcaggtcactccaatcatttccattttttgacactgagacagaaaggaacagtgagtctggagtaaatatttttagaagatgcctgagaagttatgtgtataaggtctgctcacgcttttgggaacttagcatcatggccacatagggctgcaaaagggagaagaaaatgtgaatggctgtgtgccctggagggaggagagaacacacctaaggcaatcagcaatcttccatattagtatgacaatactcacctcccccgaactgttgtatgaagtacttagtgcagttcataatacatggcgaaggcttaataaacatgataaattttacctatttgtcatgattgttgttattaaggtacacagagagggtagggtatatgttgatgaaaatatccattccgtatggagtaaattaatgtactcttctgtagtaaagaggggaaattgtgcatcttttgcatttcttttttctgtatgtgattattattttacctatgtatttgttaactaaaatgtttaagtgtgcccagttgactggaaattctctaaatgtctgatccattaatttatgacttactaggaaaaatgcctcttataagaaaatttatttgtagtgttcacagggaaataatccattagctcaaagtcaactggaaagtataaaactacttctgcctctcataggactaaaaattgaaacacaaatagagttaaagccattcttttgactgaaagaaagccttttttatttgctagaatattcatataggactcaccaaaaatattgttaggccacagtggagagtctgcgagtagtttacgcactgagcaagcacacaaggttttggaatagcaagctgactaaataaaagctgtaacttattctggcagtgaaaattcatcatttaaatttcgaatgttttaccaacacaacatattttacaacaaaacagaggttagaaagaagtcttctgcatcctgaaactatcttgacagatatttgagtttttaattttaaaatagagaaacatttaagtggaatcctccctaaaatattgaagtggacagctgctactgatttcaaacatgaatctaaaaaaatatataccttgcattgtgattaagtgaaaatccttcaccggttaggatgttgtctgtgaggaagatggattatggtagataagccaggtgtttgtgctcataaaattgtgaaatttctgttttgattgaagacaaaagattgtatccctaattagtcagccacaaagtacatattagagacatataaattataattaagtcaataagaaaagatttcatatacttttataactgcaccacatattttcatactcttgccagtccaatcccttgagggcacgacagctctatgctgtgtagtagaggaaaccttgaaccttggggtcaagaaactgagtttaaagctctagctactctaaccttattaccttaagaaagacagatcattgaatcattaactgagggtctaatgagtactagactctattctccactctctatcttaaatttaaaaagttcttattctatggagcttgtgtgtatgtttgtgtggggtgtgtgtgtgtgtgtgtgtgtgtgtgtgtgtttagacaaggaaggtatgttgcaaggggaaagatgggataatagaaatacaagtaaatgtataatgtaaggatggtgaaaatactaaaaagaaataagtcaggataatggaagaaatcagtaactgagcaggcaacatgatggaaatgttattttagataaggtggttctagaaggcctctctgaaaaggttgcttttgagcacagagagtgctgtattcagtgagcttcagaatctttaatgcatcagggataagagttctggaagaaggatttcatgaataggggaaggactttagattttactcaaggcttattttcctctttcataaaatgaaaagtatgttttacctacccaacacacctgctggtaaaaggaaaaaggtgtgcgataatatttgtaaacataaaatacagcctaaatccaaggaacttaggattttaaaaaatcattgttttgctgagattggaactggaagatataaatgctcaaatggaaattctttcttttgagagagacggcatttttgtgtaaaaaagggttttaggaatagtaatgcatggagttattaaatttcgtatgtatttctgcacatacgtatatgtgtatatatatagaaatatcatcaaatgactgtggggggtgtgtgtgtgtgtgtgtgtgtgtgtgtgtgtgtgtgtgtctgtattgccgaactcataacctaggactatgtttttaatgaagcaattttctaacatgaattcattatcttttgctttatggttgagatttcagattaagaagttaatagaaatgagaaagagtacttttttttctgaattgtcattttttggtccccaaatagttcttgaatttggcttttctccttatctcttctactgagttttctaaatgatagaggacaaaaggttgaaatagtttgtgaaactgatcctaagttataccatttattgcttcatgaagtcctttagttgtcctaaaaatattagtctaatacagtgcagttccaagatctgttctttaacaccttgtgtaaatcaaaatttgtgttacttatggataattttcctataagaatgaatataaagaatgggtaatattcttaaaatatttaattctacaaccattacagtacacttttgctttattctatgttgttattttatagccctgttacttatatttctcagtgtatttgctcttgaattaaatgtccagttgtttcaacattttgatggtgctttctcacttttaacacgtcttccaaagtttgacttggaaggcattttgtttgtttgtttgtttgtttgagctctagtaccaccatttagggctacttagatattgaatcattcagatttttaaaagaagatttaaacttacaataacagtgggaactaaaatatcacagtagtcataagcatcactcaaagaagctctggtggcagacaaccaccctattgtttccgtgttgctggccaaatggcagggattactgtttaccagacaggctcagtagcacagccatatgacagtgacacaaacatccttgacagttctctagcctgcccaaccccaatgttaaataaatcagttttgatgaatatctgttcattttctgctttaagtgaaatattaatgttatatttatcttgggctgtttcaagtttgcatatctccagtttccatgcaatacaagtgggctgtatttcttgcttgaggaagtatctttctttctttctttctctgttatgatttttgaaagcgccctaaattggaaacatggatacccggagttgcaaagtcattccagattattatccctttcctgtacaaataaatgccctttatagccctagcaaatgccaaccctacgacttgtcagtaaatatgctctgtgtctcactgactgcaaattggaatctcagggggaagttgattccattttatatttctctaattgttggagaaagcactttatatcaggacaaattatctttccataacctccattgactatgagaaatacaatttaagggggaagtgaccaatcgtaatggttaggaagatgcattccgccttcctaatatacaaaatctacttgagctctaaaaataacaaggtgttcagttatcttttactctttgaaaagaaaacacttgcctcttcctagtaattattgataattttcaaaaagtatttaactgttctttaaaaaaaaaaaacagagatgtgtcaggataattgtcttttagaccaagagacaactataccagaattccaggagcctaaagtaaacttggagtataaaaatctgagtgtgtcattcactagctatgtagatttgaagcagctttttcttccctagctaggctaagtgtaagttttctctttatacactggaaagaatggaagctaacttctgataaatgaattaaacaagttctggaaaagtgtcaaccatttaggcaagatgctacaaaatttctgtgtgaataatggactatatttttcaaaagtgatagcctaatctcagtggctgttacccttctgatgaacatacagccatttgagatgagtcaaataccttctgtaaaagtcactttagtaagccagcatttaaagagaaccagctttgtacagcccataccattaaaacttgcaaaaggaggaaagaaaggggaatttggtctcaaggaacctagaatcatcatttagacatcatacattccaaagacaattagagctatgttttaatttttttcttttctttctttttttttgggggggggatggagtctccctctttcatccagactggaatgcagtggcatggtctcagctcactgccacctccacctcccaggttcaagcaattctcctgtcagcctcccaagtatctgggactataggtgcatgccaccacacccagctaattttagtatttttagtagacagatggggtttcaccatattggtcaggctggacttgaactcctgacctcaggtgatccatccacctcggactcccaaagcgctgggatgacagatgtgagccaccacacccagactgttttaattttttaagcatattatatttaaaaacataatattttttcctaagggcactgaatgttacatagtaggtactcaaaaactatataatatttttttaaagctacagctaacatttcaaaataatacaatctaaatatatttatatgagtaccatatttctaatgcactttaatgtatgccatgatgaatctggcccataattttggaatgctaaatatgtactctcctgaagagaattcactgaaagctttactgcgtgactgcatagaaaagcaaaaatctagcatttagttttaatggaaaggaatttatattagatatcctttcctcacacagatatgaataattttgcttgaataattttgtaattggaaaatatctatatcattttttaaaactattggctgcaaagttattacactgaattcattttaatcatttagcatacattaatttttggtttaataataaaatctttgtgctaaacaagtaatgacaacaacaaaaatctgggttagtcatttttgtatatctttcccatagtaagctgtatttatatttctgtaatgtatgtttaaaatttaaaggtcttcagagtcctatcttattttcaaaattcattgttaaacattttaggcaagatgctgcaaaatttctgcatgaataaattattttacttactgtatttttcaaaagtaataatctgatctcaacagcaataacccttccgatgaacatacaaccatttgagatgaatcaaacaccttctgtagaagtcactttagttagctagcatttaataagcatcacctttgtatagtccatgtcattagaattggcaaaagaggaaaaggaaggaggaattgatctcaaggaacatagaatcatcatttacacataatatattccaaaggcaattagaactatgtttcaatttttaaagcatactatacttaaaaatttataatatttttttcccaagggcactttttaataacataaaaaacacaagaaatatttagactttaaaggatattttgagaagtaaattttttttttctgttgtatatagccgtccaaaagtgcaatttgtatagtgtataacatatctatattataacatactaatacaaagagcccgaaagagtagactactttataaaaattgtctggctagattgaagctaggtgcccacatcctatacagcctgtcattaactcttcccgtaatgtaacagtggagtgataaataatgctagtagacactttcatgtgaagattaacagtcattaaagatgtaaatacagtagaatgttacactagtgcacgtataagccactctaattgcataggtaattaacacttctgttgtttttctcattatcattttgttccagttgaaatgcttgttagcaacctactctgtagaaggaacagatagcatgtcattataacagttgacacaaggcagccttcaagtatgtgacactaattaaattaaaacttcaaattacaaacagacttcttataactaatgatgaatgaccattttcacgaaacaatattcacttctttattcaagagtcacaagtgttgcttttaatatgttgtattaaatcacaaagaaatccattaacaaagctgttatgtctgtctttccaatggaaagaatgttaacattttgaggcttttctgcagactaagggagttttctcctctcgtttgtctaatgacaaatgattaggaatttctatccctaacagggttgtcacacttctcaacagctgggttacgaggcagtctttcccggacagggaaatgttctagaagtctggaaattactattctcttttaactaatgacagtggttggtgcataaagaatggtcaataaattgtatcagtatattctgaagctgataagatgtccagaaaaggcttcttgagactataccactttgacatagttagaacattcagataatttacaagagttaattaggaatcaaccctaaagcaatcttaatggagattggcctaccaagcagaatgtgttactaagtctcagaaaacaaatacaaactatattatttgcttcatctgattagaatattttgtccatttcaaaagcttactttataactaggtaactaaaagacaattaaaattttagttagtgaggacaaaattatagtaacaggtatatgttgaataattttaacagtctcttataaagagaagaggtctattgcaatatttttcaattcatagatttcagtccacagcttcattgtgaaaatttcacaggtacagtatcaactttggcccatatgtgtaatatagttttcttgcatattataacaagtgagtatacatactgttacagcaatggatgccagaagtatgtgtgtgttgaacaggacttaaaatgtgctatttactctgagaaagacgaggccctagaggcctggtatgatatccgagttgcaacaaaagatttgctgagacttacaaatatttgcctctgaatatatgaagaaatggttacagggagcaggagatcaaagaatatgtgataaccattggagcttttatagactctgagaagtgctgttatactgtatcagtataatagaaatgactttacctaaattattgaggggaggggaagagagagagggggagagagagagatagagagagagaggagggatttattcttctcaaacaaagcaataataaatgtattattcaaaattgtgatactaatacaagtaagtttaaacctttgatctaatgtaacactgtccagtaaaactttctgtgaggatggaaatgtcctatctttcaaatatgttagccattaggcacattcaactattgatcactagaaatgtggctagtgagactgaagaactaagtctttaattttatttcactcatttgaatttcacttacttaattttaatttacactcatttgaattaattaaaatctaatgcaattaatatgaattttaatttagccatatgtgactagcagctaccaaatctagcccttacacaggtttaagacatccacctccattgtaagaactcaatcccttgagttccagagtgttcttgatcctttggtgattacaacctggacagattattgctccttgggcacccacattgtagatttcttgctatcttccatctggtaatgtgttgtttctgcagacaagttacagttagcttatttactgacttaaacttattataggtttgttccttggttggaattcccattttcaaactatcacttagtatgagttatttctgaacataaatgatttcatcaattagcatatgggcatttttttaagtggagtcatttctctcatcctctgctttcctgggatctatctacaagccgaagttgtaaatcaattacatagtaaataaggccttactgaattaatttgtgaatatttaatgattacttaatatttttcatccctatactagccactagtaatccaaaattattaagacatcatcctgcccttggagaacttacagtctttaagtgccacagcactataaataagccaattcatcttcgaaagcaggcttaattaatatgaaacctctggagaattcatctacaaaaaatacgagtgtgtcagcaagcagaaattatttatcacacaatatccctcctttggacatgtgagtaaccacaaccattattaatgtattagatagtatttggaggtggcagaaatccaatagcctaaatcgtttccaaggtagctttcggagttagccttgtaaaataattaaaattctaatttattcctgtgtacacatggagtaaaatacttagtgttaagatctgcctgaatgcttaaatatattaaggagtgctctgttgtgtttattagttgtttctcttttcaaagttttcaacatggcaaagtttgccttaattatatttaaacaagagtgccttaacatattctctctctcaccccttacaatcttttgacatacctagttctccagttttgtgtattagtatgaagaagaaaagtgaattaaaagatgtattcatattatgatgttaatgagttccaggatgtgatattttagaagaagcatgagtaggaattgggagagagggagggtttttctggcacactgcaaattatacagatagaaggaggacataattatgaatacagccagtattttacttgcattacttctacattctatgtacaggtagaatggtcatacataactgcagtattattattttggctacgtataatgtaacagattttaatttagacttggcaattgatatttgactctcagatttcttattcttatatcaccaacggttggaaactgttggaaataagtggaatatcagaagtagttagggaaaactttatcaactgggtccaggtttcctggaaatatatatatttcctctactctaatatatatataaaaataattgtatattatggtattatatattattatatattatattatatattgtattgtatattgtatatcttatatatagtcataataaagtaaattcatgtttactttattatattattcatgtattactcatatataattatatattattttttatatagtcctaataaagtaaactcatattttctttgagataaaagtgacaattgaaattcttctatttatatgtatctaataatttggattcaagcaaatcattggtgtggtcagtccatttttacattacaacctttaatgtgcaaaatagccttagagatttaaaaattgatttaaaacttaacttgaatataattacaaccttcatgactttaaaacttatatatcctagctgtcttatttttaatttttatttttatttattttttattttttgagacggggtctccctctgccaccaggctgcagtacagtggcacaatcttggctcactacaacctccgcctcccgggttcaaccaattctcctgcctcagcctcctgagtagctgggactacaggaacgtggcaccatgcccagctaatttttgtgtttttagtagagacggggtttcaccatgttggccaggatggtctcgatctcttcacctcgtgatccgcccacctcagcctcccaaagtgctgggattacaggcatgagccactgcgcccagccagctgtcctagtttttaaacaatgatactgaaacagtttcccataggctaaatttttttcttgagtgtttcttcaactatctatctattcccatgagatcgtaaccttttattttaaatcaagtaattttgttaggtctcaagtatgctggaatcttttgattaaaaaaatgaaggttaaatacaaatattcatgagcaaacaaattcctcaaccttaatggatttcaccatttagttcaaggtgaccaggatattagattatcagccttgttatatcaaatatagctaaactatttgtcttccccttggggaaaatcctaaaaatattctcttgtccccacatttcattacttcagaaggatattgattcttacagaatatttgaatgaaaaatcctgaaactgttgtttcatttcataaagttaatgagtatttcgaaatggactccccagctaggcagttgcactactagacaagatttaaacacaactcaatcttatatttgtttggggggagtgttcagatatttaaaagtatttcccatctgttgttacattttatgctcacagctgggttagactttgaggttagatcatgaggttaggctggtgcctccctccacagtgccttcttttcaacatttgacagacaggaaaaaaaaaagccatagttgtttcagtcactttctcagtcatactgttagagaatgccagactcaagcctgagcatctgacatcagttctatagcaatttctcttaatctaccaaccaaataatatgctgtagctacagccaaatttttccaaaaattgtaactttctatgtcaatctctacaatgcatgtttcttttagatctttgctacaactacatcatgaatacatcccatatggttgttaattacagtatatagcttcatttgtatagagcagcttaccactgatctcaaggctaactttgcagaaaaccaagttatcaccactgcaacttcaacaacaataacaaaatgttgtaacttccctcctctaattattttgtaattaacttcaaagtctaaaatgacttaattatactgtagtataagccagaatcagtgacaacttcttgattggacactggaagctatttacaggctgctgtattttcttttcatgtagtatactatgatttctccttttaggcacttggaattcataaaaagaagatgtttttgaactttaattctccagaatctcatattatgggactcatggagccattttatgatacttatgttcttgaggtataccacatacacctattttctagcttgaatttattagtgtattataattcaaaataaagtatacataaaataaaatttgtgaaatttacataattcatcaaagtcaaagaagatgaaagtttcttaagtgagaaaggaatacttctctataaataaaggcacaaagtgaattatcattattgttcaactttgcaagaagtcctattatatttagaagatttttcaagatatatatgtttttgttgtttgaaaatgatggtctgctttagagtgaatgattaaattgttttacataagtatatcatctaaaagaaatgggaaaaatgaccaagagaagggcaaacaatgaaaaaaatcaaaggatacatgaagaaaatagaagtactcagaatcctgttgtcagaaataactgtggcaatgatcttgtttatttctaaagcaatagaggagttgcctctagatcatcccaaaggatcagacaccctttgctagaatttatctgtaaacagtaaattcatgagactatgtccttgttatatacacctagttctcagcaagtgttatctatatggatgaaaaaactgctttcttttgaaatccaagaggaaccactgaccgaatccctctttcattgtgaaactttcatatactttaatttgccataatattccttctatagtttatcttcctgagacaaatatttctgaatttttaaatcattgacttaccatataattcccagactccatccattttatttcccttttatagaatgagaaacctttgttgattttttaaacatatggtacctagtactatgtaggtaagaaaaacctgttctgcgctctttagcttagtaaccggggcctgcaaattaaagtgacaaaacacagatcaacaggagaaaggtttattttcgtatgcacacaggagcttcacagaaaagaagtgaaagtccaaagtagtggctaggtttgagagcttacatatcattttaacaaaggctgataaattgtggagatgtgacaagacaaagcaaagggatttgggcttacagggatggtaaattgtgggaaggtaaatatatggggaaagctaatggaagacaagggttattttactaacatttgttattcagactcaaataggctccctctccagtgatgcactgtcttcagtaagacatccccctcttcctaatacaggagaaaagagcagaaacaccttcacaaagaaaaatgtatgctctgcttttaggcagaaaaagggaaggaagatagttcctcccatatctgctgttccttaattgcctttagctcaaagtaatccttatgtcaaagtggcatctttgggggtagaatattctgatccccttcaactctaaatgtgttctaaaaaaaagaagtaacttcattttccttggtaataaacaaattcaagatttgatatacaaatttgcatctattaaggaaacctgatgccgaatactaacacaaatcctatatattttatttttttatttcaaattaaaactttacattattctttgttaattttcttttttatttgccaatcatgtcagcttaaaaatgtcatactttaatattccatatattaactatgttttcaatcttcattcacttggaaatttttaaaatgtgacatctgagtcttcatttaaataactgatgattatgacatgttgcacagaacccagtcctgtctctctctataggaacataaagaaccttccaaagaggatgtggaaagagttaaaacaaacaaacaaactaaaactcaaagcaaaacaaatatatccaagcaggatttgagagatcatacacaggatacaaagcgaaaagaaccagacagggccaatgtgaacaagtaagaggcgtaggtattaccggaaggaagcgatgttactctgtcatatagttacatgggcagtggatcgttgtgaataactgtgtggaccctgaagataaaaatcctaagtttagattctgacttcccaaaataaccgctgtgacattgcacaagacagttatctctgggtctctatttctgcacctgtaaaatgaaaataacaagtgtgactcttaagattggtcagaagactgagttagttaataagcctaaaaaagcttagaacacagcctgatatatgggcattattaaatacatgttaaccacattattaacaagggaaggcctttcttctgaatttaacaatgaattctcttctgtagtttctcagatcagagtagagacattaattcatgagagaagacattgctgaaaatgaaatctatttatgtactgaccaccttattctgaggaaatgataccctggatggaacagattgggtgtcgttatttgcctatctaagcaaggatgactttgtagaagccctcactgaattttagagatattcacaacagaaacacatacaatagatttcctactcaaagatagaaagcatgcagagaatgtctgtggcagagattcaccacacaaatatggaagtgtgcagaggtagtttctttccatcatagtttccctggaatgactgaaaagatatgagccattatgcagttgttccaaatgctagccaagaagcagctcctttgcaggatgggggctgggggagtggggatgatttagatacttttttaagggactggatttctggtaaaaatgtatttttccagcagttttactgatgccataatagatcgtgaacattataaaagggtaccattgcgaaaagttattttaccaggtaggaaacttgcaagaggatttatatttcaaaatgacagtgtcctaaaactcacatttaaaaaaaatgtcttgaagagaacaggtccagaattgtagcctatggaactatattgctcagaaccttagccaaaaaagaaaaaaaaaaaaaaggattttaaagatgttgtctgggacttttactcctcagtagaactttgtacatagtacaaggtgttagagtgttgtagatgaaggagttcatttcagaccaccaaagtcttcctgttttttgtttgtttggttttgtttaaaaatgtgtattactccactagtccttttcagcaactaaacaatttcatgcctatattttattagggtcataaattagttttctatactttatagtatcttagcatcaaatactaatgttatataggtacatttgctcctgagatactcaagtttttaatgttataaaaccaaaaatttcaagtatttagagatgtacttttgaaaagtcacaatatttagatactaacgttaagttttagtggttctgcatttttttcgtatgactgtgttaggttatttttacttttagaaacatgtcttaaaagattcaaaattaatttatatcctaaatataatttttttattctcttattttcataaaagttaaaagtcaggttaaatgtctttatgataaaataaatgtaatttttcattgcccatttaaaaaactctgcatttatcaactttttcttcaggattttgtaatttatcatcatagtttgttcagtagatttgcgctaaagttcaggcctagtggacacctattcaactctttaagcatttttatagcttttcaatcgtagggaaaattaaagagaagtttggccaaacagcaaacatcctgcagtgcttatttgcttatttttctatcatcgcctgatttctttatcctggaccttccttcctgttctcacttcacacaaatgtggtgtaggagaaaaaacccggtacttccttattcagttattctaggttattttatagctgtaaactaggacgccaagttgctaccagaggtgttttttgtttgttttcaagtagacccagattaggatctctgttaacaacataattaaaaattgaagaaagcatggttagtacatgcagtggtagaggtgtgagtaattgcaggtagcagaggagagaaaatagttgcctctaaaaaaagtattttgaaatgtccttcatgccagtttcccagatacataaactctccacctcacttttccagaagtaaattttgagaaaataaggaaacaaatgaaagtaagaagaaaaataaattgggggatgtctgtgtgtgcatttatatatttctacttctaatatatttataatatatgagaaattgcaaataaagtggaagttggtcttctgcctttgtttttcttatgtcacaagttctgactcatagctactgaggctgctgatccttgatgtatgataatgtgcagtaaattgagaagtgactgataaaatttgaaccgagctgtcagatatgacatcatatgatcagatcatttgtactttcatgctatcaattctgtttctaaaaacaaaccacagaaaacagacttttttcataatttctcgcattttatatctggttcttcttcttttttcataatttctcacattttatatctggttcttcttttctattcttttcttcttcataacccatgacatttttcttatttcttctttgatgatacaagcaaattcctatgtagtgtttagaagatttttacctgactatgaatgcatatgctcttccaaagacagactcattcataagaatctgtgacaggtcagcatttccaggatgtgccaatatattaatattcataaaaagatgaaaactaagtgtgcatgttcttctgtaagcgacatcgtgtttaattcgtggttgaatgaaatgagatgctctgtttaggagctcgatttcaatgaacgtatttccagaaaatgggcactgagttttaagtctacttttaggaggcattagaacgttacactttaattaaagagtagtctgtgtagaagcagcaccgacattgcctgggaacctctagaaatgcagaattttaattccaacaaatatctactgaatcataatcggcactttaagacctctaggtgattcagatgtacattaaagtttggcattttttttttagagtgcatagtatggctctgaatgtggcatttaccaaatgtttattatgacacatacatacaaattcaggagagacataatccatgaaaatcagatcagagtagcaaaatggtgaaattgtttaataatatcaaggaagacgaaacccttgatgaactccagcataaaatatcaaaatatcgacattattctagaataattttaagctgtcatatttgaagaagctttgaggtgtatcttagttgtaataaaataatataacagtgtttccatgatagttttacatataaataagcatccttaaagaaattccctggattactctttctgtgttaaatactgtgctattctaccattgctgtcattaatcaacttcattagataatatcataatgagaacataggtgaagctacaagaaaaatgttgcagagaagaatttgtatattttctagaagtgacagatatatatgtgtatatttatatatttgttgcttataggagagcattattttttattttaccaaattattgttcgtgtatgtgtgtgtgtgcatgcactcacatactcaaatctttaaaggtcagtcttcaacgaggtttcaatcagattccatgtagtaaaggtattgaattgacaaataccttcttcagcattctcttacagaataaataaaataaacattaaacttaaaagtaaaaatgtgttctacttttttggaatttttatttgcatatacctgttcaaacttctgtagaaaagaaccttttcaagagtcatgttatgaatttaaggccagattgaaactgggtcatgtctgttgcccagtgcctgattttccattctgtacatttctgttgacctttgctttttcttaaccttcttgtttcagatcccgttgaccattttcctgctcattaccatgggtatgagtggtcagaaagggcagatgaaacaaaaataaatcaatgactttctttgcaaatatatctgaaagaagatttgatggaggagacaagactcactggaatcttgctacaacagtatttatcgtagagcagaattcattgtaaagctgaccagctttggagtccctcaaacaggatagagtgatgagggaaatgtttacctagtgtatttgcttgatatgagtttcatttatgtttctaccttttttatagcctacaacatagataaccggaaaaatctttctattgttacagttttgtattttttcctgagccaagacattttcccaaaggggtattgcaattatataaatcattagaattgtccataaatgtaaggaattcttctgtagtatctcaataacagatatctttagttgatacatttttgcaggccattcagaagctatttagtagtttagtgtcattaccgctattagtaatgctacaactctgtgtgtgtgtgtgtttgtgtgtgtgtgtttcaatctgaatctcattgttttctgtgttcttcttttactctaaataaacctccatatctagtatgctgtgaaaggtgtaattgctttataaaatgtagagcaaaattactattgccagtagatgaggtctatgaggaaagagaagccttttgctgattcgctagtcaccaaatactgtgtatttagcagttgtttaatggttcaaataaattgaagacattcagctctgtttaaaacaagaaaatcaaggtgctattagtttcagtggcaaaaacagcaattacttttacaccagcctaatatttagcgcactgaggcagtcatatgaactcactcaaaggccctgtagtgattccttgcagcatttcctagggataatctggctgagtgtttagtgttggcaagttgaacttcaactcaagcccagttaaggctttgtcatttttaatatgcaattgattaccaggtggtatccatccttcctattagggttttgtgttgcttcaaaggtactaacttgcccagtgtcagttctagcacaaagaggatatatgggtggcagatgttaggaggtaagatctgaggctgaaaaatggaaagacagatccttgtaccatatggtatttggacctgtgatgttgacatccttcatgctgggcttcaacctgctgagctaaccaggccttgaggctgtgccaagtggcagaactagcaggtcttcaccaggaagacgtagcaactgtcatgtagctggtctgcttgatctcagaagatggcccaccaaagagaaaataagcacatggtgatagactgattaaatgcttaaaggaagggttttgtggtaagggtcagttagctgattattgtaagaattgggctttaccttagcaatacacactattgaaaaacttacttgtattcactaaggacaacctagggtcaagtgaataagtattctgtcatcaaggcaaagcatgtgagatcatgcccatagttaggatttactgaaaacagacaaatacagttcctctatgcagtttaactggtgttcatgatacagccataacggttaataaaatatgaaaacacttctgattttaaacggctgctacccagtaccatcacaggacccctcaaataatctcctgctggctcagacacaggtgggcagagcgagaggctaccctgagatgactccacctatttgcctgtcagcctgcctgtgatgtctctcatttgccagctcttgaccccatccctttctccctttctcccacagccagagttcatggatcacctacaaatggccaagattcccctcaagttgcctatttatggctgttggtaaaagctatgacctgtacagtatatttcatctgttgttaaatatttgggtatcaccctgactgtaagagctgttttagtactggcatagcatggcttcaaaatcttgacatctcaagtgattttcttcccttttcctcaagattcttccatagtctactacacaaaaaaggcagattgagacagaaaaagatacataattagacttcattgctttgtctgagattgcagcacaatgtagtacagtaataaagaaaccaggttttgaagacagaggagatctaaattcaaataatagcgttacaactctgtgaccttgaagaaagtattcaacctctgcaatcttccatttcctcctctctataatagcaattataatacctaactcatgatgttattgtgaagatttaataagataatggacattatgtgctcaccacagagcctggaacataggaagtactcaataaacagcaattatcctattaatgctacttttacagaatgcaataaaggacagtttgttttcattaaaagtgtatcataaaatcgttttcagagttaatgtcatttcgaatgccataagaaattaaattttgaagaatatttgtcatcaacaacattcactttgggtctgaaacataaaatgcatatactttaccaatgattcaggactggtatatttaaatgtttgtatcatcctatgacttttaaattgagctgtttaacattctttcttcctctcaagtgtaaattggcttatataaaaatcaccgtgtctcgcactatgattcttccagtgaaagacgattaactatacgtgctctaactgatcctctcactataatactacttttatgctaatcaggtctctcccttatttattgtgtcttctctcatctctattttgtcctcatccactcaatccaggaaaatatcagaattatttttccaagtaaaataaccaatgaacaacttcttttgttttgataaatatgccagatctttctacacattgtctgcatatactgcagtgaatctgtgtcatttgaccaacagtcacagagcaaacttctccctgaatcagaaagatattttttgttttgttttgttttgttttgtttttaggccagtacatataatttaatgttgtcttaagggagatctataaaataaaaatgcttgttttccagtttttgtggagttgatttactcttttttaaattatagaaatgagctcatttgaccagaaataatactttctgtggattcaaaagtatccttactctcattgtttcttaatctgagaacaagaaaggacagagacattgtgtttactagtttgggtttcttttatacttagtcatcaaatgttggttttcttagtgttttttttttttcagaaagctaaatagtgactttcaaggactttgataatgatttatatattgataattcctttaacgattatcacttggccatcacaccaccaaaaccctttcttccactaaccagctgacattagcatgcctttggtttttaagccttaactggggacctgcatctaactttttattattttagcctatagaggaagaagatggacaaagaatcctctttcttttacaggtatcttaaaaagaaaaaaacaaatgcctcttaagagtggccaatagcaatatctctgtgtgcacagtttggctcagaggcaatctctaacacatttgtggaatcaaagatcaaatgactcagctgtctgacaagtggatgagccagttggctgctcccattcaatgtccctttctagcagtaagacccctttcctctgagagttgtgtggaactctctgattttggcttgtcttttcctgtcagacattagtcttttaacatgcctcctcccagggagttatccctgcttctaattgggtaggctctccaagctgccctgaacttcaaaattgcagttaggagctatcacccagttagaacaggtaaagtagtcccaaagaacaagaggaaaaagctttgcttttagagatgaaatacttatcttctattctgtatttctgaaaaaagatacaagtgaaacatttcatctttggcttcctaagtttttcttaaatcagcaaattgagtaaatcctttccttacagagaaattttaaattatgactggaacatgtgttttatatcttaaggactcaataggatttctaaaaattgaaaattgaagagcatcttctttctgattcattgattaaatatgtgtttattcacttaaaaagtcagagagccaactttacaagtcagcaaattgccacccaagaaatgtgatatgagaatcaatcaacaattgtccttccctcaaacaaaagtacttttattattttcacagagggcttgtaatttcagtctctaggactgattcattgttttcataagaatcctgtttaatgcacatgtatcacccatgaaagaacctagtatatcaacttggctagcaaagaacagggctgtaagagattaaaaaaaaaaaaaaaaaaaaaaacattttaacctaggtggaagtggagggagggggacgaaggagaaaataaatttctggagcttttaacaaggagagtgtgagggtaatccagcaattcagaaatatgaagaatgcatggagaagaataaaggagcatttaaaacacctaaaagagcactgatttttaatcatccaggctgagttccttctattaatatggggtttgatgagaggtaatgctgcaatgtcaattacttataaaacagtgatttcatttattttcttatctatttgcttttgtaatgaaaggtcagaaagcaacacactcaatatgcctaatatatttcttatttctaaggctataactaatgacaataatttttggctatgtccacacaatattttttatttgccaactttgtctatattctaagtgtttatagttgcagtgcaggaaaatgttatgacttaacctatactttttggattcaggtgccaacttgcagttaaactgataaaaatcacttgatatattctaaagttagcagaaaacacacacacacacacacacacacacacacgaggctattttaacatgacaatattttctgacgtgatctaaaacccttcagtaaaaggatgttaactagacatccattgtttatattcataataatacataccatcggtactttggtcatagcagatgttctctttttaggtgatcaggcatgtttttcacatattaaatacataaataaagctctatatgttagatgcaaacaaaatttcctaaactgagtcttcaaaagagaaaggatatttaaatcctaaaacaaattatcaaagctacaataactcctttcccagggctttaaaaattagatgtcagagatggctaaagggtactgcagctggacaaaatcaatcacctttacatctcttgcagtttgtgaatcttcacaacatccatttgaaatatgtaaacacaaaaaccattactggaacctattttacagataaattacttgatttgagtgagttactattagtattgagtgcatatgaatctttagaggttcttatttgtattcttgcatcctcaagtgtaatcatacagattaacaaatgattcaattaatattgttttacttggaagttgaaactcataaatccaattttaattttatttgaaatactataaatttgttttatttaatgcacttacatataagtttgtcaggtgaagtagctcagacgtaaaagtaatttgtatttgaaaataagaacaagatcttatgaaataaacactgttctgggaaagttgtattgcttctgtaaagatattatgtgattcgatattatgtttaataataagtatgatattaactatctttatattatatactaattttcccaaataacattgagtaaatgatgttgttcacattcttgatagtcttgtaagtggtctagattgctgtaactgttttgaattctcagctatggtaattacagatattataatgcaattttttcatactcttataataactacataaaaattacctttccaccttaaaatactaaagatgatagtttgtctgtaatacatccaagaaaatggatctaactgtgtgtgaaaagcattcttaataaaagaggccaaggtgtagtggctcatgcctgtaattccagtgttttgggaggtgaagccaagcagattgcttgagctccagagtttgagaccagtctgagcaatgtggcaaaattctgtctttgaatctgccccccacccagtccccactcacaaaaaaaaaaaaaaaaaaaaaaaaaaaagccaagcatcatgggaggctgaggtgggaggtttgcttcagcccagaaggtgaaggctgcaggagccacaatcatgccactgcactccagcctgggcaatagaacaagaccccgtctcaaaaaaacaaacaaacaaacaaaaaaaaacaaacccatgtaaaagaacacacttaaaatcaggttaatggtacgttagaaatcttcatgtataacttagttataatgacactaaacatttgtttttaaataattccaggaaagttaatttttaaggcacttgttacaaattcttagaaatcataggatcttcaatttaataaggagaaagatttcacaggaataaatatttaaaagatgctaggtatgggggctcatgcttgtaattcccagcactgacaggctgacaggaggactgctgaagcctaggagtttgagaccagcctgggcaacatggtgagaccctgtctgtacaaaaaaaataaaagaattagccaggtttggtgacacaagcctgtagtcctaggtacttgggaagctgagctgagaggttaccttgagccagggaggtcaaggctgcagtgatctgttttcgtgccaaaagaagtaatcaattacttcagtagaagtaatcctcatacccctcagtgttttggagttagtagcaggctttactaaaattttcaagtaatttaaaaaatacaatcaaaactctgtttttaaagtaactaggtagcgataatcagaggaagtgcaaaactgcataattttaattttctgaatttcacggacatcttatgctttacatatcaaatttggtgatagctttacatagcaaagtattttttacttgattttatatcaactaggaatcaatatgtttttattgctacattatgctacccaatattgtaaaatagagtgggaaaaaaacaaataaatgtaagtccttgggcctcaagagatatatgcaaccatgcatatatgatacatttcataaactatacaatgaggcctgtaccaaaaaaagtgtgatatagacaatgtctgcacaagttcattgaacaaaatgagagcaatgacatccacaaaaaactcccctttgcctagtgtgtcccaaccatgattttatttgttcctatcacaatagtgtcaggcagaaagtattattaatccctatttttcaaatgtgaaagaagagtcttggtgaggttaagtactttatgcgagtttagacaagcaaatggctgttgaaactcagattcaagtctttgatctctaaaccttaacatgcttttcactgtattatgctgtttttcacaaagaaaactttatggagagactagggtttgagcctaaccttgaaggattttcttaggcaaataaaaaagaggtttcctgtctagatgatggaattgcataaagaaagatccaggagtgggaatatatttggtgtattttgggagggtgaaagatgacagtgaatgaagtagtgtataaatacttaaaattgattgtaaataatgttaatgaagcttcaattagatgatgggatcaggctaaggagtttggttttgttgtgaccagcaattgagaaccattataattttgagagtattcgtgagatgaaagtagcatttgtagaatctgttcaaagaatgcattaatggtggaaaagagtaacttctaacatgtcagaggaagtagaaattagccaggagttaaaatgcagtgtgtattccttcaacaatggtatgccaagcaccaattccgtgtcaagaaacctgccaggtgtttgcattggtgagatggatgagaaataatcaatgacatcagatatctcatagtcttattttgaagaaaaatacttagaaataataatcatgagcaaatttataatctgccacagaatttggagaagtcagaaaagttgcaggaaaagaaatgacagtatatagttaaaggataatcatgtgtttcccaggcaaaaggtggaggggattttatgaaaaagcatgtgtgaaatgtgtccaagcatgtccatggaacgctgtgaggaataacaaaaataatggtgtgaatagaatataagaggcctgagaaagaatggtggaaaatgttctaagagagaggtattctgatcagtctttggaggacttcgcatgtctctggcttcactgtggccgggaccacagaggccctggagagaagttcggcagaaagttagaagcagaggctagcgtgacatgggaataggcatgcagcaggtgcagtctatgttttgaagaagtttaaaagtaaattttttcagtaggcaaaaagggatactgcttgaaggaaagtttaaagagcaaaagcaactttattcttgggcataagttcagaaaattgagtgaggttgcaggtacaggactttgaaatattgggaaaatagatgggaaataaaaccaagaggcaattctagataggacaagacccaaaaggtgggatataataccgtgtaaggtagagaggttagctgcggggaaggagaagtcatgctgtttccgctaagatatgacgatgttgtgacaagtgcagttatttgcctgtgtctgccattagagtagaagaaaaatttccctctccacaaaacatgctatctcaattttctttaatcagaagagatatttgatggaacttatgtcctttattatcccctattaatgtacacagtaaaatatttactctatacttaaaaataatttaaacattcagaagtatacagatgaatcccattatccttgcattatcctgggagcattatttgtaaaataagatttagtgtaagaagtgaaatctattttgactaattggtcaagacttatacataatttaaaagtataaatactagcctcatatgttgatataatttgggtcacccaatgatggagtttttctttttaagttattacattttcaattttgctatcttgcttaggtcacctacatttagatttaaaggactggaaatgttttctgaatgtgcacattgctgaaaggtgaggtgacattctcatgaggactaccatacttgctaaaaatgtttagtgtcttggtacaattttgaaatttgtcctacactacctggtcacctcgcccctgtcccaggtccctcccaactcctcatgattcagtcactacagaggtaatgccaggtttaccagagagcctccaaccatgttcctttttgtgcctcatttataatctctggctgtgaaatgttcaaatgcctgaaagtcttcatgagattaatcatttaatttaaggcaacgttgccatattctcaggaattcatgaagcccccattatcccatgcttctcaccctggtggatgggtagaagcagtaatcagagtggctcttctgtccatttacaggatggacagaatctgtaaggagcttcatgggatacaaatattttcactgcacaaatgatcattgggaattaggatagagtaatccccaaagcaacagtatatgaaatatctatattgcctggcttttgagagaattttgtctgaggcaggcattgctatttctcaaactgccctgtctgcctccccattttccagaaagaacaacaaaatactgatttaagcagttttccaactgaaatatcctagcactggtcaaagaggtctgaaatatttattccctcaactgtgaggctaattaccggggcctggggccacctctaaaaatattatttgctatttactccagtgtagcttgcaaatattataattgtcttaatgtatattgatatgaaaatttgggaaggactggttatggtacagttcatccagccatgatccagctgtctcatgagttacccagtagtcctggcaaccaagacaagagtatatcaaagatgataaagactgtagtggctagtctaaagaaaccaactaactctttagttctcccagactaatttctctcttgtccctaaactttaccactaggaataatctaataattctatatgttgtctttgcaaaataaacacatatttttctgttttctcaaaatttataagtagctgagcctctcttctggccaccagatgggtattttactcctgctatcatgttcctcagttacctggcaatcttaacagtgaaaaatcaaactttgatttgagccaacacatgaatcacttttaaaaaaatcttgcatgattgtatatttagaaaaccccatcgtctcagcccaaaatctccttaagctgataagcaacttcagcaaagtctcaggatacaaaatcaacgtacaaaaatcacaaccattcttatacaccaataacagacaaacagagagccaaatcatgagtgaactcccattcacaattgcttcaaagagaataaaatacctaggaatccaacttacatgggatgtgaaggacctcttcaaggagaactacaaaccactgctcaatgaaataaaagaggatacaaacaaatggaagaacattccatgctcatgggtaagaagaatcaatatcgtgaaaatggccatactgcccaaggtaatttatagattcaatgccatccccatcaagttaccaatgactttcttcacagaattggaaaaaactactttaaagttcatatggaaccaaaaaagaacccacatcaccaagtcaatcctaagccaaaagaacaaagctggaggcatcatgctacctgacttcaaactatactacaaggctacagtaaccaaaacagcatggtactggtaccaaaatggagatatagaccaatggaacagaacagagccctcagaaataatgccacatatctacaactatctgatctttgacaaacctgacaaaaacaagcaatggggaaaggattccctatttaataaatggtgctgggaaaactggctagccatatgtagaaagctgaaactggatcccttacttacaccttatacaaaaattaattcaagatggattaaagacttaatgatagacctaaaaccataaaaaccctagaagaaaacctaggcaataccgttcaggacatagacatgggcaaggacttcatgtctacaacaccaaaagcaatggcaacaaaagccaaaattgacaagtgggatctaattaaactaaagagcttctgcacagcaaaagaaactaccatcagagtgaacaggcaacctacagaatgggagaaaatttttgcaacctactcatctgacaaagggctaatatccagaatctacaatgaactcaaacaaatttacaagaaaaaaacaaacaaccccatcaaaaagtgggcaaaggatatgaacagacacttctcaaaagaagacatttatgcagccaaaaaacacatgaaaaaacgctcatcatcactggccatcagagaaatgcaaatcagaaccacaatgagataccatctcacaccagttagaatggcaatcattgaaaagtcaggaaacaacaggtgctggagaggatgtggagaaataggaacacttttacactgttggtgggaccgtaaagtagttcaaccattgtggaagtcagtgtggtgattcctcagggatctagaactagaaataccatttgaaccagccatcccattactggctatatacccaaaggattataaatcatgctgctacaaagacacatgcacaggtatgtttatagtggcactattcacaatagcaaagacttggaaccaacctaaatgtccaacaaggatagactggattaagcaaatgtggcacatatacaccatggaatactatgcagccataaaaaatgatgagttcatgtcctttgtagggacatggatgaaactggaaaccatcattctcagcaaactatcgcaaggacaaaaaaccaaacaccgcatgttctcactcataggtgggaattgaacaatgagaacacatggacacaggaaggggaacatcacactccagggactgttgtggggtggggggagggggagggatagcattaggagatacacctaatgctaaatgacaagttaatgggtgcagaacaccaacatgacacatgtatacatatgtaacgggcctgcacgttgtgcacacgtaccctaaaacttaaagtataataataataaaataaaataaaaaaacaaaacaaaacaaaaaatcttgctgcttgtgagaactgctgagtcatttttttgttttctgactataacatttctgaagtttctcaggtttatgaagtgttttctctgagggtaacttttagaacttttacagaaaggtctaaatataactggcctaaacatttcttggacatttatgcaaggatgcatgtttttaaatttttgtgaatcagccaagtaattttaaaaagctactttatgatgttggtcatagaagtttatagctttttaatattaatgtatgtgtctttaaacttcatttttaaatgaatttatgttaatattataaacataagattaaatagttagaggcactcagtgaaaaccctttcacttacttttactcctgtaatttgtattcaaatttgtatatttatacaaattattaatatatatgcacacacacatatatatatggaaataaagatatatttttagaaatattgatactcaagttacagaagcatgttacagaaaatgagttgtgcatttggggtgacaggtgtttgacatttaatagccttgtacagtagtaattacataaatacacatgaaatttacagagaaatctgttaaacaattcagctagtgaagctacagcataaaaatttgtttatatcccccaaaacacaaaacattgagagaaagctgttttagcatccaacaaaataatttacacctataattcctatttgataaagtatttcaaaattatatttaacttttggcaactctagttcgtttttttgcttgtatgatatttttgttttcttttatttgttttctaattttatcacattgcaaacttctgcaattctcacaattttgcatatcctaaaatatgttagattggccttttaattattattattattttacctcaactaagtagggaaggtaaaacatgaaatttttgagctttctttttcaggaggaggaaaggggtttacaacagaaaagacagtttgagatacaagtatttaccaaaaagcaacttaccttctgagaacattttttacttaactatgataacaccaaacatttattaagtgtctgccagacagtattctaagagcttttgatagaatcctcaccacaaccctgtgaaatagagacttgatatatagcttgctcaagccactcagcttatgaatactggggccagcatttggacccaggaatctggctctgcagtctgttaagcactctgctatgctacatttatttatgtaactaatgcatgttgaattcctactcagcctacatcgcagtgctcagcgctttgtagtcaataactgttgacattcacaacaaccctacgaggtaggcttatttgatagtttcattttatacatgagaaaactaataattatttgattaaatcaattaatgtcgcatggattcggcagagttctgattaaaacctaagtgtgtcggactatagaatcaaggctgttgcaataatctatgtcagattaatacatgatagtagtcatattggaattactacattttagatttggaagagctggataagactaagaatcatatggggatttggaaagtgcttatagaagtgtagataggatttgggaattgacagcctgaaattcagataaaataacatgcaatttggatgcttgataaagatttggaatgggtaaactttgagaaaagaccctatgttctgatttaagcttatcttaaaaacacaaatggtgattatacaaagtagttatcactggtgtgtaaaaacaatgagtatgccctttctttcacttcctgttctttagcaaattttattctattgtagttgctcagtaaaagatttttaaacaatagaagtcatacataaatacatttataactaaatgttcttcatattcttaaagaacagactaaatataacctttagattgacataacttcaagtaaatgccactgaaacatttttgttcctgttacctgatgtaattctaacaagagatctgcggagaaccattatccatagtttacagctgaggaaattgagattcaaggagtttaagtaccctgcccaacttatctagggatatgagatgaaacaatgactcaatcaaccctcagattttaaatccatactattttaatggttgaaaagaatatttatgtttttaatgcgttatttgaaaaaatacatatttcctttcctatgcagctttaaaaattaggtgtttaatcacataggctaacttcaatgtctctgagaacaagagcagcactcttacagtattttctatagttttgttttgtaaaacaatgctagtaatttcttgtgcttaacagttttaccatttagaaaagctaacacataattctgttcttttttacatcttttcaggtcccgaggaggtagaaatcaagtgccccttgaatcacattgcttgccttggtaccaacaaatgtgttcatttatcccagctgtgcaatggtgtcttggactgcccagatgggtatgacgaaggagtacattgtcagggtgagtccatttgtggaacaatgcaactgaaatattaaattttacatagtaatgaaagttcaaagaaaacctataacctgccttttctttcaactacaagcatatcagttattaagaaagcatgaattttactgccagacattttaatatgcatttcaaagctgcaagtattatgtttgagcaaaaaaacaccattagacaacacacacacacacacacacacacacacacacacaaatttagactttgaagttgggctcttaaacaattatatgtttcatataaaaaagtgcttttgagcaaaagacaaatgagaagtctttgtcacagcagattgatatcacatcgtgttataagcttgtttctctgaacctctgcttaaacaaagaatttgaaggaatgcttcgtcaaacaagtatttcagtaagaagtatgaaggaaaatttttccttcataatctttccatgatattagactgttaactttcttgtaattttgtctttttaaaaatcaacatctaaattctacaatggtacaatattacctagatattaatgatatgagggataataattaaaatctaaaaattaataaaaagttaaatgctactggcactttctagtgcggggtggagtggggagaatgaaacatgagatgaagagaaataagagcagaagaaaacagtcaaggatccaggtaaggacccagatttggaagcagaatcaaggtatcagtcaagtgaatcaggctgcaggatggagctgggaaagaaacaactgtactggaagtctttaactcagattctcatagactgagtgtaacacaaagggtattgaagctaagatttcaataagaacctgtccttcgtttgggggtcagtaagacaacaaagaatagaagaaaggagaggaaactggagataacatatctggtttctgggtagcttcacacaaactaattgctgtcatgggggaagaggtcccaggtcaccagaaattccagttgttcgggaggagctccaaatatgtatacgtttaaagtgctcaaagtcagatgctattttttaaaacattgtatagtcaataatatgcccaaacaaaacctgtctgggggcctgacaggtcttgttggctgacagttttccaggtctggggtgaagtaagctgaattcaagaccataaatggagaaatatattagaaaaagcataaatcttagaacaataacctgaagatgtaagagtgttgagagactacaggtaggctgtggaaatcaactggtcactaggtcttttccctctttctaaaggaaggtccaattacgctgactctgtggataaattctgactgggaatttaaagatcttcagaagctttcttctttggcctgagtttcctttcttagcattaaaattacataaaaaatcagcagattcatagttgcaggtatgaatacatatgtaataataatgaatgagagattttatttttatgtaaaggctttgtgacatcttttatgtaattgtatatgaaaaagtgatatgaaaagaaagtaggccgggtgcagtggctcactcctgtaatcccagcactttgggaggcccaagcaggcagatcacctgacgtcaggagttcgagaccagcatggccaacgtgatgaaaccctgtctctattaaaaaaacaaaaaattagccggctgtggtggcaggggcctgtattcccagctacttgggaggctgaggcaggagaatttcttgaacccaggaggcagaggttgcagtgagccaagattatgtcattgcactccagcctgggtgactgagtaaaacttcatcaaagaaagaaagagagaatgagagagagagggagggagggaggaagggagggagggaaagaaggaaagaaggatttttaaatgataggcattaaagagtttaattttctttttggatattatattttctagatcctaattttattcaactcagttataattcaggctttttgttatattgtttttgaattttcagatagatatgtatgactaagcttttaaaagaacaaaaccatcacctttccaaatatttcatcagagatgattacacacatttgaatatcataaacatacttctgtgccaaggatcgtatgaaaatatatctgagttttctgataacatttagatttttgatctaatatatgagggcatatgttaatagcataaaaggggattcaaataaaaacaaagtatttgaacaaaaataaaatacttttaattttattttgatccttgaaaagattgacatatatattggattaggacaaatttctagtatgtagttgtttatgctccattcttttttttctgttctaattcagttatttaagtgtttcaagttttctttcttttatcacatgtgacaacttttttttttttgccagtaggaggtttagtttgcagtgggaggttgattgtaccattttggacttttaaatatttttacatttaaccaaataaagtgttttaaaagacctaagcaaccattcattatgacctatggtagacttagaaataataaatatatttggatttctacttgctatttaacctcagtggagggtttttcaccttcttttctggccttgcacactacatagcatcgtaagaacaaggtgactaaagagatatagtcatcctagaatcaatgatttaaaaaaatctttctgcattgagaaaataaactcagaaatgagtttacctgcttggtcttgtaaagtttcctcaccacatggacaaaaaccaaatcactgggcaacattagatttgcaacgtttatatagtttgtgtttaaatgtgaaaaggtgactgcctataagcaaaggtacattgtaggaactcagtctactttctcaccctcagccttcctcctaatttgtggtcacacctgatgaaacattgtttcctggagagttaattaggaaccagccccatcaagtctgtaaggaactttcttatccactatagacagaaaataaatcaagaaaccagattaattcaaacgttacctttctttttggaaattctttcttttttttttttttccagaacaattctgtctaactcggttatttttacattgcatcctttttgttgcattctaagcatagactataatttaagtaattatacctaaagcctaagatatgattaaaaaatggatgtggtttttttgtttgtttgttttttggggttttttttgtttgtttgtttgttttttgagacggagtttcgctcttttgcccaggctggagtgcaatggcgctatctcggctcaccatgacctctgcctcccaggttcaagcgattctcctgcctcagccttccaagtagctgggattacaggcatgcgccaacacacctggctaattttgtacttttggtagaaatggagtttctccatgttggtcaggctggtctcaaactcccaacctcaggtgatccacccgcctcagcatcacaaagtgcttgaattacaggtgtgagccaccgtgcccagctgttttctttttttcagaagaggatccaaaatatatttggtggtatatttatatcctttataaaactaataagggaaaaaattaaaattttgggggtgatgttctggtcctgggaatgtttttgtatcaactgaattgctttgtgaatatttcctagaaaagtcaatatctttctagtaaagataatgaaaagatatctattattaatgattttctataacactgatattttcatctccataattggactccatctgaagaaagaataatggatttttgtatatgggggtacttgcatgtagaaatatgcttataaaagttttacagtaaaaactttcaaaatcacatatttttgaaaagttaatctctttctacacagtacttcatattggtggtaatatcaccttgtctaattgcatgagcaatgaaaatgcatcctgtaaaatacaaggcctctcaatccagaaaatttccacagaaatgcacacaaccatataaagaatgatggaagaagtgaaaaactttgacaaatagaaacaagatggactaagatgtatcaaaatgctgttttaaaatttgacattcttaagataatttattatgttaatgaaacaggagagttccctgactcccctcccagaatgtgcgacagagttgtggctcatctgttgggccgccatgggctcaaaccccttccaggaaggggagcacgcagacacacaggtgcaggagctggggccagcacttttgggctctggccccaaggtagcatttacggttcggtgcctgcaactcccaaagccccagttggcatgttatagtgctcttttagctctgccatctgcagatggcttaagtgttaaccagctgggtgccctcttagtacccaggttcttgtctggtgtccaggaagaatcaggtcacacagggaaattgaaggatggtaaatgaaggagattttattgttggacggaggtggttctcaatggaatggatgagaagctggaaaagggatggtgtggggagatgatcttcccttggagttcggctgtcctgcggctgatctcctctctgaccatccccaaccgaacttctctcgacattcagatgctccgtcgcttctctccttctctgcctcaccactctgttgctctgctgcttttctgcatttttattcttctctttgtggagcccgaggtttggggtttatatgggtacaggataggggggtgtggcaggccaaaggtcaacatctgggtgtgaagacaggaatgcctgttcccatttagggccgtgggtttccaggcttgaggatggggcctttgctggggaactgctctcttctacccaggatttccctccctcctgtcagtattattaacatttaaagtgggtataagcaagagaagccttgtttttattcacatccctgttagattacatttgtagtgccaagtggtaagttatttatttatttagacagaatcttgctctgttgcccaggctggagtgcagtggcatgatctcagcttatggcaacctccccctcccaggtttaaatgattctcctgcctcagtgtcccaagtagctgggattacaggcctgtgccaacagctaatttttgtatttttagtatagagggggtttcaccatgttggccaagctggtcacaaactcctgacataaagtgatccacctgcgttgcctcccacagtgcttggattacaggcgtgagccaccacacctggcccccaagtgctaatatatttaaatgtctgtgggaatgacagtctctgtggcagcatctgcccttatcctgttaaaagaatatagaaagttcagaggtcagtgaaaagaggaattctaccttttatatcactagcaaaagtgactattcaatctatgtaattgttttctagcaaacattctgaagtccttttaaatctaagagaataacatgtgtgaagattttactaaaactgattggagaaaaaaaactctgacatatgaaaagctcacccccaaaacatacaaatacatacacacatactcatcttttcttatattttgtttttctattctgaacattttcctgtatgattattagtatatgacataattaattggcatatttgatcagtaaactaaaaaagaaaaagatccccttatataacaaccaactccttaaaataatgcatattcagacttttaaattacatttgattattttactttactttccagttggaaaataactttcctaatatatgcaattgcattttttcttaatccactcataatctattgtcaataattctaatgtatttaatttagatgataacttctgttaattaaaaatttatgtagctggttttttacttttatatttctatccataaaacgaaactcttatgaaaagtgctaaaaaaaatcctgggggtgatttagaacttagaggcattctcaaaatggaccaagctaaatggtagcctttattttctgtaatgattcaccatgggaaaattagtaattctttaaacttcttacttaatcttatatgtattccaaattttctaaaaagaaattaacctagaggttttacagaactccattttttttttattttccagaaaggaaaaatttatctgtgctgttattttgttaaaaatcctattccagctactactatggaaaaaggaaaagaagaaaggaggaaaggaagggagagaggaaaggaagggacggaggaaaggaagggagggaggaaaggaagggagggagggaggaaggaaggaaaggaaggaaggaaggaaggaaggaaggaaggaaggaaggaaggaatttagtaaagctactgaagaagaaaaatgaatttgcagctctttattgttgtttttaattttacttaattaatcttgtcatagcctcattttaaaaatttcattaaaatataaaatcatactatagagtggaatttcagcatgcagaattccaaaacaaaggtatggagaagaggtatatagttgcataacacttgcaatgttatagtaagtgtatctgtcatcaacactgagcttaaagcacagggagggaaacctgtgctcaagtgacttgaaacatcaataagtctacagctaagaaacaaagaagtggaattacccaggaagacctaggtttgtgagctcagaacacttttgattagtaaagctcttacaagttaagagtagattctgctgtattttctctgtgttgagctgtgctaaggtgatcagatagtctcaagcctatctcaggtgtaaggatttccactcaaagagattagtttaagtaactgagttagtttagtgaaaggctatgacccttaacactacctgatttcagggccaagcttaaagcttcccagaagcaaagcaacaatttctagaaagaatagaacttctataggtgtttcatccttttgaaagacctataccactattgtttatattgacaaatgacacctacatgaaattaggattgtgcacttatggaggactgctctaaatatatatgtgtatatgtgtgtatatataaacgtatatacacatgcatatttgcacatatgtatgtatgtatgttcattttttcagggacttagttttataaattctgtttaattagaaatatgctttttttgcagacatctgacttcttaacactgatttataaggcataattgctaaattaatactgctaaagagacttagaattcaagtttaaaaatgttcgaatatgttgacagaaggggcagctagctaactaagtaaatacctctggggaaaggatgactaagtaatttgaccctacgttgtagctgagaattcaaaaggtagtctaaaatagttaattgttgattggaagttaattcctttgtcatagatttacatctttgatgaatgttaatattatattaaaaacatgttctcttcctccaaacagaattattttttaagaataactatggaaacaaaaaaaaattgtaaatttttacaaatggtgtaaactgcctactagtagtttagaaatgatcacagaaggctttaagttaaaaggaggtattcttcattaaaacatcatttcagattctgtatctgtccctcttcttagacaatagtggtttcaaatgaagttacattacttctataattttttatcacagcttttctgtagtgagattcctggtgcattatggatcttcatttgttgctgcaatatactctattttcagttaattttgatttgatttgattttaattttttttgagatggagtcttgctcttgtcacccaggctggagtgcactggtacaatttcagctcattgcaacctccacctccggggttcaagtgattctcctgcctcagcctcccaaatagttggaattacaggcatccagtaccacgtttggctaatttttgtatttttagtacagacgggatttcactgtcaggctggtctcgaactcctgacctcaggtgatccacccgccttggcctcccaaagtgctaggattacaggcatgagccactgtgtccggccaattttaaataggtgtaagtcaacaacatgtatccattgctcccaccccaataaaatatttattctgtgtgtatacctggtatctgtagtagaagaaatagcaactgctttgatatggagatttaccccttggtgcaaacaactcctattatttctacctgtttctcaaacgtactagcctcttagctggaagtcttgtgtgaaatcacaaaaagccagaaaactcaacttccttcggacaagtaatctctccccagttgaagagacatattaatgttctacaactcttgatagtgttaatttatatgaatatttataggccctggtagcctgtgtttatctagatatttccttcatctttctcatcttgatagtggaaaacaaagaatgtagaaaatataatgagtatgaggccaaaaagactttttaaaatgtgccaatagaaatacagtaaggacttttccaaaattcaattgattaatcaacttcaataaaattttgtttgcagtgacaatattccagatatttagctaaataccagggattcagaaagacatattttctgccttcatggaattcacatgtagtaattgaggtaggtaaaaattaaagaggaagaataagacgagaaacatctaattctacatgagaagatgcaagaagatatcccaagtgagctgatggttgacaggcatctcactctaagcattgggtaggcaaatgaggaaaggaagaacattacaaaactagggaactacatatacagaggcataagtgcaggataaagtattgtatgttcaagatctctaagttattgggtaaggttgaagcatacatacttgagtgtagtgagaggagtttgaacctgaaaaaatactcaggaatagaccaagaggagttacattagaataggtatacagtatgacttatctaaaatgcatttcatagaaccacaaaaagcaagagagtaaaaaaaaaaaaaaaaaaaaaaaaaataccagggtatattctcaatagtattttaagggtgttatatgaaattgttttaatattaagcatatagtagctagaattgttgcatatgtgtagcaggttgcatagtttattcttagaaaatatatatgtgcattactgtaattataaaacttggagataaacagtaatccttacctcacattgatcaactccagaatggatgcacattacatgttgttctttaatgtgtcacttggatgtagtttgtgtaaatgaaagtcaaaatcgacaacatgaggagccatattaagcaaaatccttttcaaataacatttagaaatttggaaggtatgtttactattttaagcaaccataatttcaccattagcaagctactaaaatactaccttgttataacatgcctaaattttgtcctcttgtcctttaactttgaaaaatatatcattgttttaatattattcaaaagtatgaattataacaaactgtcactcagctctctactcgacctcaactgtgaggccaaatcccgtatgattcattatttggttttttgacacagcagcttgatatttaaaaagcaaggaattaaagcaggaagctgaagttgaatggcatccccaagagtcacactggaaatcagctggaaagcaagcgttaaaccctgtgaccttgagttttccttcaccaattttgactactgggccttaacatatcaacccagagaagtgcataacattatgatgcttcagcatcctcctgacccattctcaaagcagcaagatggcttgtagaatttcaactgaagacatttttcagctaactatatattccctgtcaggtttattaattgattgaaaaggaaaaaaatgtgctgagcaaacaacaggctgaacaactatgtaactagcttgaagtattcaatgtctaaatcttactagtagcttatccctttgagaaaaattagtgctttcatttggtgaagaatgtggaagggaactgttcattttgactctttgaagtagatctgcaccagtaacaataagaagttaaaaaactttagaaatttcaactttcatgatggaatctggaagaaataaagagagatttctcaaagtcattcaatagagaaagtttaaattttgaataatgtattcccacgggggatacattccaagatcccatgtgaaggcctgaaactgtggatggtacccaatcttatacagactatgttttttctatacatgcatacctatgataaagtttaatttataaattaggctcagtaagacattaacatcaataatcataaaatagaacaataacaatttactgtcacaaatgttttataaacgtggtctctttttctctctcaaaataccttattgtactatatttacctattttcagatgacagttgactatggctaactcaaacctcagcccgtcaaaccctggaaagtgaaacattgaataagaaaggacattccaatgagaattaaccataaatatttagaagacttgagatctgttgagcctaatctgtcattctagtaaatcttacaaattctatagagaaagctcataagagattttcagccagtgttttcatttctgaatttctaatattttcataattgtaaaaaatactatttttgtggctttttaaataatccattattttcacttatacagtaaaccctattccatggaatcgcatggaaggaatccagacacagctggaagaccttattccatgagccataataaaatgggccctcatggaaaatggaatctgctggtaccttgatcttggactttctagcctctagaactaagaaataagctgcctttgtttaagctaccaagcctctggtattttgttataacagcacaaatgaactaaaataacagaatattgcaatacattaagtaatattctgaaaaatgaaacagctatgagactggttacttctgagctcaccgtagtcagtcttttcagaatcagatcaaacaattatttctttttcactcttgtggagatacagagacatatgcacgtatattatacatttccaaacttttggcatacatttgcatatttgaatttagatgcaagaaattcttcattagtgactaatattttagtgaaagtaaatcacccagatttatttgcattagctgagaatttgtgttctagctttccattaggcttgcgattaagaaaaatcttgaaaccaaatgattgatctctttatgccacaagggattgtagaaccggtccaacaacccactgtggttgtaaaaaaccatgaagcggcagaccaaagagagatcaatctgctctgcttaacgagcttcttctggattaggtcattgtgcttgcgagccaaggcttgagtgtcggatacaaggagaatgggaaggacaagccctaaagagcaatttttactcccattagctgaaatgtgtggtgtgttcttatttagagtacagtacaggtacaaaaccagaaagtgccaagaaaaaatctatacagttcaataaatgactctgagaattctccaatattctcagagcagtagctctaagaacttgaattgtctgatttttagttaggttaattaaatattactttagtggtctcaaagaagtttggagagaaatattaataggtataaattctctttattctaaatggtatatgtaaaatgatccccaaatatttattatatgtagaattaaatatacaatttgttttatataaatgtatacagaaatatatgtgtgtatatagactgtgtgtatagaaatatatgtgcactctatcaaattttcctagcctgtgtctattggatatccagataaaatgattatttagagaattaaaaataacttatccttttatactcttcaactgggtttgtttcatttgttcccattttcaaaaccagtgtaagatgaggtttgcactagtcatgctcttgctttgactcctgtgtcctcctttccgccaatgacttcagttccatttcagtaagtcagggttgtattccacccatctaaattaattatgcaaaacagaatgtgcagaaccaagaggaatatgtttgggataaaattctaatgttgcctaacacaatataacttacattttgatgtgagcttttcatgcaaatgtgccttggtttaatttgtcttttcttcccatgtataagtttcatacccctactagattggaaacatctaaagaaacatagtttacttctatccagtcacttgactggaaagacccatcaaactgggcagagatgacaaacatacggggaaccatgagggagtgatagagtgtaaaggtgtagggattgctttgcagaacaacttctagggatagtatgtgctacactgtatgctggaattcccccccccccggtccgcaaacaaacaaacaaacaaacaaacaaacaaaaagcagtgtgctttttgtcaggaatatttatgcctgcatttcacctaaaatgatttgctcctttcagttttgtttcttatttaccagaaatatctgcaatgtgcagaagggaagtacaggtctccttgatgactataactacaaatagagaagcagcaataactttctctcagtgcaaaatagacttgttggataatagggccagaagggactttcagaggtcatcagttcgtctatctgccttcaggctggactgaaaccaaactcacctagacagattgccatctaccttatgccttcagggaaagaaattctaataaccatttttagttacatggtcaatgcttagcaatttgtactatgtgcaaatacttgcattttgtatcataatattttctaagccctcttagtttttagcctgttccttctaacagattctatactcctgtaacttcatcatgcttttctttcacttctccaaatagttttaaagtttccaaacctccgaagttataaaccatcggtacttactaacccagacacagtttattgactgtctattacccacgtaattggctgtcatagtttctgactgctataattccccccgcgctctctctctcaggtagatatttaatacacctgagaggatatatatatatatatatatatatatagatatatatatatatatatatacacatatatatgtgtgtgtgtgtgtatatatatatcctggggagccagtgagggctacatatgtagcaaaaaactggcaaatacctagataaatgtccataaaggatagttcctggggagccagttagggatatatatatatatatatatatcccctgagcacttccttttcacttatgccatatcagtcaggaattgtgtttggctgggaataactgagatctttaaaagactggattaaaaaaaaaagtagttttacagaattttacattttctttcatattaaaaaaaggttatagatagacattccattgaaggtaaggcaattccgtatgtgactcgggtcccagactcccttatttctgttctgcaatccttgtcacttggctttcatcctcaaggtagcaaaatggccaaaaaatggccactgcagccctaaatatcacatccacattccaggaggaaggaagaagaccaaattatccctaccaagcaacttattttcttcttaaggagctttccagaagcctgattaaacacagtatctacctttatcccattgatcaggattttaactaacacacagccacccttatttgcaagaaagactgggagatgtatcttttcaagagggtaaacactgcttcaataaaatcagatttggaagaagaagataatggatatttgataacaactaacatttcatgctatacatgttttaatagagcagttagttactcactaggtagctgctgtagtcctactatgcttgataaactctatgagaggactctaaaggaaagaaagagagctggtcattaattaactctgtggctttgattaccagtaaaagaataggtttggacagtatcactgactccttcaagatataaaattatataaacaaaaatatttaggccgggcgcagtggctcatgcctgtaatcccagcactttgggaggctgaggcaggtggatcatgaggtcaggagttcaagaccagcctggtcaagatggtgaaaccccatctctaccaaaaatacaaaaattagctgggtgcagtagcaggcacctgtaatcccagctactcgggaggctgaggcagaagaatctcttgaacctgggggacagaggttgcagtgagccaagatcgtgccattgcactccagcctgggtgaaagagtgaaactctgtctcaaaaaaaataaaaatagtaataaaaaaaaacatacctgagaggtataaaagtcatgctataggccaggcacagtggctcacacctgtaatcccagcactttgggaggctgaggcgagcagatggcttgagttcatgagttcgagacctggaaaacatggaaaaaacctgtctctacaaaaaatacaaaatttagccaggagtggtggtgcttgcctgtagtcctagctacttggggggctgaggtgggaggatggcttgagcctgggaggtggaggttgcagtgagcccagattgtgccactgcactccagcctgggcgatagagccagactttgtcaccttgtctcaaaaaaaaaaaaaaaagtcatgctgtgctgtagcaaaaaactggcaaatacctagataaatgtccataaaggatagctcctggggagccagtgagggctacctgcggcctgaggaaagccagattaatggagtttaagggaagaaaagaagatactgatgtagccatctctttctgtccctcctgcccagtttcttccttatttttttttccattttttccccatttctttccctttttctctcccctcacactccctagccactgcatatcccacactttttcagtctttattttctcagttttatgccttcaaatacaagcttacacttgagcctttttttaaaaacttgtctgaatttcaaagtcagcaattatttcacatttctggtcagccaaccctactttaacattgattttaactgtgttttgtcaatgtgtatactttctttctgttttatttaatatattgagactgccaagctacattaaataagtcaagccatgttaaattgtacttattctccttctgatggtaaatttcctatcttttttttgtttcctttccttagcccactgatatttgcacaaataaacccaaaaccttttttttattgctattgatttttgttttattttgaaggagttttagttttccttttaatttcaaattccatcaggtgattacttctaacactttttacacccccaaataaatccctatcagtgagatctcaattaagaaagccattcttaccacatggttttagagagtaaataggcattatataggcactggaccagatcttaataaaaagtcacagcaaagggacgggcgcaggggctcgtgcctgtaatcccagcactttgggaggccgagccgggtggatcactaggtcaggagatagagaccatcctggctaacacggtgaaaccccatctctactaaaaaaatatatatatatatatatatatacaaaattagccaggcgtggtggcgggcgactgtagtcccagctactcaggaggctgaggcaggagaatggcgtgaacccgggaggcagagcttgcagtgagccgagatcatgccactgcactccagcctggggtacagagcgagactccgtctcaaaaaaaaaaagtcacagcaaaaacaacatatcagatagaatgcatagtatatccaatacacattccaatttgttctaaaaatccttgatgtctaagtaagagaagataaagatggaagaattcaaagtgcttagaggaatcaaagttagaaaaatgttagagattgtaccaaattccctatgtatattgctcactcatacatttttctctcgtttttagcaagggtaaactcacagcagtgtggtgttatgcttcttttttgagtgggcaggtaagaaagtggagaaactcttgggatgaggctaatgatgtcttcacctaaccagtcagtgttaggaagacctgtgtggattcgccagccaggacagcatactttttctagtattaacaactcatatcttttaggagcctggaactgagacaaatgtggctgaactgccgttagcaatatctgccaaacttgaatggctgcatttttagtttatacatagcacaggattttatggccccccaaaatcagaaaaaatttgagatatatctatatataaaatgatatatattatatataattatatattatatgtaatattatccaattatatatataatttggataaattttatatatagtttaaatataggataaatatttgttgaaatacaatcaacataggccagtccttgttctgaggatatccaaatgtttcctaccaatagggggttctcattattgtatagataccacttattagcaaataattttaatatatataattatatataatatataatatataataatatataatacataattatatataatatataatatatattatatataattatatataatatataatatatattatatataattatatataatatataattttatataatatttgtttctttcctggtcaaagtattctttttgaaatctaggcttttgctatttgactgctgaatttttctcccaaaggttatttggtacacaatgtatttctccctttttcttcaatagctttttctattttcatttgtcatttatgatttgtggcatgtaatagtttcagtgagaaatacttcccaaagcaaacataaatatttccaatgtctaaaattacaacaattctttgctattcagatacagatggaatatataatcattcttttgaagaggcaattagcacttagttcagtgacttgggatgttccaactctttcaagctttgttttattcttactgcattcaaccaaagtactacttgtccacaatggaccaatactaatctaaacaagaactgcctcaggattctcagtgacagtttactaatgcagaatattaaacaaagggtcatccaactgtctttgtgaggtcacagaaatgttatttccttagcactgacccaatatagctcaatagtcaattgtattcagttgtgaaaaattgtcagaagttttcctcttttaaaaaattacaaaatatactgatatcatagttgtgaattgctattgtttatgatcatgttttatgatataatagccattcatacttaaaattttaaattttattacttatttacttatttttcaattaaaatattttattgttggctttgggcagcgggttactactagtatagtaacaataagacagcgtatagaaacttaaactttctttgtctgtaagttaagctttattttattgtagaaagataaggagaggatggggtaatttcacctgttatttattaatttttttatttttttgagttctgagatacatgtgcaaaacgtgcagatttattacataggtatacatgtgccatggttgtttgctatgtctatcaatctgtcatctaggttttaagctctttatgcattaggtatttgtcctaatgctctccctccccttgacccccaccccccaacaggccctggtgtgtgatgtccccctccctgtgtccatgtgttttcactgttcaactcccacttatgaatgagaatatgcagaatttgacctgttcttattgtacaataggaggagaatgtatttgaactaagattagatatgaagctataattgaactgatgtgttaaagatcaaataaatgctcagctttaggtactgttggaattaacttagaattattttaaaagtacctctgtggaggcctagcaatatagagctgacttggtgccattaatgtaatcacaattgatgggctagacaaggaactacaaatgaaatatatatggatggatgatccagcaaataaaagacaacacattgtatgtctgagagaaggctttcaggaggaaaattgatttataccaactttattaaaatatttttgaaacctgacaaattggttctggagactgaagttgcagtgaagttaacagccaaaaggcaggaaaatggtataagatgaacattacatttttgtgctttgaatgcagggattaatctggcctaggtaaggaaaaatagtttgagagaagataattttcagagttgactcaatgttagctactttgtacgatgacaaagtaattattcacttcaacatcctcatgccacatttgtggttagatgatgaaaactgtgtcttaaattaatgggagctaaatcatgtatggaaaaggaaggttgtcttccaacagagggggatattgaagtgtctcagagacttattttcttcagaattgtacatttatgctactttcatgttcttcgtagattcagtcttcaaaagtatggttgctttgtttatattttatttacctgtctggataaatatttgttgaaatacagtcaacatagaccagtccttgttctggggatatccaaatgtttcctaccaataggggttctcattattgtatagataccacttattagagataattttaaacatatgtgtatatatagactttcatttccctactatgctatttcttcactttcattcattgtctccatttctactacttttcatctctattaagcatactgcagtcaagctttcatttctatcattccactgaagccgccttgtcaagttcatcagtagtatctgtattggtataaccattggtcaattttaaaatgtccttttaatttttctatcaatagtttttgacaaagttgatcagttcctcctccttcacttgcctttcgggaaaccaccacagtctcttggttttcttcctagttcaccattgtgccttttgagtctccttcacttttcccatttccccttatgcaggctctgtccttagctgagttctcttctctatttaatttacttgcttagtgatctcatttactctcatggctttaaagatcatctatgtgccaatgactctcatttttttttttccagtctagctcactctttaactgcaaagagagttggctatgtgtacccaagtgccatctccacttggatgtctaatagatatctccaactcaacagacccaagttctaattcaacaaacccaagatcttccccacccctgagaactattatagctttttccttctcagttgggggcagctcttttagtttctcacactaaaaacattacagagatccctgactttaaaaaaattcaccgtattgaattcttcaggatatattattagctataccttttaaaaatacccaaattcttatcacttttcactagcccaactgctactatctaggttgaaaccacaattatcttgtacttgaataactgtaataaccatataattgatttctcttattccaaatattgttataaatatattatcttctcaatacagtatccaagtagtcctttaaaaacttgaatcagattatatcaggacatagcattactttatttaaaacttacccatgggctgcacattacattcaaaatgaaacgtaaactcctccaatgacagttgaaaccctgtataaccttgctacttatttgtctgacctcatctccaattactgtttctcagccccataattgccaattcttccaagtatgttggccttgttattttttaattatatcagggatacttctaccttacatttttggcatgaactgttccctaaatagggaaacaaagagtgttgttatgaatgttggattcattgagaatgattgtaataagaaagagctgaagagctaatggatgattgtagtagtggaaaattgattaccttggatgataattaaattggtaaattttttaagggaagaaaatacttatttcttcaagttgaatgtaacgcattgtcaattgctttcaggaagatcatgagaaaacactgttcacaatcttaggaagcagctaaaatttaggtttctgagtgtttaatacatttgttttagtgctttatttgatttagaattctgagaccaatatgagacaccatagccttctagaatttttactatggtgacacaaatcttcatctctcttgtcttctatccatccacaacatcatattttcctgacactcaagtaaagaacaaaagtgaaagtttgcatatccatgccttctggattagtccattttcatgctgctgataaagacatacccaagactgggcaatttacaaaagaaagaggtttcatggactcacagttccatgtggcgggggaggcctcacaaccatggcagaagatgaaagtcacatctcacatggtggcaaaaaacagaagggaacttgtgcaggaaaactttcctttataccatcagatctcgtgagacttagtcactgtcaccagaatagcatggaaaagacccaccctcctgactcagttatttcccaccgagttcctcccacaacactcgggaattacgggatctacaattcaagatgagatttagcgggggacaaagccaaaccatatcaccttgcttccttctccaactctaaagaaattgcagtgaacttcatggttagactcaggaacatatgcctgcacccacaattcagcctcagacatttactagctctctgttttgaattatgtcatagcaggatccgtgaggaagcatagctacacatgacacaagccctgtagtaagatctttcaatttatttaggagatgggtcaagatatttcttcacaagatcatttaaatgaccttgtaaaggtcacacacatatacatacacgtgtgtgtgtttgatttatacctctatagcctaagttgaagacacttgtgtaatccattcaacatatactaccacctgtggaaactaattgccaggttcgctgggagctttttcagctaggtaagtattgaacatactgtcctgttcagctctctaagtctaactttagctcaatttaattgatcagaaactgacacggtgaatcagggtgtttctggactgccattttgtctgttttagaaacctggacagcagttgtgcactggcaactaactatagcatgaggccaatttcctttctacatattactgtgcataaaaatgggaaataagttatttttcagtctgagacattcaaccatttatatccatttatacatgaacctgggaatgacatggtaaagattttgaggaggaactttatgaaataggactgatgttgtagaattactgttttccatgatcaaggaaaagttcttttaaataaataattagcttagtgtgtctgaatgttaaggtaacttggtctataagtgagtcatagaagcactgttggctaaaagttgattttcttttggttttacgatttaaaaaaaaaatgagatagggatccgaaatgctattagatactttctccttttataagtacggaaaacagcactgagtcagcctaaaaaaaataaatcatatttgctttggataggtaccgtattcacttattgtggcaggattaatgttgtgtcttgcttttctaccaatttagattagtttctccatttcacgccctagagagaatgacactaggctaaatacgttgccaaaatgcagacaatgaattggcaaaagcagtcgcttttcagagctcattcaccttgattttgaatgctctgtccctgcccaggcgatgatgacccaaacagtcctaagtacttttcctagactacattgggaattctgatgtcagttcaaggagaaaagtagaaacacttcaaaacacatattgtcttgcacattttctcacaattatttgttctcaattatttttattatagaagcctcggctaaataagggagggacccactattgtcatttctttaaaataagaagatttttaccctttagggattgacatggctttcatttctttcacagaagtttcctgaaggaagaaaaaaacaaaacaaaacaaacaaaaaccacttacaaacagtacttttattttgtatttacaatgaaagcttattactcatcttatttgtccaatctagagcattttaactactgattccctttgaccatactacagtgtctcctgaattaccttgagccttattgccacctgcaaattctgcttcatcaacttttctctgtctttgtaccccagaagcccccaagaaacaggaagtgcttcttcttccctgggcttccattttctgccttgcttttcttattttactatctttctatgccctcctctccactgcagttaccacctccttgcccccgacacttgctgctacctttctttctctcctgagatccagctatgtatttctgactatttcctatgtatttcacataggtgcccccacagacatgtcaaattcatgaaccaaatctgaactcatcacatttttttaatttttatttttaagttccagggtacacgtgtaggatgtgcaggtttgttacataggtaaacatgtgccatgatgatttgctgcatctatcaacccatcacctaggtattaaatccagcatgtattagctatttttcctaatgctctctctcccctcaccccacccactggcacgccccagtgtgtgttgttgccctccctgtctccacgtcttttcattgctcagctcccacttataagtgagaatatgtggtgtttggtcgtctgttcctgttatgagcttatcatattttaccctaatctattattccttcagtctgtcttgtttaattatgtcaccttccatatagtaacctaaactaggctagcctcctgaaaccacacaagaatatttcctttcccttccctgacccaaaacatgtcaccaagttcaaattattcttaacccttaactacttccagaattcacctacttctgtccatccaaactcctcctgacttagttctgcctataataaaacttcagtaaggtaaggtaataatcacacaagttgtttttcgtcacctgatctaactcattccaatctataatccattcagtcagaaaagccatcttactaataaagtgcaaattgaatattcagtcccttgcttaaacttatcttatgaattacaagttccttagaaagacagcataagttccctatttcaccaacctcatcttccagcctttcttcttatgaaccctagattttagctgaatcaagacttcctggatcagtgtcaatcattcaatggctcttcagtttcatatatcttgttcccactacttgaaatacttttgctatgagatcttattcccatccaccagaaaaatgcttacttaccttttgaagctcagcccaggcattttaactctaggaagatttctttgaactaagttgactttttaatattttcatttcatatcttattgcagcattacattcactcactcatgtattattttatttcttcaacaagtatttaatgaatatctataatgtatttgcccatgtaataggtgtgaggaattcagaaatgaaaatatattgtctctaatctcaagatgttcatagttgaggagaaaacagtcctggaaacaaaaaataacaaagtaatatcaacagtttgtaaggttatatttgaaatagtatgatgtgatataaagactataggtgttttagtcaggattcatgcaaaataacagtaaccactctgagtatttaaatagatggaaatcaaggcaggacatttttacactgttggtggaaaaacttaaaagtaaataatagatggtgaagtaacatcgatctggtgacagcagtttaaaagaaaaaaaaatacatttgcaaaacttcatttactgacaatggaaagccattcacctccaggctggagacaaaaagggaaaacgctatagtactggtggccagtttgtcctctgacagctaaagccatggatgcagcagtggccagaggtgctgacaatggtaggaatgaagaagaaaaaattgcatgtcttctttccagtcactgcttcctgctgtttgtactcagccagaagcccatggatagaggagcctcaaaccttgattttctcacttatcacatgggcagtaatactaccttgatgaactagtgtgataattagtggtaatgtagataaaatagcttgtagtgcactgggaaatctcattattctttgaatgatagataatatcttgatgaaatttcacattttcaagtttaaatggcaaaagcatttcaaaagttggtatttattggtctgtctcttcctttgtgcttctgatgcctagcagagtactgaataattactcataaaagttattaatgtatttgttcatttattccacaaaacgtacatctttaggtggttactgagttgctaaggatacgcaatgcattcttgcctcatgattcagtggggtctatttagatttcttgatgggagaacacttgctcctacccctgtccccatctccatctttttgtagtttcttactggcttcactcaaaaaccaaaagaaaaaaaaaatgaacgtcattatgaattaaaatcttctgcggtgtctgctattcctgcacaggctcgagttttcctgactcggacacttcaactgaacactgagaagatacagatcgctgagcaagcagcaaagagaattctgtgccctctgggtgtgatgcattcatccattaaacaggagaagaaaaacttgcaaatcaacttgtagggagatatgtaaattgattaggacaagttaatttttctttgttccttttttttttttaatgattaagatggttattcagataggtagacatcagattcattccataattgattaaatacatcagtcttttcaaaggtttttgaccaggcctacatttatgtagcacataggcattttctcccctaaaataagagacagtttaaattcatgtttgcaaaagttcttggcaattacaataccataatatcagattaactggtcactggtagatagtcattttctattgcattttgaatgcaaatctggtgacagcagtttaaaagaaaaaaaatacatttacaaagctttggccaacattattggatattgtatataaaagagatgccagaagagaattttcctagctctcttcgtcttggagagtattcctcagtaatgataaggagaaagacctcctatcaagtgaaattgatctagcttcgtatatttctcagagtagcactattcctctcctctctgcgatgtttacagggtaaagatatttgcattcaaactcaaactaggaaaagttgtcatgaactgaccttcacgaaagaaaaagtataaaggctgtacttcaggtggaaggagaatgatgtcaactagctttcctgacatgcaagaggaatagtgagcaaagatattagtaaatatgtaggtaaatctaaagtaatggtgtattaaatattaatgatgtttcatttgttcggttaaaagaactggactgacagaaaatattaaatattaatgtatgtcatggtaggttctgtggttggtctgcacagaccatgtaagtgggcccatagtagctgagtagggcagtgcacgcagggaaggactaggtcttaatgagaggtagggagttcttgccagcacttctcttgtcttgctgttacctgataagtatactttcactcactcaggagggaaactttgtgcaatttctattctttaatatcaaatcagaaactgtaatgaaaaagaacattattgggaacagaattgggatgtctaactcattatcaacaggtcattttaaattgaccaagtggtgtacaaaattatagtctcttaacttagagacagtctgtgtacttttaattctaaagttttgtgtttttctacataagacaaaaattaaatgccaaattttcactctattcaatatttttatataagcatgttaaatacatatttgggggcaaggttggcataagatgttatggggaaatgcaatgaaatatagtacatgactctaacattcaaagaaattaactttagataatggatgaggtgatagataccagaaagaataaataaacactagaacttttttttttctttttttttttttgagacagagtctcactttgttgcccaggcttgagtgcaatgttgggatctcagctcactgaaacatcccactctgggttcaagcaattctcctgcctcagcctcctgagtagctggaactgcaggtgtcaccacacccggctaatttttgtattctcagtagagacagggttttgtcattttggccaggctggtctcaaactcccgacctcaggacatccacctgcctcggcttcccaaagtgctgggattacaggtgtgggccgctgagcccagctaacagtagaactttcaatatatgcatttcaaaataattatggaagcattttcataagacggtataacattgtcaaatatgagatgtaacacctgacacagaacctagtaacattacctgaataggcatttgttgcatggcaggtacacaaactattattagagttcagataaaagtcactgtggaaattggataactatggaagactcatggaaactaattttagttgagaagtggaaattggaatgtttttgaacaatgggagaaaaggaaagaaaaagcattcaaggtgaatggaatagtgttaacaaaatcagagaaacaggaaagaatatctaaatatgtattatttttattgaaatcctcagacattgttattttgtgtatttttttttattttgagatggagtctcactttgtcacccaggctggagtgtagtggggcaatctcagctcactgcaaactctgtctcctgggttcaagcaattctccttccttagcctcctgagtagctgggactacaggcatgtaccaccacatctggctaatttttgtatattttagtagagacgggtattcaccatgttggccaacctggtctcgaactcctgacctcaagtgatctgccgacctcagcctcccagagtgctgggattacaggtgtgagctaccgtgggtggccacattgtgctattttgaataaagacttatataaaacaggcctttggtgaaataatatagtcatccaataacctccaggaagtacagccatggtaaaagagtagttacatccaggaggtacaagaggggtaagaaaagtaggttaccctctaagaaaggaaatacctcctgggagaaccaacaagtgttcagcaaggactgaccttggtttatcatccaggggtgactgaggaatagctacaaacaagcaaactagttgattctagagtagtgacaactataatggacaacattgcaggtacctgggaaacttctttactgggaaagattagagatattttggcttctttccaagatctcatgcttgccatgtgtaatcgatgctagcttttttgagaaaatcatgctaatgaaaagatatactacatttgcagtagagtttacagaaaacagtatagaattcagcattgaggaactggtttaagttaacagaatattgaatttatgcaattatggacttgtcagtagcaaacatatattctattctctcttcaagaaatacaataatttccatcatcaaaaaaaagtctcatcaggcattaccaatattcagcattgtatcagtcataccagtgtcacattatttatagcaagacttggaagatgctcattcctgggcttgccttagaattacaggcatttttcatcacacactggctgatttggagacctacccagtgatgctctacacctcttatctctttttttttccagcctccttagttcaaattgtgggaataattttgtacagttatctcacaaactccaagtgaattctttttataaagttttatacagccttaaattatggtaataaggtagatagttaaggacaaattcattcttctttttctcatggctgctatttaaaatagtcacaaaagaggaggcatttaataaatatttgttgaagggataaatgaaatgtaaataattcaatttagcttggttaacatatccaacagggtcactaaggaaaactgaatgtattgtttttctttgtgttcctgtcatctctgcaaaaaccttatttgagattgctttgaatttgggaacttatttatgtgtagtttcaaagctagtattggcaaaatagtttaagctgaataacttctattgacaaaaggtccaagatggataattaagtaattttttaaaaatatgtctttgaaattaagatacaataagagagtagaaaaggattgaaattctcaaagaaatgttttgtataaaaagaagcccttctgtttgtggccagttttttttataacgtataacttctatgagaacaagaaaatagataattcacccaacaggtacaattatataggtgaattctgcaaggacaattttgttcttcaatgaattatccacaggtgcctacagtactgaggagtaataggcattcaacatctgttttctgaattagttaatttgtattttgatgtcaatgtaactaggttgctttacatttacaattattatagtgtattattttgtaatttaaataatcagtctctgttctaagtgaaaacagtctttttcaatactgagcttttaaattgacactaccagttcactaagagtacacacttaaaacattggatggatacaaattattgaacttgatattttgtaagttgtattctgttgaagtcatacacagatgggttagtgtttcaagcatgcacacactcagggtcttggctgcaagcaaacactcctgggtcctacactcctaatgtctcttatcaggtattaccaatattcagcattagcctcagtcgtcccagtatcacattacttgtatcaagacttggaagatgctcattcctgagcttgtcttggaattatagtcattagatattttaatttagaaatgcaatcacacagattgtgagggtcaggcaaacaattgtgttatagtgattttaagctgatgtctattattaggagcatgttttgttggatatgaaatagtttataaacacttaaaatacttcgaccctagggcataattgtcactgctcaaataattctgagtgctgaacttttagagttaataaatatattgtatatgacaagaaaaatatctattttagcactgaaagttatcttttaccaagtagacccacttaagattccacactgcctcccacaaaatcaattcaaataaatgaagatttatttatgtgcattaatacatttaaaagtattggcctgttagagctaaataatttttattttagtgatacatggaaaacattaatattgaatcatttttatgttcttcctaattatatatatatatttttttttaaaatatggcatctttatttttttaaaaataggattctgtctcatcagtgatgatgaagttgatgatgttatgtataagaaatggtcttgagtttactctgcaccttcctaagtactttatacacatcaactcatttgtaaccacaactccatataccaaactattataatctcatgctcacaaatgaagaaactgaggattaaagatgttaaatatccttcccaagatcaaagaattgcaaagctggcatatgctggaactggaatttgatatttggccagactctggaacctgtgctcttattcactattagcttgtatatcagaactaatgaaatgtgtgtttggcaagaactaataaaaacaaaggcagtagatagaaagtgtgcaatgctttgttggtaacatctttctatctccctatctctttctccctccctctcttcttctctgtatctccttccttccaaccctccttctcttcctttatcctttcttccctcctcaacgtttaaaataataaatgcatttgcatatggatatagttgttgaaaccagtggttctcaactgggagtgactttgcaactcaaagaacatttgacaatgtctagagatatttttgattgtcatatctggggagatgaaactgacatctagagggtagaagtgaggaatgccgctaaacatcctacaatgcacagggcaactccaacaacaggtaattatctggtatcaaatatcagtagtagatttgagaaatacttgtttaaattaagaaagctatcacataatttccacaaaaaagtttacatttgtccaaatcctcactgcaactgttattattctacttaacttgaaacaaaatatgtttttgaccaaaaatgattctatgtatgtgatatttcataattaatgcagatctatttatttaaattaaccctgtggtttttttcttgcacatatatcttagtcaaaaacatcactgcttcctctgacccttgtagtcaacacaattagaatatgtagggacggcaaagtagagttaggaagatattgagaagaaagagaaactaaatgccaatggaatctgcaatataaaaaatgtaaaaaatctgaaatataaaaaatgtaaggtttggtgggggtcatttaggattaatcaaacatcaattccaaagaaatttttttcttacagtaaaatatttaaatatatttgtgtactccaaaaattattcacatttgcatgcaacttcccaaatgccaatttcaagagtcataacattgtaattgaaattacatgctggaagatgtcataaatgtgctatgcaatggtgggcttcacaagattaagcaaaaatttaggatttatagcgcagattagtcttaatacatttctgtttatctttccaactagaataaaagggaatatcttgccaagtaatatgctacttgatttaacaaaaaaggtaatggcagttaagttaaggaaaggaagatttcacatagttttgttaattaccatgtaaatgttacctatgatatgacatttaaatctacaaatgattaacaaagattcttaaagcatattgctctaagcaaagtttagcggccttgtttaacaaattgaatagtttcaaatttcaaagcagcttaaaaggcctaaatgcttcttgaactctgaagatggaaacttcttaagaatgtgtgaggattgggtggatggcaagatggccaaataggaagagctctagtctgcagctcccagcaagatgaacgcagaaggtgggtgatttctgcatttccaactgagatacctggctgatctcactgggagtggttagacagtgggtttagcccgtggagggcgagccgaagcagggtggggtgtcgcttcacctgggaagttcacgaggttggggaactccctcccctagccaggggaagccgtgaagggactgtgtcccaaggaatggtgcaatccggcccagatactacgcttttgccatggtcttcgcaacccacagacctacaccaccaaggccctgggtttcaagcacaaacctgggcagccttttaggcagacaccaagctagctacacgagtttgtttttcatatcccagtgctgtctggaatgccagcaagacagaatcgttcactcccctggtatgggagctgaagccaggaagccaagtggtcttgctcagcagatcccaccccacagagcccagcaagctaagacctagtggtttgaaattctcactaccagcacagcagtctgaagtcaacctgggatgcttgagcttggttgggggaggggcatccaacattactgaggcttgagtagatggttttcccctcacagtgtaaacaaagtccctgggaagtgcagactgggtggagcccaccacagctcagcaaagctgctgtagccagtctggcactctagattcctcctctctgggcatggcatctctgaaagaaaggcagcagccccagtcaggatcttatagataaaactcccatctccctgggacagagcaccttgggcaaggggcagctgtggatgcagcttcagccaacttaaatgttcctgcctaccagctctgaagacagcagcggatctcccagcacagtgctcaagctctgctaagggacagactgcctcctcaagtgggtccctgactcccatgactcctgatggggagacacctcccagcaggggtcaacagacacctcatacaggagagccctggctggcaccctggcagttggccttctgggacaaagcttccagaggaaggaacaggcagcaatctttgctgtcctgtagcctctgctggtgataaccaggcaaacagggtctggagtggacctccagcaaactccagcagacctgcagcagaggggcctggctgttagaaggaaaactaacaaacagaaaggaatagcatcaacatcaacaaaaaggacatccactcaaaaaacccattcgaaggtcaccaacatcaaagaccaaaggtagataaatccatgaacatgaggaaacaccagtgcaaaaaggctgaaaattccaaaaactggaacgcctcttctccaaaggatcacaactcctcaccagcaagggcacaaaactagatggagaatgagtttgacaaattgacagaagtaggcttcagaaggtgggtagtaacaaactcctccaagctaaaggagcatgttctaacccaatgcaaggaagctaagaactttgaaaaaaggccagaggagttgctaactagaataaccagtttagagaagaacataaatgaactgatggagctgaaaaactcagcacgagtacttcgtgaagcatacacaagtatcaatagccaaatcgatcaagcagaagaaaggatatcagagattgaagatcaacttaatgaaataaagtgtgaagacaagattagagaaaaaagaatgaaaaggaacaaacaaagcccccaagaaatatgggactatgtgaaaagaccaaacctacatttgattggcatacctgaaagtgatggaagaacggaaccaagttggaaaacactcttcaggatattattcaggagaacttccccaacctagcatgtcatgccaacattcaaattcaggaaatatagagaacaccacaaagagactccttgagaagagcaaccccaagacacataactgtcagattcaccaagattgaaatgaaggaaaaaacattaaaggcagccagtgagaaaggttgcgttacccacaaaggaaatcccatcagactaagagtgggtctctctccgcagaaaccctgcaaaccagcagagagtgggggccaatattcaacattcttaaagaaaagaattttcaacccagaatatcatatccagccaagctaagcttcataagcaaatgagaaataaaatccttcacagacaagcaaatgctgagagattttgtcaccaccaggcctgccttacaagagctcctgaaggaagcactaaatatggaaaagaaaaacaggtaccagacatggcaaaaacataccaaattgtaaagtccattgactctatgaagaaactgcatcaactaatgggccaaataaccagctagcatcataatgacaggatcaaattcacacgtaacaatattaaccttaaatgttaacaggctaaatgccccaattaaaagacacagactggcaaattggataaagagtcaagacccatcgatggactgtattcagagacccatctcacatataaagacacacatagactcaaaataaaggaatggaggaatatttaccaaacaaatcaaaagcaaaaaaaagagcaggggttgcaatcctagtctctgataaaacagactttaaaccaacaaagatcaaaaaaggcattacataatggtaaagggatcaattcaacaagaagagctaactatcctaaatatatatgcacacaatacaggagcacccagattcataaagcaagtccttagagacctacaaagagacttacactcccacacaataataatgggagattttgatatcccactgtcaaaattagatagatcaacaagacagaaaattaacaagtatattcaggacttgaactcagctccagacgaagtggacctaatagacatctacagaattctccacaccaaatcaacagaatatatattcttctcagcaccacgttgcacttattctaaaattcaccacataattgcaagtaaaatactcctcagcaaatgagaaagaacagaaattataacagtctctcagaccacagtgcaatcaaattagaattcaggatttagaagctcaatcaaaacgcataactacatggaaactgaacaacctgctcctgcatgactgctgagtaaataacaaaattaaggcagaaataaataagttatttgaaaccaatgagaacaaagacacaacataccagaattgctgggacacagctaacacagtgtttagagggaaatttatagcactaaatgtccacaggagaaagcaggaaagatctaaaattgacacccttacatcacaattaaaagaactagagaagcaagagcaaacaaattcaaaagttatcagaagacaagaaataactaagatcagagcagaactgaaggagatagagacacaaaaaacccttcaaaaattcaatgaatgcaggagctggtttttgaaaagatgaacaaaatagaccactagccaaactaataaagaagaaaagagagaagaatcaaatagacacaataaaaaatgataaaggggataacaccactgatcccacagaaatagaaactaccatcagagaatattgtaaacaactctatgcaaataaactagaatatctaaaagaaatggataaattcttggacacatacaccctcccaatactaaaccaggaagaagtcaaatccctgaatagaccaataccaaattctgaaattgaggcagtaattaatagcctaccaaccaaaacaagtccaggaccagacagattcacagccaaattctaccagaggtacagagaggagctgataccattccttctgaaactattgcaaacaatagaaaaagagggactcctccctaactcattttatgaggccagcatcaccctgataccagaacctgacagagacacaacagaaaaagaaaagttcaggccaatatccctgatgaacatccatgagaaaatcctcaataaaatactggcaaaccgaatccagcagcacatcaaaaagcatatccaccatgatcaagtcagcttcatttctgggatgcaaggttggtttaacatgtggaaatcaataaacataatttaccacataaacagaaccaatgacaaaaactacatgattatctcaatagatgcagaaaaggcctttgataaaattcaacacaccttcatactaaaaactctcaataaactaagcactgatggaacatatctcaaaataataagaactatttatgacaaacccccagacaatatgatactgaatgggcaaaagctggaagcattccctttaaaaaccagcacaagacaaggatgccctctttcaccactcctattctacatagtattggaagttctggccaagacaatcaggcaagtgaaagaaagcgtattcaaataggaagagaggaagtcaaattatctctatttgagatgacatgattgtatatttagaaaaccccattgtctcagccccaaatctccttaagctgataagcaacttcagcaaactctcaggatacaaaatcaatgtgcaaaaatcacaagcatttcaatacaccaataatagacaaacagagagccaaatcatgagtgaactcccatccagagttgctacaaaaagaataaaataccccaggaatacaagttacaagggatgtgaaggacttcttcaaggaaaaaacaaaccactgctcaaggaaataagagaggaccaaacaaatggaaaaacattccatgctcatggataggaagaatcaatatcatgaaaatggccatactgcccaaagtaatttatagattcagtgctatacccatcaagctaccattgcctttcttcacagaattagaaaaaaaaactactttaaattttatagggaaccaaaaaagagcctgtatatccaagacaatcctaagcaaaaagaacaaagctggaggcatcacgttacctgacttcaaactatactgcaaggctacattaatcaaaacagcatggtagtagtaccaaaacatatatacagaccaatggaacacagcagtggcctcagaaataatgccacacatctacaaccatctgatctctgacaaacctgacaaaaacaagcaatggggaaaggattccctgtttaataaatggtgttgagaaaactggctagacatatgcagagaactgaaattgtaccccttccttacaccttatacaaaaattaactcaagatggatcaaagacttaaacataagacctaaaaccataaaaaccctagaagacaacctaggcaataccattcaggacaggaatgggcaaagacttcatgactaaaacaccaaaagcaatggcaacaaaagccaaaattgacaaatcagatctaattcaactaaagagctcctgcacagcaaaagaagctatcatcacagtgaacaggcaacctgcagaatgggagacaaattttgcaacctatccatctgacaaagtgctaatatacagaatctataagaaacttaaacaaatttacaagaaaaaaacaaacagcctcatcaaaaagtgggtgaaggatatgaacagacacttctcaaaagaagacatttatgcagccaacaaacatatgaaaaaaagctcatcatcactggtcattagagaaatgcaaatcaaaaccacaatgagataccatctcatgccagttagaatggtgatcattaaaatgtggggaagcaacagatgctggagaggatgtggagagataggaacacttttacacggttggtggggtgtaaattagttcaaacattgtggaagagacagcgtgtcaattcctcaaggatctaaaaccagaaataccatttgacccagcaatcccattactggatatatacctaaagattataaatcattctactatgaagacacatgcatatatatgtttattgcagcagtattcacaatagcaaagacttggaacaaacccaaatgcccgtcaattttatactgaataaagaaaaggtggcacatatacaccatggaatacgatgtagccataaagaaggatgtgttcatgtactttgcagggacatggacgaagctggaaaccatcattctcagtaaactaacatagtaacagaaaatcaaacaccgcgtgttctcactcataagtaggagttgaacaatgagaacacaaggacacagggaggggaacatcacacactggggcatgtttgcaggttgggggctgagggagggatagcattaggagaaatacctaatgtagatgatgggttgatgggtgcagcaaaccaccatggcacttgtataactatgtaacaaacctacatgttctgcacatgtatcccagaacttaaagtataattaaaaaaaaaaaaaaaagaatgtgtgaagattaaaacatacagacctttcagaaaacagtagtatattgtccactgttttttacatgaatttttgttatttatctattatactataaaagtaaatcttttgtaaaaagtaagatatatcaaaagccttaacttttattttctcataagtgtatgttgctatttgttgtatttatgaaatacagacttttccacatatacttttatttaaagcatcttgttacagagatggttgcaatcagctactcattctctattttgtaaagtgcacaatttggaaatggaaaaggaaaagcatttccagtcttttcatgaaatttattattagaaaccgtaacagtatagacaattttcgtaatgtctttttccaaagattcaaaatttgggtagagtcacatgtatctgcaaatatagggtaattgctcctgggtgatgttttaagagctcttttgacactatcatttttacttatgcagaataaaatttatagattgaatgtcatagaaacaagttgagaaccttgattaccagatttgaatgtcctgacaaattgatttctctggtcaacacactgttgttacctgaagaagtctcagttcaacttgcattattgaaaatctttcaagactgtagcgttcaatgttcctggtttcataatgagactacactgctaacagtgactctctccttgttaactgattctcttgaagtgttcctgggtaattattctatgcatcagctcctgtatagaatattacagatgtataatgtgtaaaagctaggcatgattagttatttgtttacatttttaaacagaaattcctgatgtgagctttttaaaaaagaaaacacacaaaccatttgtcttattctcttaaagtataaaacaaaaaaatagttttaataaaattaggactctgattagttggtctacaagtatttatggtttaagtgtgcttctaagttactgagattccttagggatcagtggaaaacagtaatgccaagcaggtattcccataataaaacccagggctggccaggtgtggtggctcacgcctgtagtcccagcactttgggaggccgagatgggtggatcatctgcagtcaggcgttcaagactagcctgaccaatttggtgaaaacccctctccactaaaaaatacaaaaattagccaggcatggtggcaggcacctgtaatcccagctacttgggaggctgaagcaggagaatcacttgaacccgggaggtggaggttgcagtgaaccaagatcgtaccattgcactatagcctaggcaacagagcaagactccgacccagaaaaaaataaaataaaaaataaaaaataaaaaaaaaatcagggcttctcagcctcacactattgacattttgagctagataattttttgttgtggggcagggtctgagggtgggcgggagtggctatcctgtgcttgtacaatgtttagtagcatccctgtggcactgctgttccttcagtgtgacaaccagaaattgtcttccaacactgccacgtgtgtgtggtggagggatgggattaaagttgccccttttgagaaccaccgctgcaacttgttaaaatcaaacataacttttcacaaaatcggaatatttagagacccagtgcattctttaaatgactctcttcatcgttacagatttgtgatgagagaaaatgggaaagcacaatgctccagttaacccagttggagatttagttccactgttaaaagtatagaaacaggcccatcagaatgcaggcagggaaagctactgtacagtagaagtaaatgttacagcaatgttaggttgaaagagaagatcagagcgttaacccctttgcagtccattttagacaggtcatgcccagccctcgcatgttgttcttcctgcccggataccctggttgctgctgcaggagctgggtccccttggagccgccctctggccccagcagtggaaatggctcctctgcggtccgcagggcagggcagggcgtggccattttcaactaggagttcagtgtggaggaagtccacatgagcgctggcaggtcaggggcttccagaggttccaggagaagtgaagtattgcagactaagtcctctaaatagccagtcgtctcaataagaaaacgtttaagtccctggagcaggagggccgggctgggcgcaaatcctgcctatgtcactcctcgcctttgctcaaaccacttagtccagctctgctcctttgtaaaatggtgccagagattcccatgccacagggaggggactcgggggcaaataatatacgtgatacgatctgtcattttcaacgtgccctggaaggaattcacgttgttgttgctgttatgtgttgtcgaccaaaatagtgcgtgcctagcatgagtttcgtgtggagaaacttgatttaggtcgtcataaaacaagctttagttgttaacacatttgtttaataaaaacaaaacttttcttagaaagatttttggacactatgtggacacatttgaattgaagcaagaaattaaggtttgttattaaacttctatggtcactcagactttctttttaaaaaaacatctttaattactatgtggattattttcaataatcagtactgctcatcaaggttgtgtgtgagtgtgtgtgttttcctctgagtcatacattccttgattttttacaaaagactgaacacagaaaagggacttaattagctggtaactccttatactgattaactctacctacattgtgatctgtgttgaagcatcatttctattgacctattgtgccatggcattgatttaagactgagccatgtagctagctgtataattagagaaaaatgtataattatacagagcaatagctgcagttttatgtgttattacttataattctatataaaattattataaataagatttttaaaaaattattaattttcttcaattatattatagttattgattctagttctaaagtggaataataagggatatctgacataattgtaaaaaaattcatttcacttcagaaacaaatgaatttcaaacttcttgcttgttaccttccgtgaacactgcaagaaaaccattaaaaaattatactgtggaaagtttgtgctaaagcatacgaacttctcacatttaatatgttcccgtgtagtacataataaatgatttcacagcccataatatagggaagctgatgtaggaagaaattcacttcgctcttaaggcaaaacaattagaaatcttaacatttttaaacattaagttgttttgctgtatgggttgtttttcaggtttatagaattttatgaacattatataaaatggttgaaattgtaaattccaatttttcaaattggatcaaaattatacaattttgatcataccacccaacataaagattgaaatgctattagcataaatttaggaaggctctgttaaatcccatcttttatcctaaaatatgttctctcaaagatagtaaacatatgtctaacagttctccactaggtcctttacttgcctgcacaattaagatagtagctcccatttttaattgttcttcaatctagaactagttcctgtttctctgactcttccttttctcagctcagtttaactccttggctttcattgtgggcactactgattcatcatggtgatctggctgtttcttttggttctcatcccagaataaatcttatgccttattataggtgtacccttgttcctggatgaactctaaatccttattcagtactaaatattgcacctgttcccaacgtaagagatgccatcccttttagctgtatttccctatgtagctgctttctaggaacagtcttaaaagaaagactgaaggaaataggaggcatggaagccactctaacaagtggcaggcatatgtgtaattagaaatgaaaaatgcgtgtattctacccatggatctgcggataaatgggacacaatcctagttagaattttccaggtattcattacattacatatgaatgaatgaatgagtgagtgagtgaatgaatgaatgggttattgtgtttcaaacacacacacattacacacatgcacacacatacacacaccaagaaaagtgtactgaagtaaaacagatacacaaaaagtgatatgaagtcatagatgaacagactccgtaatcaacttaagcatcgactatcctgatatgtttaaactctctacagtcgttatcctatgcaggaaaagaagatgcctagctcattattaaaaatttacatttaaatgttaatttagaaatatctacatgcagtgggaaatagtttaatttagatgcctcacttccaaatgttatatagtcaatgcactcctgctacccagaatccccataatgagaagaattttatgtacaatttgtaaaactcatataatataatatgtaaacaattacttgaattttaaatgcaaactcattaaggacacatgtaaactccaagtaggcaaccttgcagaaggtcttagttccaatagtttacatataaaaatctgtaaaataattgtttaggattttgaatatgcttggaatgggcatattattttttctccccttctgcttgaatacttgtgactagaaaagacagcctacattgagctaggatgctgaaaagacaatgctgcttttgtctctcatgacgattctcaataccaatgcagtttgaaaaatactatacccctgagatttttttcccccagaatgataatacaaaaattaagctcatattattcttaaggtagttggaagttaattaaaagaaatgaccaaagtgcataattttatatactttgtatttgtatttcaataaatacaggctggtgaccaaagagaaatttcaaaatagttgagtttctttacatacggttcttatatcacaaagaagaatttcaagtcatagaaacatttttaattcatcttttctgtccatttcctttctcctattcaaacagctagtcccttattaatctcttcaaaattataataaaaaatattttccttccttcggtacttttatttgtccaccagtcaaaattatcctcctgattctcaattacaaaatcttctaacagaaacccttttacaagcttttcttagcagacacagaaggggaaagaacaggaatattcatatattaataattttcttctattgtcatatatacatcagtgagctttgatttatgataatttactcttcttatgcttagccaggggagaaaggtttaaatagcctgggtgtgctttagtgatagagtattagtttatttagactcagtaaaatgtgggtcattcatgcatccatttccattaatgggagttagcaactgctgcatatatctcataattaaatttacagtggtgccaagatgggaaagccagtgatgcagcacaatatattattctcatccaaaaggtgcttttcattgtctgaagagacagatgccatgttctgttaagaactatatgtgtagctttacttactaatgtaaattattcaatatgaaatgctgccagtataaatggtttacttccctcccacctcctctattttgaacctaaactgttcctcagagaaactaaaacaatttatctacaagaatctaattggaaatttatcccagacaatatctactagtaattttcaaggtaggttcagaatccaaggaaaataatacaattttattaaagtgcagtggattaaaaaatacatatatatcacctaagaaaggtcagatttacagaagagagaaaacagtaatttaactggtgaaaacaatttttttaaaacccagtcacggaaaggtctctagaaattgtcctaaggacattaagcaaatagagatatttattcaaggaaacctactgaatgaatgttttgtaccctttgatcaacatctctcccatttttcccatctctcaacccctggcaaccaccattctattctctgtttctatgagttcaatgcttttagattccatatataattgagattatgtagtacttgtctttctatgtctggcttatttcacttgctaatagatcttaagtgtcttcaccacacatcagaaacaatggtaactacatatggtgatggatatgttagttaatttcattgtggtaatcatttcataatgtatacatatgtacatatgttaaatcatcatgtacaccttgaatgtatacaatttttgccaattatgcctaaataaagctggataaataaatagacattttactaaatttttgaaagaacagaaagagtctgtggcatttacactgtgacccaattcttagacactattttccctaccctttcagctccatgttatggaaattatactatggtcatatgcagtcaagaatttgggagctaattcttcttccagcttccagtctgggggccacagtttcacccaggagggtagaatgccagtgtttctcctcccacccaggcccatgttgcagaagttctattttagacagatatgaccaagaggactggttcttcttctccactcacccacactcatagtacagaagctctgcttcaggcacagtgtgccaagaatattgggagcctgatctccctggttcagcctgttcataggatagaagtgccacaatgagacaggcaagccaaaaagaccagggtaagctacccaccctgtatccagtgtgcaccagagtgggagtgacactcagtaaacagcaaatccctgcctcctgcaccagtgcagggtgtggtggttatgcctgaggggaaaggtaagttataagataaggaggtctacagctttacctgaggacactgactttatttgggacagattatggggaactccatgccttaggactttgtcaagaacaatggagatcttggtggagagcaattaaaaggaagttggtagctccaagacacaagtaaaatagagcagccaaaagtttaatagagatagccatgataacagccaactcttggggtgggaagattgtgcatatgcattaggttacactcaggagcaatcagagcaggatttgacagcattttcaaagccacacttggatccatcaacacggagtgggcacctgccataagagacttaaatacaacctctgaccaaaaaacaaaatatataaacaataagctactttgacccagggttgactctcctggcaagccaggcttaaaaataaaaccacaatcatccttctcaatttgtaagatcatgagcattctcaagtctggatcctttcagaagtgatcaaagtattaaactattagtccctgattgaatatgagggggaaaacactccctgatctatggtacagctttaagctactacgtatacaatgacaaagggtcaaatttaaggggactaaagcacaacattggacaaataagtggtttgtgctggcccagggatgacctaaaggtagccagattaaaagaaaaaatgcggagagaaatctgagtagggatatcagaagttgtaccactgggggaatagagttttcagaattattttagctgagtcactaaacaaacaaactgattaacaagcaaataacaactgacctatcaataccaccagctaggattcgtatgaagatttgctacaatatctaaaatgtccagttttcagccaaaaatataaattatgaggcatacaacaaacataaatgtgtgacacaaatacaaggaaaaattatcaggcaacaaaaactgccattgacagaccccaaatggtacatttagaaacagacttcaaggcagctcttaaaaatacgtttggagacttaaaggaaacaatctttaaagaatcaaaggaagacactgacaatacttcctcaaataaaaaaaacataagaaagagaaactatttcaaaagaaccaagtggaaaatctgcagttgaaaagtgcaaacaccaaaatgaaaattcactagaggagctcaacagtagatttgagctggcagaaaaaaagaatcaacaaactggatgtacataaagatagaatatgtaacttgaagaacaagaggaaaaaagttaaaatgaataaggccccagagaaatgtcagacaccatttactgcaccaacatacccataatagaatagcagaaggtgaggcaaaagagaaagggacagaaaaaatattcaaagatataatacctgaaagcttccctaattttatggagaacattaacatacatccaagaaatgcaacaaactccatgtaggaaaaatgcaaagagaaccacactcagacatacagtcatgatgttgaaagccaaagatagaaaatcttgaaagcagtaaggtggaaacaactcatcaagtaaaagagaaccccaacaaaactatcagctgacttgttagaatagagaccattagatagtgaaatgacatgttcaaagtactgaaaatagcagaagtactgagaatagcagaaggtgaggaaaaagagaaagggacagaaaaaatattcaaaaacatagtacctgaaagcttccctaattttatggaaaacattaacatacatccaagaaatgcaacaaactccatgtaggaaaaatgcaaagagaaccacgctcagacatatagtcataaagttgaaagccaaagatagaaaatcttgaaagcagtaaggtggaaacaactcatcaagtaaaagagaaccccaacaaaactatcagctgacttattagaatagagaccattagatagtgaaatgacatgttcaaagtactgaaaattcagacaatctatcaacaaacaacttagcaaaaactgacaaaagggacagatagacaatcaaacaataaaagttagagaacttagtacaacaattctcaagaatgacagaacaactaggcagaagatccgtaagaaaataaaagatatgaacaacatgataaacccactaacaattatctatagaacacttcaaccaacagtagcagaatacacgctcttcttaagcacacacggaccactttctaggataggactatgaactatatgctagttcatgaaataagccttggtacatttaaaaggaatgaaataatacaaagcatattctttaaatacaaggaaattaaattagaaatcaataacagaaggaaatttggaaaatatgcaaatataatagtagaaattaaatacactcctgaataaccaatgcatcaggaagatatcacaagtaaagttagaaaatactttgagatgaatgaaaatgaaaacataaacaccaaaatttatgcagctaatgcagtgctcagagagaatagttgtatatacctatacaatattaagaaagaagagaagtctcacatagataacttacacttctacctaaagacaccagaaaatggtagcaaactaaacttaaagttagcagtaggaagggaatcctacagactagagtggaaattaatgaaaaagagagagaagatcaatggagcaaatacatgaaatcggaagtttgaaataaattgcaatcagcaagtttaacttgaccaagaaaaaaaagcaaaatactcaaattactaaaatcaagagtaaaggaggggacatcattactcaatcttacagaaacaaaaagaattataagaaccatcatgaacaactatatgccaacaaattagatgaaatatacaaattaatagacagaggttaccaaaactgactcaagaaaacaaaataaaacatctgaatagactaaagaggttgaattactaattttaaattttccacaaagaaaggcccagatagcttcaaggttaattctactaaacacttaaagaagaattaataccagctgtttgcaaactattttaaaaacaaggagagaacactgcctaattcattctattaggcaagaattaccctgatttcaaaaccagataaaaacattacaagaaaagaatgcaacagaccaatatcccttatgaatatagaggcaaaaatctcaacaaaatactagcaaaccaaagctaacgacatataacatagattatataccaggaccaaatgggattcgagaaatgcaaagctggtttaagatttgaaaattagtgttaatattaatagaataaagggtaaaatatgataatttcaaaagatacagaaaaagcatttgaaaaatttcaataccctttccttatgaaaattcctcagtaaacttggagtgaaagagaactttatcatcctaataaagggtaacaaaacctacaggtgacaacatacttggtagtgaaagactgaatgcttttcccctaaaatcaggatcaagagaaggatatctgctctcatcacttgcagttaaccttgtactagaggttctagctaggtcagttaggtaaaataaataaataaataaaaagcatacagatttaaaaaagtaaaaatatctctccttgtatatgacatgaccttatgtatagtaaatcttaagaaatccacaaactacttgaacttacagatgagttcagacagcttgtaggacccaagattagcatacaaaaatcaattatatttctgtacacaatagcaatgagcatttttaaaatgaaatttaaaatgtataatattttaaaaatcagatattttcttgaattaacttaataaaagatatgagaaacatatatcctaaaaacacaccattctaagaaactaaagaaaacttagagaaatgggactttccaggttcatggataacagacttcctattgtttaaatggcaatatttccaattgatctatagctgcaattcaattcctatcaaaatctcagtcagctttctgcaaaaattaaccagcagatgataaaaatgtttatacagttgcaaggactgtaggggagaatctgctgctaagatcgttcaggttgttggcaaaattattcctgtgtggctgtaagattgagatcccatttccttgctggctgtcatctggaggccaccttgcacttctggaagtctttctcagtccgtatgtgtagcctattacatctcagaatcagcaatgttgtgtagactcccatgccatcacatctattctgcctcctcttctgctacatctctctgactttctcttgaacttttgagggctgatatgattacattagctcaccaggataatctatggtaatctatttcatttatttatttatttatttattttgattttttgagacagagtcactctcttgctcaggctagcatgcagtggcatgatcacagctcactgcagcctcaacctcctgggctcaagcagtactcctaccttagcctcccaaaagccaaaactataggcacacggcaccatgcctggctaattttcttttaatttttattttgtagagaccagatctcactatgttgaccaggctggtcttgaactcctgggttcaagcagtcctcttccctcagcctcccaaagtgctgggattacaggcatgagccgtcacacccagccaatttctctattttaaagtcagattaggaaccttaattgtctctgcaaaatcccttcacaacagcacctagattggcatttgattgtataaccaaaaggcaagggctttttagggaatagctttaatattctgcctcccatattttattttttctgactgctaaaatattaatgccaataatgtgacctcaaaatcttttttaaaagaagtagatcattaaaaaaaaataaaaattgaatcactaaactattaccttattatttggaagactgaaatttgtacatatttccagattgtccaatttatactgcacatgtatgtcagtcattttgtaagatcctgccaaatatacagtaatatccctaattgttctgactagcttttgataattaattaccttagattttgttgcagcccattaattattttaaaattagatctattacattttatttttattgttgctttattttaattattgatgagaacatgtcttatgagctactgtttaatatcacaagagatattgaacattaattaaaaattgagccttttatgcagatagaaacgtaagagtgaggttattcattaagatgctttgcttaacaagctctagggtagtacttagcaagatgtcacagttccagtgacttttgagaaatctgtaatagacactgctcagacagtaaaatttccttttattttccttctttgtatacttttcacatttcttatcttgaacttggatatttactttttaggctagttagtgagagttgacttatacacagaagaacctcatctgtggagaaaagaatgatgcaaatgtgaagagagaaatataagtaaaagaccaaaggccctcagacagactgttagagtggttgtctacatttatggccattttcattgatattcttatgttcctttaataattccacaattttacttaatccattgtcaataggcttctttctctaaggcttttttctttttctgtctcattcacctaagaagaccttaaccaatcatgtcctttgcagggacatggatggagcaggaggccattatcctcagcaaactaacacaggaatggaaaaccaaataccgcatattctctcttataagtgggagctgcatgatgagaacacatggacacaatgggaggaacaacacacactggggcctgttggagggcgggaggtgggaggaaggagagcatcaggaagaatagttcatggatgctgggcttaatacctaagtgatgggatgatctttacagcaaaccaccatggcatacatttcctatgtaacaaacctgcacatcttgcacatgtatccctgaacttaaaagctggaaaaaaataaaaacagttttccttaaccaagacaaaattttcccccaaaagtaatcaacctggaatttggtaacttctggtcaaatgcattctctaattgtgtcattcaaagttacttgatatttagttacacattaaaaaatttattgactttattacttgggagtgccattagaaaatactatgtgtatattaaaaagggtaaatgtctcttaattataagtgaaaaatagtgaagtattattttttaatggaaattaaatttgtaagggtctaattgttttaaatgtttcaggaggtggaaatcactgggcagaaacaacagagttgctgccagttcaacagtctggctgtttatcattatacccaacttacttggaatacccaataattattctcaaatacctctatagtaatttttcttctgtatggtaagagtgaatgtgaatcaagtgtgacataaatggcaccagtgcatcagtgggacctgccgagagattcctgatcagcccagagattatggtttaggaaatgaatcagtaatataaataccaaactattaattcaaggagcatgaagtaatctccaatctaatccaggcaggtattcgtatatgagttctataagagggtagagacttatacagatgattaaaagttgtggttggaggcagttctaagaacctttctaataatcaaaggaattgagatgtaatatacaagatacttgttagagactggcaaacaccatgagagaaggtcagatccatagccttctggcagagtgtcacatcaatggttttgtctctttatatagaacagagagggatgttgactcaggaaagccaaagcatctcaggacctaagctgaacctctgaggagcagaaaacatattagacaattgaagaggtgttaggacagatggaagcagatgacattattaaaagtcccatacatgtgatggggtgaaagatgtacatcacttaactgtcacatatgacttaggaagacccagaaatttaacagtgagcccctattaataagtttttagcttagcattagatttttttttaaatatacttaaagttctagggtacatgtgtgcatgggagcattagatcttaaaagaagttctgtcacttttcatgttttgatttgtcaagggaaaagttgatctcaggaggtgaacaatagcattgacttggtgaaactgcaaatgcatcagtcatactgcaggaatcactcatcacaattcaatcagaaagctataaaggaaatggattcaacctgtaacctacttaatttatttaatacatgctgaaacagaaaaccactttgatgattatcacaagaaaacaaaaccataaaaaaatggtagtgatatcagattctaatgtgaaaaagcagtgcattaaaaaaggaagatgcaaataatgttatttaagggataacatccagagggcttctgttgttgttttggtggggaggtattttatagcttctctgaaatataacatttctagtagtgaaaagtactcttagatttataaaaaagtgctcagtctttccccttttgtatccacatgacggcttccatcttgactcactattgtgcactatcagtgcaatactaagaaagcattttatagctttatattgaggggacagtattaatgatagcagtaagtgtttctcttatttcagccatttattttaaagaaaaaccaattttgaatatggtaattatttttaattatggctaatttgagaaacaattaaccaaccaaccaaagtccacaaaaacaaaacaaaacaaaaaacccagtacttgaaaatgaaaatattaagtaaacatattttatatgtcaatagacatacatatatatgaaacaattatattcagcatttgctgacaggtgctggagagtatccctgcatttccactttttgctatattacagtaactataagagattgttaaatattgataattaaatcaagacagcaattttgctgtaaactttgaagtcctctgacagcatgatcaaatccataattataagcatcatattcttctattcttgtcaagccatattggccattttgccttgtttttctagtctgaactttttaaaatttatttgctaaaatgaactgctgacttgctgtttctcattattgtataatacccttatgtattaaattattgtactataatacattacatatttcatacaggttcacacataaatatatgatattcacattcccaaagttaaaaatcaagtcagattatattttgtaagattttaatgcctaagttgcttttggttgagagtaaagaatattgaataaaaatttatgcactaattgttcgcactcataagtgggagttgaacaatgagaactcatggacacagggaggggaacatcacacaccagggcctgtcaggggtggagggctaggggtgggatagcactaggagaaatacctaatgtagatgacaggttgatgggtgcagcaaaccaccatggcacgtgtatacctatgtaacaaacctgcacattctgcacatgtatcccagaacttaaagtataataaaaaagtttatgcactaatgaagattgttttcataaaatctaataagaaaataaaatattggaaaagttctgtgtaaaccagattacttgtctttgttttaaccctcactctttctgatccactgggaaatacagcctaaaaaataattaactacctaaataaataacaaataaaaaagcattatatgaaagtacttcacctttgaaatgaaatgttacagtgatggttagaagaaaacaaagccaaagaagaatcactttctagctgctcctttccagcctcagtttattatttctaaactgaatttttatcaaatattcaggtggatctattctttctttgtcatttcaaagaagctttggtattatattttttaagagactagaatgaggatatgggcccaaatcaggacttgattatttcatatacttcagaatactcaaattgaatgtcatttttctaaaacctgcatttcagttaaaatttttatacttattttatttgaaaaatcaagaacaaagctggaggcatcacgctacctgacttcaaactatactataaggctacagtaaataaaacagcatggtactggtaccaaaacagagatatagatcaatggaacagaacagagccctcaaaaataacgccgcatatctacaactatctgatctttgacaaacctgagaaaaacaagcaatgaggaaaggattacctatttaataaatggtgctgggaaaactggctagccatatgtagaaagctgaaactggatcccttccttacaccttatacaaaaattaattcaagatggattaaagccttaaacgttagacctaaaaccataaaaaccctagaagaaaacctaggcattaccattcaggacataggcatgggcaaggacttcatgtctaaaacaccaaaagcaatggcaacaaaagccaaaattgacaaatgggatctaattaaactaaagagcttctgcacagcaaaagaaactaccatcagagtgaacaggcaacctacaaaatgggagaaaaattttgcaacctactcatctgacaaagggctaatatccagaatctacaatgaactcaaacaaatttacaagaaaaaaacaaacaactccatcaaaaagtgggcaaaggaaatgaacagacacttctcaaaagaagacatttatgcagccaaaaggcacatgaaaaaatgctcatcatcactggccatcagagaaatgcaaatcaaaaccacagtgagataccatctcacaccagttagaatggcaatcattaaaaagtcaggaaacaacaggtgctggagaggatgtggagaaataggaacacttttacactgttggtgggactgtaaactagttcaaccattgtggaagtcagtgtggcgattcctcagtgatctagaactggaaataccatttgacccagccatcccattactgggtatatacccaaaggaatataagtcatgctgctataaagacacatgcacacatatgtttattgcagcactattcacaatagcaaagacttggaaccaacccaaatgtccaacaatgatagactggattaagaaaatgtggcacatatacaccatggaatactatgcagccataaaaaatgatgacttcatgtcctttgtagggacatggatgaaattggaaatcatcattctcagtaaactatcgcaaggacagaaaaccaaataccgcatgttctcactcatagatgggaactgaacgatgagaacacatggacacaggaaggggaacatcacactctgtggcctgttgtggggttgggggacgggggagggatagcattaggagatatacctaatgctaaatgacgagttaatgggtgcagcacaccagcatggcacatgtatacatatgtaacaaacctgcacattgtgcacatgtaccctaaaacttaaagtataataataataataataaagaaaaatcagcagcacaattttgcattcctttgattttcaaagtaattcaggttcattgaaacctcactacaaggttatcccaaaggctagtgccataggaatgtgcattgagtaaattactgagagatgtacatattatttcaatatgtttctgatacatctggctttatactgaacccaggtctgtagaacactgcaataacaaaaatcagtcaaacttggtgttaatgagattaatatagtgctagaattaaagaaatgaaaaatatgggagcatttaaatacatcatatcacttaaaattacaaagtaattaatacataaagcatattgcaattatttttaattgtatttattcaaagtgcctttcaaatgtgaatgggtaagagtaatgaagattcaggaagcctagttccttaagagttatgagtcacattgcaatgtcctagaggttaaaagtgcttccaaagttacatgtcatggaagtagttatttaagaagatgaggccgggtgcggtggctcatgcctgtaatcccagcactttgggaggctgtggcagtggatcacctgaggtcgaaaatttgagaccagcctgaccaacatagagaaaccccgtctctactaaaagtacaaaattagctgggcgtggtggcgcatgcctgtaatcccagctactctggaggctgcggcaggagaattgcttgaacccaagaggcagaggttgaggtgagccaagattgcgcctttgccctccagcccaggcaacaagagtgacaccccatctcaaaaaaaaaaaaaaaaagatgaaggcttgtaatagttaactccataaaactataaaacttgaatgattatcaatccattggacagaaattgtgctaatagctttctgcagatgtcatctcttttaactgaatcatatgttttaaatttcaaaatagaggtgatatgtttaagttattgatactgagacacacagcaagtaaatgtaaatgaactttattatatttaatattctttcctcaaagagccaaaatcatttatatatttataactaaactatgtgtgtaaatgtagggtttttttttttaatagacagggaaaaagataataatgaaaacagtagtatattaaatgtaatttatagatacataattaatgtttgttttaaagcatagattaatccacaaagtaagaatccacacattctgaaagttttaatctactacaggcacagtgagttctgggggtgcatgcaaaggcaggagagcgttttattgttaccactttaccaatgaaagcctggtctttcattcaatagctgcttagttatccaaaaaactttcatctatggcagctaaggtgagtaggcttccttcactggaaaagacaagctagaatattttgtggggtgggtaggagtggctagtttggatcttattaagtttgatgtttataatcttgatgcagcagcttagtttcatgtcttttcccagtggctttggttccagcctgagcctgctgtgaagaatgattattattgttgccagttaactgctctctccatctgtgcatcaagtgtgggaaatatttgcccttaaaaaaaaaaaaaaaaaaaaaaaaaagctctggctgttgcctagtgagagggcagttataaacagctgcatttcagataggtatagtatagtcatgtacatcagccaatgcaatacatgtgcatagtgaactaccacagagacaattgtctgccaggaggtagaggttagggagaagatcattaaagagaacaaattaatgaaatagaaaaattaaaacatacctcttctcctcttcgccttttacaacaccctgttttcttcttcctatttcccactttcgtatttcctgtcataaaaaaaggtaatctagaagaataatatcattttcatctgactttcaactgacttttttcctctaacagatttaattcaattatcaagtacaataattccctcttacttcatatcttgactattaagccttgatgttgaggaattgggggaatgcttccacctgaatctcttcacagactttctataatatcaagaatcccttgaaagatagaaaaatagcttggcatactgagacataaagagtttttcaaacatgaaacacagcaagaaaaaagagacagatggagagtcaggaagagaagatgatatcattatcaacaagtatatagccataaatgtcatgtttgatctgttgagaaaagacatgtacgtaaaggtaaggatgaacttaaaagttatagataaaagatgaccaaaaatggagaatgcatatgtgtgtgtgcatgtgtgtataattttttgtgaaacttcatttttcatcagtcttcttataactatttgttaaacaaaaaatgtatctgtacttaaaagtatatttctaagttttctaaaatatgttagtggcttaaacttaaatctacaatagatttaaagacagaaaaacatccaagacaacattcttaaaaattttgaagtgaagatctattgacttatggttttggtttgtggttgtcttattttattctttacatctcctcttctttattcagtaaatttttctgaaattcaaccattttccaaatttaccttaaggttagtactatggtggattcatacatggaaaggtaattataataatcaaagataacatttaatgagtggtgtatgcccaactcatttgccttttgttataactgtatctgacaggtactcttgttatctttattttgtagatgaaaaagttgggtcactgagtcacagtaagattgtatcactttgcaaaagtcattcattcataaaaaactgtttcctgaccatctatgtgtcaggccttatttaggcactgtttaatatagtcataaacaaaacaaaatccctgtcttcagaaatgttacattctggtagcatgacgtctatcctcaacaaccaagagagagactcaaagatgaaagacattacattcaattgggaaaaactgaggaaagtcttcagaagagaatggtatttaatgtggatcttaaaaatgagatcattggtacgttcagagatagagaaagagtctgcctgggagagagaatattataagcaatagcagacatggcataaaagtgcataaggccctctctagcaaaagacacttaatcttaagcttagaatcaatgacaagaagtatgagataaagtttgaaagattctaatagtaagatatgtctgttctgtattattgttagccctttttgagtaggttaaatgtcattttcaaaagacctatttaattgaactaaaatttattttaatacatatgaaagaggtaaatttttttttttttttttgagacagagtctcgctctgtcgcccaggctggagtgcagtggcgggatctcggctcactgcaagctccgcctcccgggttcacgccattctcctgcctcagcctcccaagtagctgggactacaggcgcccgccactacgcccggctaatttttttgtatttttagtagagacggggtttcaccgttttagccgggatggtctcgatctcctgacctcgtgatccgcccacctcgggctcccaaagtgctgggattacaggcgtgagccaccgcgcccggccgaaagaggtaaatttttaaagtgtatttctttgagtgttaaaaaattaaaactccagaagcgatatcagcaagatggcaaaataggaagttgcagcccttgttcctccacaaaaacatcactttaacaacagtgtatgaaccaaagtaccattacgaaatgctaaaatccagttatgaggttgtggtattccaggagagcacaaagccaagaacagctacgttgaaaggcataagaagagtggtttaattttacccatgttggcccttccttcaagctggcacaacccaacatcagggtagaacactccaatttactatctttcaagggaaaaagaagagtgcaccaagcacccaacattctggtttttctgaggactacctgagggactagtttctgtttcaccccatgagcactgatgaaacaagtatagtgtgtatttctgggggccacttagaaacaagaagagtagctggaagcttggtatggccaacatggctgggcaaaatccagctaatgagcacaacttgagaattctcctttagaaggaaaggagggagtggagtatggatgtaatgttctatcttcttagagggctgtgcaagtgaccagaatatgtcttacctgccttggtacactgacaatgtgttggcatacttcagatgtttcacggctgacaagaacaaggaagagcagagtggcttgctgacacagactgacatcagggagagcaaaaacttacgagcttttggtaaagtagctgccaattctttctaactgaagaattgcattcacaggtccagaaaagtattatttctccaaaagatttcagaggcttccagaatctctagctgggctgacggtgaaggtctttccctgtacaaggtcagtcataaagactgggatacgtggctgcattttcaaatgtttatatcccaacacaatattataagacacatgagtcaaacaccgtctcatagataaggacgttatataattataaaatggtcaactcatcagcaaaatataacaattataaatgtgtatgtgtccaacatcagagcacccaaatatttgaagtgtacaatggcataactgaaaggagaaatagtaacacaataatagtaaggcatttttataccccactttcattattgaatagaacatccagacaggagatcaataaggaagcagagggctttaatagccctatagataaaatgtacctgacaaacatacacagaacaatccacccaacagcagcagaatacacacttttctcaagtacacagaacattcttcagtataggtcatatgttaggtcacaaaataagtattaacatatttaagaaggttgaaattataacaagcatgttttctgaatgaaatgaaatgaaataaagatctcaaataaataatctatacctcaaagaagtagaaaaagaaaaactaagcccaaagtagtaagaaaattatgaagattagagcagaaataaatgagatagaaatatagaaacaatagaaaaaataaatctagaagttatttttacagatcaccgaaattgacaaatctttagctagattaagaaaaaagagagaagactcataaaatcagaaatgaaaaaggagacattacagattgttacagaaatggaaaagtttataagagactatgagcaattatgcaacaacaaattgggtatcttagaaaagctggataaattcctattagcctactacctaccaagattgaattgagaagaaatagaaagtctgaacagatctatgaccagtaagatttaatcagtaatcaaaaaatctgccaacaaagaaaatctcagaaccagatagcttcactgatgaattctactaaatattataaagaagaataaacatggatccttctcaaatgattccacagcaaaactttcaaactcattttatgaggccagcatgaccctgatactgaagacaggaaaaggcatcacaagaaaagaaaatacaggtcaatatccttaataaataagatccaaaaatccttaagaaagtatcagcaaagtgaattcaatggcacattaagaggatgcccactgttattcttctattaaatacagtactgaaagtcctagccagagcaattagaaaagaaaataaataaaagacattcaaattggaaatcagtaaaattatatggcatggtcttaaatgtagagaattctgaagactcaaaaaaagtaatattcaataagaaaattgagaaaagaatcccatttataatagcattaaaaataatataatacttaggaataaacttaatcaatgaggcaaagcagaaaacattgctgcaaaaaattaaaaaataatggaaagacctcctatgttcatggatcagaagacttgatactgtgaaaatgtccatactattcaaagtgatctacagattcagtggaattcctctcaaaatcctaatggcattttttacagaaatagaaaaaaaaaattctaaaattcatatggaaccccagtggatcccaaagagcctaaatcaccttggggaagatggacaaagatggagtactttcatttcctctttttaaaacacattaattacagagctacagaaatcaaagctgtgtagtactgctatgaaggcagccattacttcaatggaacagaacacagagcccagaaataaacccacacatactcaaatgatctttgacaagagtgcccaaactggacaatgaggaaagggtagcctcttcaacaaatgatgttgagtaactgggtatccacatgcaaaaaaaaaaaaaaatattgtgctctgttttacactacacaaaaatcaactccaaatggatgaaagacttaaatgtaagctctgaaatgtaaaatttaaagaaaagaatgtagggcaaaagggttataacattgatattcatgattttttgaatataataccaaaagcacaggcaacaaaagcaaaaatagacaagtgagattacatcaaactaaaaatctgcttttcaaccaaggaaacaatcaacagagtgaaacctaaacagtgggagaaaatatttgaaaaccatatatctgataaagggttaatgtccaaaatatataagaaactcatacaactcaatagcaaacaacaactaaaaacctgattttaaaaaatgggcaaaggacttgcataggcatttcttcatctttgtccagtgaagacatacaaatgactaatagagttatgaaaagatgtacaatatcattcatcatcaagaaaatacaaatcaaaaccacaatgatgtattacctcatagctataaggaaggccattgtcaataaaatgacagcaaataaaactttaaaatgatgtgctggcaaggatgtagagaaattgagagccttgtgtgctgttggtagatatgtaaactctctcagctcctatctaaaacagtatggagatttgtaaaaaaaaaaaaaaaaaaatagaactaccatatgatgcagcaatacttctttgggtacttcttcaaaagaatttaaatcaggatcttcaagagatatttgcactcccatgttcactgcagcataaccaagaggtggaaataacttaaatgtccctcgatggtgaacatagaaagaaaatgtggtttatacatatgatgcaatattaatcagctaaaaagaaagaaattctgtcatagatgcacctaaaggatgttatgctaagtgaaagaatgttaagccagtcacagaagaaaaatttttgcatgattctacttatatggggtatctaatgctgttgtctcattgaaacagaaagtagaaaggtggttgccaggggatgggaggacagagaaataggaagttgctattgagtggatacagaaataatcatgccagaagaaacagttttagagatctgctgtacaacattgtgattatagttcacaaacctggactatacatttaacaatttgttaaaacaataggtctcatgagtttttttaaccacaataattaaaaatcttgagatcatttttaaattggcaaatatgcctgcataaagatctttcaatatacaaataaatcatagtacagtgtaaaatatgtgaatttctccttacgtttaataagacttcaaagtaaagataggaaacaatatatcaagtagagtgtatttgagaacgaaaaaataggtgaacttatatatgactataaaatttagtgttattctttgtaaaaaaagttagaatgatagatagaattctggtaattattctatagtggttttccaacttgttccccagtggaatctttccaaattctccctctacagagaatttcaatttgaaagacaaatttaagtagtgttcctatccttgaaagacagggctagggagagggtcaaggctgcatgcagaaggccttttcttctttccttgccccaaagattccacagagcactgtttaagaactcctgatggagatgtaaacacaacaatgaaaaaaataatagctgtctactttgggaggccaaggtgagtggatcatttgaggtcaggagttcaagaccagcctggccaacatggtgaaaacccatctctctaaaaataacaaaaattagactggtggtaatggtgtgagtctgtaatcctagctactcaggaggtagaggcaggagaattgcttgagcctgggaggcagaggttgtggtgagccgagattgcatcactgcactccagtctgggcgacagagtgagagatcctgtctcaaaaaaaaaaaaaaaaaaaaaaatggctgtcaaatattaagaatttactgtgggctaggagttgtgctaagcagcttatgtcttgcctaaattaatcctcacaatagtcttatgaaagagatattattatttttgtcattttatagatgaaaaacaattattaagtaattagccaaggtcacttacctcatgaatggcagaaccaaaatcttacctcaggcaacctcatgtaatctagagccttaactgctctactctgtcgctaggagaaagcctcacctggtgagtaaagctccacatggaattttctgtactgaaaggtacattttcactgcatatattgatcaaatggattggataattgccaatttttcatgtttctcttgaaaacacaaacatttcatttaaagtttgtctaatgttaggtcattatcatcactctactattagagagaacttattcaaaagatgggcagtagtctggcgattaatttaaactctaactttttatgtattcttaaggagttctcaatcttccctgcttccgtgatgttagtaaaaatcaataacctctgaatttaatgtacagatttctaagatgttaatagttttagcaccttgagaactttctttattacatttcctcattctttgcaatcacatacttcattttctgaaataagaaaaaagtgattgaggggagataattatttacaagtaatatttaaaaaaaaagaactgaaatgcatacatattaaatttcatctgcaactatttggccacctctgatgcttacttataaatggcgctttttgtaatacttaagaagagaatcaaagactaacttctctaagcaagtggagtaagtcgaggaggaaaaataaaataaatctaaattttattttaaaataatccatcatgctctgacagataatcaattgttattaataccaccattatagatctgtaaaaaatatattttatttggggcagtctgggcacaatagtatatacatttaggacaaccattaatatctctcaatggagagttttagattagctattctcttgtaggaacacagatgatagaaaagtcatttttggtgaaaaataaggggcatgtgagaaaagtcaaatggaaaaaaaaatagattagaggccgggcgtggtggctcacgcctgtaatcccagcactttgggaggccgaggcaggcggatcacaaggtcaagagatccagaccatcctgtctaatacggtgaaaccccgtctctactaaaaatacaaaaattagctgggcgtggtggcgggagcctgtagtcccagctactggggaggctgagccaggagaatggcgtgaacccgggaggcggagtttgcagtgagccaagatagcgccactgcacttcagcctgggtgacagagcaagactccgtctcaaaacaaaacaaaacaaaacaaaagtacattagaaatgagtgtagctgtgagaggctgttcagctaaggaggaattgcaagcaagaaaaatatagggaaatatacttcaattttatcagatttgtcaaactcctgggaggcccagatatgtgcatgcacattgatttaaatgttctgttgaacatttagggttctttggttgcaaaccagagagaccagttttggttataaactacaacaacgacaagaagacggttatttggaggaatatgattgttactgagaaaaattgcatattaagaatcagaaacaggattgaaagcaaagtagttactgacattggcatctagactgcagaaaatactttcccaattgttttccttcttttcactgatcaagaattaaagagccccttgacagggaatcctatttacttggcttggctttgatatcatgcctgcactatgggcaagggctgttggagaggatgctggggaaatcaaaaattaaatgccactttgcaatgtctttcactgtagaaatgaagtcttcaaatagtgtgctaacacacttgcctcttcttttgtaagatcacagtaagaggcacagtatgaggggggaagctttagttgtcttcctttcttcctccctccctccctcctttccgctcttcctccctcccttcctctctctctctctttctctctttatctctttcttttttcttttcttttcccctgcctccctctccccctccctccctccttccttcctttttcttttttttttttttttgagatagagtctcactcttgtcgcccaggctggagtgcagtggcgctatctccgctcactgcaagctccgcctcccgggttcacgccattctcctgcctcagtctcccgagtagctgggactacaggcacccgccaccacacccggctaattttttgtatttttagtagagacaggttttcaccgtcttagctaggatggtctccatctcctgacctctgacctcgtgatgcgcccacctcagcctcccaaagtgctgggattacaggcgtgagccactgcgcccagcctctttctctctttttctcttctcttctgttctcttctcttctcctttctctcatggtctctctctctctctctctctctcctcactgtgtcacccaggttgggagagcagtggcacaataacagctcactgcagcctcaacctccctgtgctcaggttatcctcagcctcccaagtagctgtgacaacaggcatgcaccaccatgcctagctaatttttttgcattttttgtacaataatacaaaaacccagctgggagtttgcctgcctctccctcccaaagtgctgggattacaggtgggagtcactgcatgcaaccaatcctgcatgttttctattgcctataacaaaataccacaaacttaatggtttagaacaatacaaatttattatcttgatgttctgtaattcgcaaatcaaacaaagtctcccaggattatgatggtgttggccgggctgcattcctttctggaggccctacagtggaatctgtttccttgcctttttcagcttctagaggcctcccacattgcttggctcatggcctcattccttcatcttcaaagtcatcaatgtcacatctctctgaccattatcccatagtcacatctgcctctgaccacagctaggtaatgttctccatgtttaaggacttgtaaagcccaatctggataatccagggcaatctccccatctcaaagtccttaatctttcttttttccagagacagtgtctcactctgttgcccagatggagtgcagtgttgcaactgtagctccctgcagccttgaactcccgggctcaagcaatcctccggtctcagcctcccaagtagctagtcctatgggtgtgcaccaccatgtctggctaattttaaacatttttgtagagatggggtctcactgtgctgtccaggctgttactgaactcctagccttaagtcttccccttgctctggccttgcaaagcactggaattacatgcatgagccaccaagactggcctccaggttcttaatcacatgttcagagtcttctttgtcatataaggtaacttatttatatatttcaggattcgggcatgaatatccttggggagtcattattttgtctaccacagaccctatcttataattggagttgtgtaattttgggggattcaggatttatcatttctatctgtgtgaatttttctctttggttactctctttttaattatttttgttttcccccataaaatatttaggaaaactccagtaaggtagaatgaataaaatgtttttggaaatatgttgcattgtacgttataaaaagtgtacttaaaaaaattacacaaaagtacaagtagaaacttttcttgttcacttttctagctgtgttgagtacagtacatacacaaagtcttaataaaatataatacttgattatgactattatatagttgagaggaagcactcaacttctgtcttgattatttggaatacctggatgagtatgtgcttctccttaaaaagttacctttggatttatcaagaataattcttatataaaataaattatcgcataaggctcttatgaactaaagagaaactgcaggtgggaaaagagctcatttgtatgaattctctttcctactgtggaaccccagtgtggaaatctgattaacttaagaaaatgacttcagcagggctttaagctataaaggttctttcagatgaagaggtcagttttccctggaattaaaagtcataatcttgggctggataagaactccaagtatttatttaactctgttagccaaagctgatagttttacagtttctaaatagttgcctgttgtggcaaaactgcctggtgtttgctgattagcagtaggtgatttggggctgttaatttagcacaatgcaatgtaaattttaaaataatgtaatagttcctttttatatttcaagacaatctagtatgaggtgcagtattttacagaaaacatagtcaagactttgttctatttatattctgattcaaaatcaaattctccttcagaaataaggatttaaaaaattcttatcacacattctgtttatacttttaacaaatcaatacattctagcactgttttcctcagcttgtattttttgtcttgacatatttagaataatatttttatcagcaatgctttatattccattattttccttgtctctgataataatcaatttttgacactggaagtcagaggaagtcagatgaaagccaagtgaatttgttgtttcaactgcattagcaggacagaatacacagacacacacgcacgcacattttcatgcacataaaccatcagaacatctgtaaatgtttaaaagtagctgaagtttcatttttcatctatccaagcaagtctgacactggcaaacatatcagtttaaattctggtttcacactaattctcatatattatgatgcaatgtcatacctgtttcagagggatgaataggtagagttattttaagtttctcttaaggagaactttttctgtttttctctctgaaaggtgtcttcccatgctttccaagtttatatgaaatataaagaacaaacattggaggtatttacacctgacatcaatcttttccccatgtctaaacagaagttttgtttcctttgttgaatttttagattaccttaggttttctgtggcttcattatgtttcagttatatgataggctaacaatgccaagacctaacctatcattccttatttgaactatgaggattaaatatgattcccttggtgtctgtatcttctgaatttcatcttctgtttccttatctaaggttcaatgatttataagagtattaaaataagtccatcttcttaggaatggacactaaaactataaacctgtaaaactcaaagtaaaaatttcagcaaattgttaatacttaaatattctttaagcagaaaaatgtgtatagctaggagagtttaaaaaaaaataaagtgcatttttaaatacttagaatagcaagaataggagcaccatacccaaattgaaatatattatcattgtgttacagcttaaagtaatagaaagctgatataggaggtaaaaccctaagaagtatttctaaaaactatgatgacctaatttgagaaatagaggccaaaatgtttatattattggtgtcttctattttaaacatggaaaatattctgtttgggccacatataatcttattataaaggaaatcacaatataggacaaatttttaaagtaagaactcagtaaaaaacaccattccttgaagatacatataatgattatgttactgaatatttttccatttgtagaaatagatatatagccatcatttcgtgcatgcatgtgcacacacagacacacgcgatggtttctaaatagaaggggataattttacaaaaattgccttaaactgtacctgatgttatataacctaatattttattcaatttgttgatgacattatcatcttaatatggacctatatcatctttttaaaacactgtataaaatttccttgtatgagagaaccacagtttaatcagcatattttctattgctgaatactttggtggttttgttttcttttattagtgttacaaggaaaatccatgaaaatacattattaaccactcctttaatgttttctataggattgtgccctacaatggggatggtattaaaaagacgtgtaatagtaaatttagcttaacacataacagtttgggataagctaaggaatgttcttgggtgtcggaagccatatgtcttcattttgaagtctgcaatgaagcatctatagtatgataggttggttttaaatgatctaaaagcctgcttatacgttttttctctctcctagaatatatttttcactttgactctccacattttctctagtccatctaccttttctttttctacataactcaaattcctctacagtgaactcagtgcatctatctaatctctaatcataatatccaactatgtatactttgttttttcttgccaagcattctctcttctcaagttattgtgtggcttaatccttcttttattctgctaaaatatcacctcctcagatacactatccttggccacccaatttaataattacatctcccctcgcataattatttttaatcatataattgagattttttatggccttattactatctaaaattattttattcatttatttgtttgcattgttggtttgacttgtaggatgtaagttccataacagtaggaacattgtctttctttggcactactgtatccatagatacaggatacagatgtacatattttccacatagtagacatattaaaatatttcttggatgaatgaataattttcaggagtgtgttacgggccagggttttatactctgtggaaggagaggagaagggaactgattcgtattgaacgtctcttatgtatgtactagagctttatatacactgcctcatctgaatctcataataattctctgatactggttttctgtttctcattttgctaatgaacaaatagaaagctcaaaatattatataaatgcccatggatacacagctgggaagtaacagagccaagattaaacccaaataagcttgtatgaaaagtctgcagtttttccgctgtgcatactgtcaccgaataaacatatattttattagagatgagtttatataacttaacgtgtgtcaagactattgcatatattaatattatcccatttaatttggtactctgaatcacttaaatgatagatattagtataccatatttgtgttgaggtaactatttctttgagcaattactaactcattcaatgccataagcctagcaaatgaaagtctgactttgatcagtctgacttcaaaactcaatattacacagaagccaatgtagagaaatgtaatagaacttgctgcaatccagcttcatttatattgctatatatgcggaagaagagaaagtcaatgtttgtgatcaaataccttttttattacacacataaatctcatggaaatatataaaattgtgataagtgaaggtgatagggaagaataaatatattttgatatattatttataagtaaaatgacaacgtgaaagagaaagacatggaggagatggcatgaatatagcaactaatattcagagtgaaataaatcagtgtttaatagagtaacccattagagataaactaaaataactaaatttattgtgagaacaaatttatcaataaaaaactacttgataagtatgaaaaaccatagatttatttttttttacactctgtttttgttaccttgttgactatttctagagaaatatttttagtttttttgctaaataaggaccttacttatgtagtttctgactacttctcaagaagctattcctggacctatacctatctaagaaatcttaaaaaccttatgaaacctggccaggtgtggtggctcacgcctgtaatcccagcactttgggaggccgaggcggtcagatcacgaggtcaggagatcgagaccatcctggctaacatggtgaaacgccatctctactaaaaatacaaaaaaaattagctgcgcgtggtggcgggtacctgtagccccagctacttgggaggctgaggcaggagaatggcctgaacctgggaggcagagcttgcagtgagccgagatcatgccactgcactccagcctgggtgatagtatgagactccatctcaaaaaaaaaaaaaaaaaaattgaaccaaattccttgcatttttaattaaaagcatatgacctaggtagtttaaatgaaattgcttaaggttgtgcagatgtaaagaagtaaaaccaggtatgaagatttctcctgaaaaccaggctgagcctctttctggatgctagaatgtgtgactagttatatggatgttatattctgccattactctgaatttcacttagaaactttcctgtgatatgctttcaataatgaaggtggctttctgaattttgtaatataaagtttctctggatattaagtgggaacaactttagtgtttatatattaggttgttcttacatcgttaaaaagaaatatctgaggctgagtgatttataaagaaaagaggtttattggttcaaagttcttcaagccttataggaaacatggtgctggcatctgcttggtttctggtgaagcctcagggagctttcaattatggtagaaggtgaagggagaacaagcatgccacatggtgaaagcaggagcaagtgagagagagtggtggggaaggtgccacaaatttttaaaccaccagatctcatgtgagctcagagagagtgctcacttaccaccaagggaattgcccaagccattcatgagggatccgcctgtatgatccaaacacctcccactaggccccacctccaacactggggattacaattcaatctgagatttggcagggtcataccttcaaactgtatcagtttgattttgaataacggtcttgattttggcttgcctttttatgttttttttgcttgtttgtttactatgaggatcacatgtggaaaggcaagaaacattttccatgtacttcactgagttgaattaaatacatcttaacatttctattattttattgagaattatgaaactggtaaagtaatgggctggtaaagtaatggggagcatttcaatctcaaaatgtatagaatatatttagaaccaagagtagcatccctcaccaaaaaaagtttctatttattgacagcccaaaaagtatgtgcttcttctgggaaaagctagagcagaaaatctcacctcaaattatctctatataatcaattttgttggactttgtggtacagaaatattgtagatgtgatcctttttgaaaaagatttctctaaaatgcccttaaaatgctttatctagtcatgacttgattctagtctgtatatttcaaatgcaaagattttgtataatagctttctctgagaagatccatcataggataagttgatgttaaaagcttacagcacatataaatatctgaacaaatatttaatacaagttattgtacttatttaccagggttacttataagtcacccctaaaatatggtatagacatgatcattaaatctcctcctatggtggaggagtagctgattccaagcaaataatttaatacaacatgcctgacacgactgcaactaatttttgctacttataatactttggaaacgattataatttaaataaatttaaataaacacatataatatgtaagatagatgatagatagatagatagatagatagatagatagatagatagatagatgatagatagatactctacacctgtatttggaattgtgtacattcacttttattaaattaactgctctaaatttcttacatggaagtattaaaaaattcttcatattttgcctttattatgcctagtctgaccttatgttccttgcctgagataggcccagtttatgttatcccaaccagattttaagaaccttctttcattctcagaagtgtcctgatttggatgattaattatatgaacatcctatttatactccatattatcattttttgtatattcacatactgccaaattataaaaataacttctcttgtaggcaaataagaaaggcttatgttttattttgataaaagacgttttgcacagtgattaggaataaaagctttgtgtctcaattttctcatttgtcaatgggaaaaaataatatctcccttattgtttgttttagggatcaaattagtttgttacaaagatctacttataagaaggctaataaacagaattaagcctatttcttcgctctctattttgttaaccatacatcatacttggcataacttctaagaggtcatttttgacaataaaatacatacaaatgctactgtactatataagaaagagctatattgtagaggatgtgaaaattataaaaactaatattaacatcagccatactaaatacttttgacacagttatgttttactatcatgttgtattcatttgcagcagggaaattaaaaactggttttatccaaaatgccaaatttttatcatatgtttgataaaataaccaaaaataacaagatatatacttatattctatacttttaggcttcttatattctgtcccatacccattagcagtattgtaccagcaaaataataatgagattaatcattttttaaaataagtatctctgttgtcttcttacataaatgaccaagtcacattttgttgataattttggctcctcctcaaacaaaaatcctctttaatttgtacccagactacaaaaagcatagtgtgtgtctaatttgactactaaaggtattctagcaaccaactaaattattatttccttttatattactctttgacttaatgtgttataaattatgtgattatgactaaattaatgtagttctataataataccaatcattctaacactgtggagcttccttaatatctgattaatatctgattcctaaatagtttttttaaaatgtactatttgctaaatgatattccctataagattctaacttctaaaatgtatgatttaccaaaattctgaaagcaatcattttggtaggtccaaacaagaaaaacccactgtataatttttactactataataaatatggctttataataaatatggtctgataaatacaaaataaagtctttctgttcttcatggttttgtttttgtttttgttttgtttttttgagacggagtctcgctcttgtcgcccaggctggagtgcagtagtgcgatctctgctcacttcaagctctgccgccccgagttcaccccattctcctgcctcagcctcccgagtagctgggactacaggtgcccaccactacacccagctaactattcttcgtgttttttaatggtcattaaaaatatctatggtaaaaaaaaaaaacatattctctattttaatcaaggcttctgcccaaaatgaaaattagaaataggtgcttccatttctcacaggttttatgttaacccaatgtcttgcattttactcatcttagaaggattcaaagaagactcataagaatcccatcctaaaaagcttgctatggcagtaccagtataacgataggaactgatcacgtatttaattctgagtcaaattatgccactatacattcagcattatttccattggatgataacctagaatatattgaaccaaatgtatttttctattaggatatctgtgctgacttattattacatttctacactcagatttataattgcagaataataaaaagcagctctggcacataaaacaccactccaaagctaaaagcataacaaatgcatatgttagatgcttagaacttgttattattctttttcctcttacatattttacttcccttcctggctactttcttttttaagattgttattctgagaattaatgtaacttctgtaaaataccttgaagtatgcatggtgattcagaagcaaaaaaaagaaaactgatttttcttaaagtaactactacgatcttcatcacatcaaagaaaattataaatgattgttgaaatttctaaccagatattttattgtgaaaactagacataggcctacagtattgcatgctattggttggggctttgaataatgaatcatctatatgtttgggatgaaataggattgtattaacaagtaatttaccatatttttatcttaactttttatgacttaatgatttagacacatctggaaccttttgagtttcttgtatccaatatccccactgtgtagagtacctcatagatttggagatccagaaagaagaatgccaaagagaaagaatgccttctcattctttggaaggattatgaaacgaattgtatttccagatgatgtgagtgacctttaagatggaatcagaagtagggcagtgtaactgtgataacctcaggggagcgactggcctctgccttgaagtctgtctatacatacatgtgagataatacaaagccacactaaaaaatgagcttggaattacctgaattcgctatattataaaaattgtacttgagcgtttcatacttaaaatatgtttttgtaaaaattactggaattagtaattttcaaataatccaaagtcattatcataacagattagcacctcctgacaagttttaaggtcaaaatataactgttacctaagttgaagtaaacttcagcttatccccatgtttcatgaaccattaagcaattgttttgaaacttagctaaaatcacaaactccatctacatatgaataaagctactgagaaagatggaagctgattttagctttcatctgaacttcaacctcacatagatgaatggttagaaagttcacattcctaaaacagttaatattacatacctttattgagttttttgtaaacttaaagggttgaattaaatagagaggaaaatgaattgcagggttttttttaatagttttgaaatatttagatgttcctattaaaacgtacaaaatagaaactgataattttatcctaaactattttaagccactgagtctgctaaaacatttaagaaataaacactcttaggctcacattagtttagtggatatttttttccccaactacataggtgacagtagcttattttttgagttttaacacaggttcttcatagtgggccttgaaactttttacttgatattcaatcttgcatggctcagaaatgtgttattttatatcactgttgtctaaaatttcaggaaataaagacacctgcttctcaatgtcttcataccaagaaaaagttgatattttgcccctttcctctccatctcatactcaaaatttagatgactataagtcaaatggggaagaaatggttggatataagtgaagaaggaggagttctcatccaaatgtcataaaaattcatcttttcagtagtttgatatgtataaaagcatcattccaaaaattttgattttctgtactggaatagataattttgaaatatctcaataaattctccaaacttaagctaataacccacccagaaagatctgtgaacaatctctcttaaacaatcacaaacataataacacttttacaatgttacatagtttgcaagttttttgattgtatctataagaatataacaaaatcaccagtgtgcaggaaataataaaagtatacatgaagatacaactttggtcttcatttgtttttagtttcattgtaaaatatttatttctatagtgttactttgagatttttttttacctcaaacactattaaaaataatgttttgaaagcttattgagaaggcttggaaactaatactttttggttgactggtctcattccatgttatatttaattatttccactcttgagaaatattttggtccaaatacatttttgtatgtagtttgagagtcactttcctgttcattatatagatttgatttgaacagccaaatattggtgactagcattccattcttgcatgtgggatcattctaatattagtaaaaactttgaccattctgaaaatgggaggggaaaactacaactcctagttcaaaacagaaagcaaaatatgatctatgctaaaatacatgaggccaaccttatttgatttaaagctagaaaaaaaatgaaaatttctggttctgattcaatccaacatacagataccctcaggttcaaagaaccatgtaacagaagggtaaaatatctcataacaataatttatcatgcacagcttctcaccctttagtggcaagataattgatttcctatggcttccctaaaaactaaaatacaaaaagaaggatgcgttcaaatatagtttacatgcttaaaaatttgaaaaactgcttaaaccagaaaaacttattgatggtcatttgagagctcactataggatctagaataggaaattttccagcaaagcatagagaacttgaaaaattaaggctgcagtccttgtaacatatggtagtgccaggtatttttccccccactgtatgaaaatgtgataaagaaattgattatgacttccaaaaaacacctccaaagccaagggtgttgccaaactgattcttaattaaacaaatacacattttagaaatccatgattgtcttttttgtcagaaaatagaagaaaataatgatgacagtgtgaaatggttttcagtctctgaaatgtggaatatgatctggtgatgcatgcattgctagcagaagcaaatgcaatgtaacatggacaggcacactggctatagacattgaccatctgctcaacacagaccaccaaaagatgatcaggtctggtgatagatacatgtaatttttcagtattataagaaacccagtaaaagagaggcagttagtgatgtatttaaaaaattgtattctccaataccctaatattctatttagaagatttgttctacttcataaccatgtttgtaaaagagtaataataatattggtgactagcattccattcttgtgatagtttttcttttgtgtgtgttacataatagctagtcacataacaattgtaaggagataatggaaacaactctcaaaagtagtatctaaaagcatctcagaagaaaactaaaagggtaattataaatcagtattttaatgtcagtaagggaatattttgccactttttatggacttgccaggtaggtcacaagatgctacaaaacactgtgaatttttaagtttaattgccagcttttaaaaaggtggttctagcaaagcaccttgtctaaattgaaataagatgaacaaagttacagaaataaaagaaagttaagtattggaaaaggagagtattaaaaatggaatgatgcatctatattggaattgtggtatgtaaggcttgattgataattaaacacggaccacattatggaaggcatagatgccaggctatagaatttggtttgataccatagaggcaaaggaagccattgcaataatttgtgtgtaaagggaaggtgaaattaaatatttgatgtgcttggtgaaaggttttactgaaatcatggagatattgagaccattatattgaaattaaaaagatactgattttttaaaaaaataaatggaccatattaaggaatttggcatagtctagagaaagtgaagtgtctgaaggctcttgacgctactgtaatgatccacggcagtatttagagctaatagttgactcaaatgttaggtgtatctaggataatgtcatcttttgcttctaaaactatggagaattttttcttaatttcaatagccactactataattccttggacagcacagcagtttacatagagaacagactttagttttcaaaaatgtctacattgaatacagctctgtaatttactaattttataaccttaaacaagtcgtataggctaactccaaggctttcttttcttgttatttaatttgtgaaaacaatccttaaatgataagattgatgtgaggatttataaagctagtgaaggccaggcacagtggctggggcctgtaacgccagcactttgggaggctgaggcagaaggattgcttcagcccaggaatttgagaccagcttgatgaacaacatagaccctgtttctacaatttttttttaactagccagttgtggtggcatgcgcccagcatgcagctgggagcctgaggtgggagaatcatttgactctgggagattgaagctgccgggagacgtgatcaccccactgcgctccagacagggtgacaaaatgagaccctgtctcaaaaaaatcaaaccaaaccaaaccaaaacaacaaaaaagataatgtagatgaaatgtgtaacagtctctcacacatggcaggcattcagtaaataaatgacagctttctccttactatttattactacaaacatgtaggagttcttgctcttggcatatcatttgtctgtagacagtagaacattgtagattctggaatttgacaaatttggtttctatttctatctcgccaaactgatagctatgtcctttaaataagtcacaaacgaggacaatgacagtgtctacttctcagaattgaacggggggttcaatgagaacgtctttaagcactttgcatggctattagtaatattgcttcagcctttcttgcttacttgcttgcaataggtaagtgtttctataggtttgggggttatagttatattagttctgttaataaagtaaccatgagatttacagaggaaggaaaaagaagaaaactttagtttaaagatctgcagtttggggatgtagccgctgggggaaccataagcacatgctctgcagaaagggaggaaacagtgacttttaaaccttccagggtttgttttcatgtatatttgccaggtttggggaatgtctacaagtatacaagtctagtgcatgtgcagttagttaacatacatgtaaggtacatctcatatttactttggggtgggattttaacattaaaatgagatggaatttggctttatttatttatttcgagacagagtcccgctctgtctcccaggccggagcacggtggcacgatcttggctcacggcaacctctgcctcctgagttcaagggattctcgagccttagcctcttgagtagctgggattacaggagtgcgccaccacgcccagctaatttttgtatttttagtagagatggggtttcaccatgttggacagactggtctcaaactcctgatctcaagtgatctgcccacctctgcctcctaaagtgctgggattacaggcataagccactgcgcccagtcggaatttggctttttacatcaaaaggtgaactatagggcacaaagacattttatgtgcagcctctgtaagccagctggaactggcttagtgtctgtaacttctcatcaacaaagaatgtttgtaaggccagtctcctatccaactggagctgttggccggaccctcaaggagggggtgtttcagtcagctgttgtaaggttgtccaccagggtcatttggacagtgtttctctcaaaccggtttctgcctaatagcgggaaaacattatggcagttaagaaaccatatggtatttagtaatgttagagatatgtgaacagccccttttatctgccatggctacttaattttctctccagagtctcatgttagccacagagagtccatcttgcctgtcagccgggggtacaatgatgacattaaaatgagaacaatagtagtgtcttcttcacagaatgacctggggatcggaaaagaaaatggctttcaccactctgtatggctattaataacatcattttagaccttcctgctatacccgcttgcttgtttgcaatagataaatatttccatatatttttaggttacagttacattagttcttttggccaccttttgagcatactttaaatattttttggtctttttttcatggtaagcatcaatatgaaccagtttttgaaaatatttgacagttcttttacaactgacatcagatcatttaaactgctgaatggccaaatattatttgctgagttgatttgcattctttttatccctctaagaagtcatttgtcactcttaagattatacttttaagtaaatgcttcttctctgggctctctctggatgcatatgtttatttgtgaatttatttcacatatattattgatcagcttctgtgattaagttcacataagaaaaggtgatacgatgaagagtatcttcctattcttcaagtcatacagtgttatctgaagtgaaagtataggtctatgtatatactttcccatctagacattaaactctctgatgtttaaaaatatatatacatatgcatatatgtgtgtgtatatatagagaggctgatagtaaaaatgtgcatatataaatgtatatatataaaatgtataggcatatgtaatgtaaatatatatgtatatataattgtatataaaaatgtatatatacatataaatttttaccaccagccttcagcacaatgtctgggactttagagacataaatgtttgaactgtactttttatcactaccacgtgagaatatgccaagtatttcagaaagcctacctataaagatccacttattaacattattttaaaatatagcaataaaaaatccaggtgtgccttggctgaatataatagttgcctttttatctcaaattgtcctattaagtcagtttcctttaatgcgttattccaatattgtgtattaatataatactgtatagaaaaaataatattgtgtttttttcctgaatttttactttttttttcatatcctactagaaatactatgagttgtgcattgtaatttttggtattaagggtggatacatagatatgttagtaaaatggaaccaaatagaatggaaatataggtaatgaaatactatacacagtactatataataattttaactgagggaaatatctacgaaagaaggaagaaaagttcaattttattggatttttcttcctattatacctactgtagaattttacttaaaggatatctatgtcatgctaagacgaaacacaaagtaccatctctaaacttctctttctagtttctaaagggtagaaaccacatccttttttttttttttttttttttgagacaaagtttccttcttgttgcccaggctagagtgcaatggtgggatcttggttcaccacaacctttgtcccccaggttcaagcgattctcttccctaagcctcccgagtagttgggattacaggcatgcgtcaccacacctggctaatttttgtagttttagtagcgatggggtttctccaagttggtcaggctggtctcaaactcccgacctcagttgatccacctcccaaagtgctgggattacaggcatgagccgttgtgcccggccacgcatcctcttttatttgtatgtctggtctgtgtatcttctacattttttctagggatcgttttgtctaatagaaatgtgcctgttaagataatgtttatgtgtattaatttttactacaaatataatatgcctagtttttcccctatccagaatttatcagatgccagctgagagcatttatttatgaaagagcaaagatacatctacaattttattcctgaaattttgttcttgaaaaaaagtgtcagaacgtcagggcatagcaaaggtaatctattttagcttagtctttcagtgaaatgccatcaaattgatatgagtaaaatttttatcattggctttatctatagccactaaaagtaatgtttcattaattgtagcaattactgcaaaatatcgcccagctcatcatttggtagtcccattaacaatgtgagaaactgaatttaagatgtaattttaaataaagccttgcttaggtcctgatattctttttatttttttgataatgagaattaaaaaacaacaatgtattctttttcatatagctaaaaagaaaatcaacactaaacttgaagatcgattgtataaattttgtgaatctgcttgtatgtgttttgtttttcattggccctaacttcatatattgagttacattttattctgatttcattgtattttttttgacagctgccttaaacttattatggaacaaatgtaaggatgtaaaaatgtgtgcaaatgcagatattcttttgtgaatctataaacttaccaaataatcataaaaaataatggctttagtcttgtcagcttccaaaataattgtatcattcatgagtgccatagaggtcacctggatcattctctcaattaaatgttgatgtatgcaacagttaaatgacttgctcaagtacacaactttatctagcaactaaatcttaggggagactttcctctacaaacgttatcgctttgggatctggtttatttctcattatctctcccctgtttccttcatgcttatgcatcaggcttctgaaatacttgtgcttcttgaatgcagtatctttttatttttgtttctctgcctctgtttttcatgttttcttaatactccagagttttcttttctctccttaccttttctgcttagaaaatttgtaattgggttttaagaatctacatcaaaaaatgccccacactacacaattaatgacattctgttgggatcctcatcgtgtcaaagaaatttttatatgaatatataaagtaaagacaggtataccttcagagtaatgcattgttaatcaatttcatcattgtgtgaacatcatagagagtacttacataaatctacatgatacagttatctggtatatctgtctggtataacttattgctgtaggctataaaactgtataacatattactttaccaaatgctgtaagcaaatgtaacaaaataataagaacttgtgtatcaagacatatataaacttagaaaaagtacaataaaattatagtataacagataaaaaaatggtatacctgtatagggcatttatcatgaatggagctggcaggactgaaagttgctctgggtaaatcactgagtgagtggtgagttaatgtgaggtccttgaacattattacataatacagtatactttatataaacactgtacacttacactacattcaatttatttttaaaaataagtaaaatgaggttacaacagctatgacattactaggtggtaggacattttcagctttgttataatctcatgggaccacaatttgtatatgcagtccatcattgactaaaatctcattatgcagagcatgaccatatttacttaattacgttggaaagaacagtttctctttccagatccctaggcaacattcaagtttcttgactgtggagattgcatcttctgttgaattaatttagtttatcataaacagagagttttagagtcacatgactagttttgtagattggcatgtaaatgctattattctaaaacactaggaagaatccgtgtgcaagtttttcagttttctaagttttaaagttccaactgaatttttttttatttttaaagttcaaaatttaaaacttagtcaactaaaaaagaatatacatttgtacctctaagaccaattatctgggtcccaaaattcctttcacatgtgctgacattgatacaccatttagtattcaaatcataggcattctaatgaccatactattgcattgtagacactttgaagctgggtgattctacccctgttggctatgcaaagggaaatggatgccctggggaaaatttcaagatttcaaaagattttttttaacatatttcaacagttgaaatgataaaaagactgccagaatttctattatgggcctgatttatagggtttactatcgaagcaggtttaaattacaacaacttgccaatagcaaagaaaatttatttaaaacaaaggtgaacccatttttcataatctcttaagactaaaatggtcttattttaccagaaaagtcctgaaagtttacacaattatttaaacatgtgtttttaaaagttttactggatgcaattttaaagtaaaaattgaactttatatgagatgatttcttattatgcagttaacaaatagagaacattttgagcaacgtgtggaatttactgatagttgagatttatattttatttactatctgatttttaaatgtagtaactttaatttagaaattaagtcagggacatagtatacccaacctaaggcatgttacattactttttgcaaatctaataattaagacaaacaatgagcatcatataatagatacagattaggtatatcaaataagataaaattactagtccatatctctaaaagtgaatacaatactaatgttcctctatttttgtgaaaacaagactatgaaatattcgtcaaaaatacataacacacacgtataaagcacatctttattttctatttttctatttttgctttgtataactctgctttttgagggctttttgatgtcatcatataatctttgtatctttgttattctgttgttgcttttctgtacaacttgtcttccaaactacagtatacattatactgttaaatttgtttttatttcttagccgacccagtccaagcctgagctcactgactttttgttgtaattgtcgttttttgattgaatggctaaatatacttacagcagggaaaggatgaagacgaatgcttgatgagggaataattattttttaaaaggtgagaaatagagatgcatgtttattttatgtaactcacagtcagaaagcacagtgtatgggaaattttcactgggcagaaatgctaattgggcctgggaaataacaaagaataagttttaagcaggggaagctaagagaaagttctatgcttatctgataattgtaaataaggtagggttgacatactttccggtgactcatggactcacattgcggtgctgttagagttttataagctcctcattaactgcttctaaacatctcttccagaaagttgtgtgtttgtgtgtgtgtgtgtgtatgtttatgtgttttgatagaatggtgttcaggttttgggaacttactatagaaacttagtcttatatgctttgttttaaggatcttactgacctcacagcttctgcccaatataatcttgtctagtgtttggccatccaatatgggtgctccacagaatccttgaaaggtactatgctggagctttggagtcataactagatagaaagattttcaattatgataagccaaggctcacagtgcgctgaaagatctgaacctaagtctgtttcagcgggactacagtgcttcttgtgaaactgagaaattgtttgactgatgctcatctgtttgtggagaacgtttgggatttctctggagctggcactgtgttccacagcccaattcctaagtgctgggcattcatataggatacatgactcgacagattgaaagatcctcttcccagaattgtagtctgatctcactaagtccctctgagagggagaatttgttatcagtcttcttatgttgacattatgactcaaaaaataccagtgagattaaagacagtctcaaaataaatccccattttgggccttctcatatctgtttcctgctccacttggcttccagcagattctacattcttcgtgtcattaactaagaatcacagaagttacacatcaccagacttattgggtcatctgatctccccctttttcctgccccatgcattctgttttagtgagtgacagtctctctttttttttttttttttttttaagagaggacaatgctgatgatggaaacatactggcaggacttgcaagttaggcaggatgatttgtttttttaccacatgcatttactcacctgttccatgggttccaacaagcctaaaattcattcaaaatagcactttactcttcaggacttttatatactaaaatgcagccccactccttaaggtacaaataacttatctaaaattacatggggagtatctatggtaaactacttaggcatatctgtaaaataatatagagaacttaaacataatgaaataagtaatatagactatttaaacacattgaacaaagagggctgtcattagtaacccatgctcctgagtttccttgcttcatcagcttaaccagtcaatccagaggtcataatttttacatagcatcaaacaccatggtccactcatcagctaaacatatgctccatcccctcctcatgctttggatatacatgcatcttacctgaggcataaacctgagagggtatttttacttatacatagtagtgggtacatcataggggtaaaattcatgcaaacagatggaaagagctaacaggagcatactgataccagcctctagaataatcagacaatttacaaaggttttttattctggcatttgatcttatccattctttctcctaaaatctgtttgtcttctacttctattcccttgttcgatcccagactacctttatctgctttcccaacaactgcagcagcctttctcctttcatctagtttctctttcctctaatcctgatttttgatgctgtagacagtcatcttttcaaaacaaatctgatcatctcatatttttttttgtataaaactgttcaatggcttatcatggatttaaagactaggcccaaatcaattaccatggtgtatgaggctcttcatttaccctttcctttcacaattttttttccaaccttattgaagttttgtcagcttctcaaacacgccaccatctctgttgcctgtaagcctgcactgtgtgtcacatgtttgtgctcccttcttgtaatactgtccttcactaccttaacctgacattctgtagataagtttaaatctccggttacgtattacttctccatttagttcctcattttttcattcactcatttgtttaaccaatatttattcaacaccggctataagtaaggcactgtagaaggtactaggctatggtgaccaagacagtcactaaaatcatagaatttatagcacaaattcactctgctaaaattgctgtaagtcctttcctctgcattgtataacgactatccaagttaaaataataccatcttaaacattcatttctgcaaaagcctaaagatttattccctcccctcaaccgcccttcattcattgaaatgttcttactcattgtatcaatttaaatgccatttccttaaggatttctccttctgaccacagagaagtaagtgtgaaggatatgatttgctctattctgctcagatgtgatgtcatatttctttttttaattgtgagagaatttacataacgtaaaattattttaaactgatccattcaatggcaattagtacattagcaatgttgtgcaaccaccacttctgtctagttccaaaacatttgagcgcattgcgcacttgttcttcattctcccctcactccagcccctaaaaactaccagtccaccttctctctctctgactttacctcttctgaatatttcatataaatgggctaatataatatgtgacctttgtgtctggcttctttcacttagcataatgtttttgagatttgtccatgttgtagaatgtatcagtacttcattcctatttatgtctgaataatattacattgtatgtatagactacagtttatcattcatccattgaagaacatccagactttttaaaatcttttgcataatgccaacaatgctgatactgtaattgtatttgtttgagtacttgttttaaactattttggatatgtacgtaggatttgctggttcatttggcaattctatgtttatgtttttgagggagtgccaaacgttttttactccaggtgaaacattttagtctcctaccagcagtgtacaagatttccaatttctctacattctcatcaacgctttttttttctttattaaaaatattaatatagcctttgtaggaggagtggctttccaccttattgtagttttgatttgcatttttcttatgatgaatgatgttgagcatcttttcctgtgctcattggtgctttgttcatctactttttatttatttatttagaaatggagtttcgctcttgttccccaggctggagtgcaatggcgtgatctcggctcactgcaagctccacctcccaggttcaagcgattctcttgcctcagccccctgagtagctgggattacaggcacatgccatcactcctggccaattttcatatttttagtagagacggcttcaccatgttggccaggctggtctcaaactcccgacctctggtgatccacctgcctcagcctcccaaagtgctgggattataggcatgagccacctcaccaaggctgtgttcatctactttaaagaaatgtccatcaatgttgtttgcccactttttaactgggatgtttgcctttttgttgagttgtaagagtattatatatattttgtatactagagccttatcggatatattatttgaaaatattttctctccttctgtagattgctttttcgctttcttggtaatgtccttttatgcaccaaagggttttaattttgatgaagtccagtttatctgttttgttgttgttgttgttgttgttgctcctcgtgcgtttgttctcgtatctaagaattcattgccaatgctaaattaatgaatattcgttcatgattttaaaaagagttttgattttagctctccctatgtttaactctttggttcactttgagttaatttttgcgtatggtgtgaaataggagcctaacttcattcttttgcatgtggatatctggttatcccagcaccatttgttgaagagactatttatcccccattgactggtctcagcaccttttgtccaaaatcaagtgcccctagatatatatattttatactcttaattctattccattgatctacatgtatgccattatgcctataacacattgttttgattattgtagctttattgtaagtgttgaaatcaggacatgagtcctccaatttgttcttattctaggttctttcggctactcagagacccttgtaattccataagaatttgaggattggcttttctatttctgtaaaaaagcttgttggaattttaataggctaacactgaatctagtgtgagtagtagtggcatcttaatatattaagtttcaaatctatgaacacggatatgattccatttatttaggtcttacattttagcaatgttttgtaattttcagtacacaagtctttcatctccttggctaaacttattcctagttatttttttcttttggatgatgttataaatgtagttttttcaattatttttgtttattgctagtgtgaggaacataatcaatttttgtgtgtcaatcatgtgcccggcaaatttgctgaatttttaaatagctctagtaattttttgtgaattctttgagattttgctacatattggttcatatcatctgataatagagatagttatgcttcttcttttccaaacttgagggcttttatttcctactattgctgaattgctctaactagacttttcagtacaacattcagcagaagtgttaaaagtgagcattgttgttttatcctgatcttagggtgaaaactttcaaacttccaccattgagttagttatgttagctgtgggtttaaaaaaaatgtcctttattatattgaagtagtttccatctaatcttagtttctgagtattatttaatttatttatttaattaatttatttatttttgagacagaagtctcgcactgtcgcccaggcttgagtgcagtggcgccatcttggctcaccgcaacctctgcctcacgggttcaagcgattctcttgcctcagcctcccaagtagctgggattacaggcacccaccaccatacccagctaatatttgtatttttagtagaggtggggtttcatcttgttggccaggctggtctcaaactcctgacctcaggtgatctgcctgtcttggcctcccaaagtgctgagattacaggtgtgagccactgcgcccggccattgagtattattttaatgaaagagtgattttgacaagtgcttttcctcaatcagttgaaatgattatgtgtttcttcccttcattttattagtaatatatattaataaaacatatttcattgattttcttacattgaaccaatcttgcatttgtatagtaaatcccacatggtcattgcatataatctttttaatacgttgttggatttagtttgttaaggtgttttgtttttgtttttctgtttgtttgattgtttttggtttctatccgtaagggatattggtatgcagttttcttttcttgcagtttcttccctttggtgttaggaaatacatatctcattgaatgaattagataatgttccttcctcttttatatttcagaagagtctaagaagttttgatgttaattgtttaaatatttggtagaattcaccagtgaagccctctgttcttgaccttttcaatgttggcagatttttaaattattgattctatctctttacttcttatacatctgttaagattttaaaaatatattattcagtcacctttggtaatttgtgtgcctaggaatttgttcactttatctaagctatctaatttgttcatgtgcaattgttcatatcattttcttataatactcttatttctaaaagtttggaagtaatgtctatactttgattttagttattctattttctctttttttccccttgttgtacagctaaagggttgccaattatttgtcttttaaagaagcaaattttgatttcattggttttccttattttcctatatgttctgtcatttatctgtgctctaatctttataacttcctttcttctgctagctttgggtttagtgtgcacttttttcatagttccttaaattataaatatggcgtatttatttgagtttcttctctatttttaaatatagttgtttatggctacaactttccttatgaacataatttagtatgtgtgcttttgttttcatttgtcttttaggtattttctaatttcccttgtgatttcttcattgactcattggttgttaaagtctttttaaatttctacatatttggcagttttctagtttatcttttattaatttctaactttattccattgtggtttgagaagatattctgtataatatcagttgttttagaatttatgaaaatttgctttttggcattacatactatctatactggagaatgttccttgtgcacttgaaaagaatgtgtattctgtggatgctggtggaatattctatatattcaatttatagtgtttatccagtccctgattttcttattgatctcctgttagatgtactaattattattgaaagtagtatattgaagtctccaactattattgtagaactatctttttctcaaatctgtgcatgtttgcttcatatttcttgggcctttgttgtttagcacatatatttttataattgttatatgtgcttagatgaatttacctctttttaaatatatcgtatttttctttgtctctctggtaatagtttttttacataagtctaattcgtttgatgttaatgtaactatctcaggtctttcttttggtgctatttgcatggaatatcttttcccatcatttcacttcaagctatgtgtgtctttgcatataaagtgactcttctatggacagtatataggttggatcatgcttttttaaaaagcatattctgcctatctttgtgttttaattggagagtttcatccatttcatttaaagtaatttttgatgagtaaggaattaattctgccactttataacttgttttctgtatgtattacagattgaatattccttatccaaaatgtttgaaaccataagtgttttggattttggatttttgggggggattttaaagtatttgcatgtgcataatgagatatcttggagatgggacccaagtctaaacataaaatttttgtttcatacacaccttacacacataacctgaaagtatttttatacaatatttttcataattttgtgcatgaaacaaaagttgtatacattgaaccatcagaaaacaaagctgtcactatcttagccatccatgtagataatctgtggttgttttaatcaccatcatttgtgactctgaatttgtaggctactgataagcaatcattttattacatttattcacacataattacttaacagtaaaaaaatgacatgccattaatacattgaaaaaataatgtatttagagaaactaagcagcatcctagtagcaccagtatgacctgcatcaactgttacacaatagcaacagcaaacgatgacaggttttcaatctccacctacaatgctgtgttttgattaaaaggtttctgtacactgtattcctttttagatgaaaagaataatcagaagcagttgagggaataggaagtgagtcctctaggaatgaggaggcattctactgaatggtttttaaaaatatgtcttctagagtcatctgcctcattaacaattttttttttttatcttagaagtcaccttttggttttataaactaacatgattttttgttctgtcatgaatgcatgctgctcttgttctgcaataaacccattacatattttcatcatgttgtctataggcactttttctgcagtataagcaacacgagtttcattgccactattgcaagttaagtgtaccttatccaaaatgattgggaccagagatagggaattttccactggtggcatcatatccatgcccaaaacttgtggattgttgatcattgcagattttagatttttaggtcaagaatactcaaactgtatatatttttcctcttttttcttcaattactgttttcttttgtacttaatattttgtagtgtactcttgattctcttctcatttgtattgtgtgtattttcaggtattttattagtggttaacattgggcttacaattaacatctataacatttatataaaactaacttgcattaatacaatttagctgcagtggcgtacaaaaattcagctcctaagtgttgggaaaaccagccccacaccacccagcgggtaccccgagtccagcagagacaaaggtattagaaagacacaggataagggtttaaaaggcgggtccaggggaccagagcgttggaggcttgctcaccacttggagcctccacccaatttattggtttacaagctctttgttcttagggcagatgggagaggtaggaagggatgaggaaaaggattaatcagtgaaggagaactggtgagtcattcaataagatacatagcagtggtggtttctgtgaatttcctcaagcaaaggcatgtgtctaaactgcttaagatctttaacagtctttaacagaaatggatgggagtgggtttcaggaggggccaagatgtttgattatactccactgcttcaagggagtgttatttccccgagcaacctgtggcatgctgctgagctattatgctctaggggcataaagacatgaaggcaataaagagacttttctcctcagaggccacccatggcttcccatgggtgtctcacacaggggagaccaactcatctggcaccccagaaattctttttcccacactacgtagctgtttcttttatgttatttaaaaaattatatctcaatacatttcacacctattaatatagatttccaatttcttaaatatatttgtctttccaataatgcaggaaaattaaaagaagactcataaactaaaaatgcaataatactagattttaaatttagctatgtagttacctttattttagcagagttatttatttctttatatggctccaagttcctttctagtatcctttcattttagcctaaagtactccttttaacatttttttttcctgttttcactttttaacgtctttgaaattgcaatgtgttttccatgtcagctccttagctttggcatgtaactagagcagaatttgacctttcaccttttaaaaaataaaaaatgtatatatttaaggtatacagtatgatgacatcgtaaaaggattactacatcaaactaattaacatagccatagttatggtagcttttttgtgtgtgagtgtggtaagaacacttaagatcatccctcagcatattttacgtatagaatgtcattaattataatcactatgctgtaaaattgatgtctagaacttacttatcctatataactgaaacttttgtaccatttgaccaatgtctctccatttcttgtatcctccaacccttgttaaataccgttctactctctgcttctatgagtttgactattttatattccacacatgaataagattatgcaacattttctctgcatctggacatattttacttaccataatgtcctataggttcatctatgttattgcaaatggaagtgtttcctgccttttaaagcctgaatactactttactgcatatatacagatggttcacaacttttgacttacagttctttgactttgttttgggtatactgaggcattaaatacatttttgacataatattttctacttacaatggtttcttcaggacataatcacatcataaattgaggagcatctgtataccatatattttttatccattcaaccattgatgaaaaattacgttatttccataacctggccattgtgaataaggttacaatgaatgtgaaattgttgatatctctttgacacatttatttttttcctttggatatatacacagaagtgggattgctggattatatatggtagttttattttttattttttgaggagcctctatactgttttccattatagttgtgccaatttacattctcaccaacagtataggagggtttatttttctccattaacacttatcatcttttgactttctgatagccttcccagcaggtgtgatgtgatgtctcattgtggttttgattcacatttctctgatggcaaatgatgttgtgcaccttttcatatacttattggtcatttgtatgtcttctttggaaaatgtatattcatattctttgcctattttaaaatcagattgttttcttgctattattttatgagttactactgtattttggatattgatcctctatcggaagcaaggtttgcaaatatttttttttctcattctttaagttgccttttcactctgttgactttttcctttgctaggcaaaaagctttttagtttcaggtagtcccacttgtttacttttgctttctttgcttatactgtggatgtcatatcaaaaaatcactgctgagaccaatgtcaaagagctttctccaaacaaccacctggcaacccagaaataaattcaacttgctcaaggaaaattatctttttaatgcgttgttgcatttgttttgctagtatgtcattgaagacttttgcatctatgttcccaactgcaaaaagagaggctagagctgatcctgggatcctctcaggacctgctgtgagatgaaggccagcaaacctatcttgttggttttgacaagccatgtctctcagcaggcctctgcgctggcaggttatgtccccgacttcagtaagagagactagagctgagactgggaccctttgggatctgctgtcaaacaaaggctagtgagactgtctgttggctcaaataagcacatatcttctagtaagtctctgcacaggcagttctctgagtgtagcaggagaagctgaacctgagactgagtcctttcagtatctgctgtggcacagaggctggcaagcccatcacagagtcttagactactgggctatgaattatgggcaagtttccctctggtacctcatgtgaatagttctaaactgggacctcagttgaagggggctggagtcactccacatggcaattttcaggttcactgctgagaaatgatgtcagtgagcagatgagccgctatgccaagacactagtgtgagaaaatcttcctggaccttttggcagatggttgagcttgcaggctgaagacaaaattaggtggtagccaagcctttcagggaatggggccatttctggacttgaagctgggagtgtgattagcatgtttactaactgtgtgtctgtctacacacttaaaatgaccttcctagatcctgggctccaccaaatttccaatcttgtacctaaattctgaggatcccacaaagagactttagtctgttggtgggtgcagaattcttgttttggaaggatataagcaggtgccctattcagccatcttcctgatgtctaagctccttttccttttgaaggacagatttcccatgctggcaggttttttgttttgttttgttttgttttccaggactctgagtatattatcctactcccttcaggccaagaaggtttctgctgaaaaatttcttgactgtctttattaagcttctcttgtatgtaaatcactcttcacttattgctttctattttttttttctttttaacttgtgacaatttgatgtgtctcagtatgggttcttttgtatttgtattatttggtatcctttaggattcctggatctgaatgttcattctgttccccaagtttgggaaacttttagccattaattttcaagtaagccttctgtccctttctcttttctccttctggaatttccataatgcttacattgccatctcgtaagtcctttaagctatcttcactctttttcattctgtttttttttttctcttttgactggatggatgatttctgatgacctatctttaagttaactgatcctttctcctgcttgatcgagtctgctcttgaaccacttatagtttttagttcagtgatttcattcttcagttttgtgatttctgtttggtactttttaatattttccatggctttattgaaatattcactttgttcctgcattgctttcctgaactcagcgagcatttttatgaccattattttttgttatctataggacaaatcatgtatcttcatttcatcagggtcagcttctggagattatcttttttcttttacatgaaacatattcatatgttttcttcacttttcttgactaactaactctgttagtttctacacattatattttaaaaatcacctcgcccggtcttcacatattggtttatataagacaggaacctcatcaaacagcctggccagagattctagatgcctcccacctttgagcttatcctaaccaccatctgcaatcttacttgtcctcaagagactaaagtatgacaagtcccattaacgcctcaagacatgtgaaagagaaaccagtccattgagtaacagccagaaaacttgaggtgctacatgtgtggtccagctccttctctcctcggggaaaaagctgggacctagattttatcacccacttcctctgcactgagctgaggagagaagctgtgggaaatacatgcacatgtgtttagaatgctcttgaaatcatctctttgctctttttgcacctagaggcctaatgaattccaagccctgtcagctctcagaacagctgttacaaaagccagttccccaagtaacagtcagaaaagttgggggcaggaggcagatgtataatccaacatcttaggagaagttgaaggcttgattttatcactggagtgagctggggagattttatcactagagtgagcagtggcaagtgcctacatgcttgttcagactattagttgggtagcgactgtctggtccattaactctcaggcacaagtgagttagaagccagactcttggacagcagctggaaaagatgcaatattagatgtgtagccaaaccccttccagggaaaagcttagagcttgcttttttttttttttctcctggagcaaaccaagaggaagagccccaggaggagctcacatgactgctcaaaactgccgctttgttctctgtagactctgggggactagtgagtgctggatctcaacagctccaagagacaagcaagttaaaagctggaccctcaaacagtagcacgaaaaatcagactctacattagtgtagttgaattcttttcaaggagaaactggaagtgtttattttgtttttatttatttagtttcttcaggagcaggctgaggaagggctttgcaaaatgctcacccacccattttaggcagacctttaggcagtagctgaaaaagctgagaattggatcctcagtctaatccctttcatggagaatctaggagcttggctttattgcttgctcattctgtgcttgcctagggggaaaagctgtggcaggtactcatgtgcctgtttaaaactgtctttttattctctatggttccagggaactagtaaatgctgggtcctatcaactcatagagataggggagttagaatccagtcccataagtagcagccataaaagttggggtgctagataagtggttcaagcccttcatttttcagggagaagctgggagttcagttacttcccaattatgtggctttgctgagggtgaggtttatgatcagcttttcctgcctgtttcaatatgggtattttctcagttgcctgttgtgcaggcatctctcaactagattctgaattcttgcacaggaaattgaactacgtgtagctctgtatttggtgcattcatgggtaatggaagagtctgtagcttcatattctggcacatgattggcatcactctctccctttaacatttcttctagggcagatctactattaatgaacttgtttcattaataaacttagcctttgtctatttgggatgttttaatttctcaattcttgtggggtagttttgccagatatgcaattcctgtttgcagatttttaaattttagcactttaaaatagttatgccactctattccagtcttcacgtgttctgatgaaaaatctgctgttcatctcattgagatcctttatacatggtgaattgctgcttctttactgcttttaggatctcctctttctttctggctattgacaatttgattataatgtaggttggatggatctttttgtgtttgttcccttgagatttgttgggtttcttgaatgtgtatactttatcaaattttagaagttttcaactataatgtattcaaatattctcacttccctgttcgtctcctttctttctgggatttccgttatatgagtggttgtctgctcggtggcatctcacaggtttcttagtgtctgttcattcttcttcatatttgggctttcagctcttcagactgaataatttcagttaactggccttaaagttcatgtattctttcttctgcctgctcaaatctgctgttcaaacctgctattctttcttctgatattcaaatctgctattcaaaataatgagttctctttgtcagttgatgtacttcttttttaagagatggagtttcacagagttgcccaggttagagtgtagtggcattatcttagctcactgtagcctcaaactcctgggctgaagcaattatcctgcctcagcttcctgagtagctggtacaacaggcatgagctaccatgcctagataacttgtttagagatggtttctcactatgtttcctatgctggtcttgaactcctggcctcaagagttcattccaccacagcctaccatgtgctctttaattatagaatttctttttaagttctttttataatttctctttattgatattttctagttttcctgtagttttactcgtggttgcctttacctcttttagtatatttgagaattttgctttaaaatctttgtctaaaatgttcaatgttcttcaggcagctctgttaactcctgtgaatgagccatattcttttgtttcttcacaggcttcaaaattatttctttgaaatgtggatatattgaatattataatatggtaactctggaaatcagattatttcctttcttcaaggttttcttttgttgcttgctatggcttgtagctgtttgttatagtgcagcttcagagttggttagaaatttcagcataaaagtcaaaagcaggaatgatcagtcacatgttgttcattattagctaaacaaaggaggagaaagaaaaaacaaagcaacaaagccagcatttattaaaagcacagattgtccttatatcttaaaaacatttttcatttggtgctgtctttatataggaggcatttagtgatagcatagacaatgttctcctcaaaactcctatgaagacattttttaaaatgcctctcttacaagccagttggtaatactaaaatgcaattcactctaaagataaatataggggctgtggtattttgtgaaattaatttaaaagaaatgtaatatatttttctatatataataattaaagatattattaggcctcacataaaatatttgtagtggataatgagttaacaaatctttcaaaattcaaactatgatttgaaattcaattgtgcatttttctatatgttgcatatccaacagtgaatttttgaactagttaagaagatgtctctaggtagtttaagagagatctgaggataactaaaaaattggggaggaaattacacttttcaaatctttgtttagaaaaataaattagaacctgtctttaaactactgttcaacatgacaatccatgaatgaaaagaaagaaagcatattcaaagtaaaaatgaaggacttgtttacgtaaaaaaagaaaaaacacaattcattggaagttactatgtatttttgcaggtgttgatcaaaaagacttgtttatttcatatttgtaaaatatacacacattctataatttctttagaaaattagatattttttggatgaatatatttcgaaaatatatttgatcgggaaacaaatttggaatgaaacatgaagaagatatagaatgtaaactccatgaaaacagatacattacttttcccatgcactgctcatatccccaaaatgttttgcatttagatttatagacatgtgttgaaagaaagacagatagaaacacccgccttcctttttttgagagttcacaacttagtatgagcccaggacaaaacaagataatctgtaaaatacttctttagaatatctaatgtaaataaagcggttgaggtactttatttttcatttttactgccttacattgagattacatatcagaatttaagaatacagaaaatttttattatctactctgattgaaatagaaagtgggaaagagcatttgtaagattttaaatgtttttatagtctgataattttataaaatttaatattactaacatgactatcaacataaaaataatgtgttatttctttcttttgaaagtatgtgcaggtttttctacatttaaattatttgtttattttagccactcattttaaattttctatgttggacttcaaatatctagaaatctaattgttaaaaaattttcatgcatattttaaaacatttctgcatctaaaaacagattgcaagagatcagatcaagatgacttactagatgcaggtagaatgtgcctcctccacggagaagaatgcgaatagtaagtagatgctcacattttgaagagattgtctaggagagaataatatgatacaccagagaagtgatgggaagcaccagaagtaaggagaggatttgtggcagtttgcctggccagagactggctgacagtcaggcgatcctcctggatgtggggaaacagtaagagagaaactcccagagctccacattttgaaatgggcttttatgatcttcgctataggagacaccctagactcactgggggctcaggcttgatatatggagatacctaaagattgcacagagatgttgctgcaaaaagagaacccatatggaatcccacagtcatttgatcctagagcagcttgagctgagtgctattttgaaagcctagataccagggatctacagacatggcggctgctgctacactgctccaaggagggagaagggagacatggcactcctctgcaatcctgggagggtccttactgccctactatggactgcttttgagactgaaatgtgagtgggctgctctcccgacagcttcttgcccacactgcttgcctgggaaggacaagcaaggcgccattttgagagtttaattatgagttgagtttgggctgaaggggctgcagtcactgatcagccaaggtaggacagggaaaccatgctctcttacacatatctagggcagtactcactgccccacagtggtctgctgtgagactgagatatgagtagaaagcaccacccacggcttcttgcctatgctgtttgcctggaaggggccctatcttatctggtcccaggaccaaagtgcaatattgggaatttaatgctaggttgttcccttccctcaggctaagtttgaaatgacacagttgcagctcccacccagctgtgagagggacatggagaccaagctctcctcagcacacttaggacaataccagcagccctgggactggagctgtgggactggagagtagcccgcccaagacatcacagataccagcaaaaccaacatggactgcttgggtctcagtgggttgctccaccactgctactgccatcacccacaacacactagctgctcagggacttgagaattcacccacacacccagcccaccactcccactgctagcttccaaacatgccatctggtgacccaagaattagacctctaggacccactaacacttgaaacagtgtaagctgctctgaggtctaaaaacaggcacactcagccaaatgctgccaccattggagccttaagactacttcatttggcatccaagtcctcagaaaaacttcaccactacctcaactaataaatataccctaagccactgagaaaatcacagacactactgacctatgtgtattgctaaagaagccatacaaagattatgctaccacaggcacccaaaatcaaagccaacagatcctacttaaccaacaacatacatacatcttcaggagaaaaaattttcccctacaaagcaatatcaaaaaataggaacaaatgactgctacaccagatgtgcagatgtcaacacaaggacacaggaaatgtgtaaaagcagggaagtgtggcaccaccaaaggaccacaacaatggtccagcaactgattctaataaaaaataatttattgaaacaccatatcaagaagtcaaagtattgatctttaaagacgctcaatgtgatataagaaaaatctgaaaaccaatacaaagaaatcagaaaatcaattcaggatatgaatgaaaagtttaccaaggagataagaaagctttaaaaattatgggactaaaatatcactgaaggaattgcaaaatacatttgaaagcttcaatgatggactagatcaagcagaaaacaaaatttcataacttgaagatgtgtccttttaaataatccgtcagataaaaataaggaaaaaaggataaaatagaatgaatgaagccttcaagacaccagaaaccacataaagtgactggacttaggaattattggtattcccggcagcaagagagattaaaaagtttagaaaagctatttaagggaataatcaataatatcttcccaactctagcaagagatttagacattcagatataggagacccggtgacccccaggcaaagacattgcaaaaatgacttcaccaaacatattatagtcagaatgtcaaaagttaaagtgaaagaagtaatattaaaattagcaagagaaaagtatctagtcacctatacaggaaatcccattagactaacagtaaacttttcagcagaaaccttacaggtgattagagaatgggatggcatattcaaagtgctgaaagaaaaacactaaaggaaatacagtgtttttctgtatatttctctataaacataccctgcctgaagctgcaaaaatgaagaagaaataaagtcttctcatacaagtaaatgctgacagaatttgtaaccactagactgaacctacaggaaatgttcaaaaggatcttaaacatgtaaatgaaaggtcaaaattcaccatcacaaaaacatgtgaaaatataaaactcgcaggttttataaaacaatctcacaaaagaggaagaaaaatgaatcaaatggcaacatgacagaatctcatcaaatcataaataccaaaataaaacaaagagaaaaggaaggaaacaaagaaatgataaaacaccttgaaaacaataatatgacagtaacaaaggctcatatatcaatattaaccttgtatgtcaatggtttaatgctacacttgaaagatactcataaagacacatatagactggacataaagaaaaggatcttccacacaaatggaaaccaaaagcaagcaggagtagcaatatttatgtcagctaaaacagacttttaaaatcaaacacagttaaaaaaaaggtgattatgtaatgataaagggatcaatttattaaaaggatacaacaactctaaatatatatgcacccaacactggagtccccagattcacaaaacaaataatactagactttaaaaaagagatagacagcaatacaataataggtagggactccaacaccctacccatagcactagacagatcattgagaaagagatttaacataaacattggatttaaattggattttagatagaatggacttaaacatttacagaacagtctatgcaccaactatagaatattcatcgttttcgttagcacgtggaacattctccaaaatagactagagtttaggccacaaaaaatttttaaaaatttgtaaaaattgaaatcacatcaagtgatttcaccttccagaccacagtggattaaaactagatgtcagttctaagtggaaacttattaactatacaaatacatggaaattaaacatcatgctcttgaatgataactgggtcaactaagaaattaagacagaaattttttaaaaattttggaacaaatgaaaatgaaaacacaacatactaaaacctagtgctaagtttatagcaataaatgcatacatcaataaagtagaaaaatcacaaaatagcaagctaatgttgcacctcaattaactggaaaaaacaagaacgaaccaaatccaaagttagctaaggaaaataaatgacaaacgtcagaggagaattaaagagaggcacccccaaaatagaaatgatcaacaaaataagaagttggttctttgaaaagagaagcaaaaataataaaccactagctagactaaccaagaagagagaagatgtaaataaacagcaatgaaaaaggagatattacaactgataccatagaaattaaaaatatcatgagagactgctatgaacatctgtatgctcacaaactagaaaagatagaggaaataaattcctggaaaactgcaagctcctgagattgaaccaagaagaacccctgagcagatcaataatgagtagtgggattgaataagtaataaaaaaaaatcctccccttaacccctaaaaaacgccaggaccagttggatgcacagccaaattctaccaaacatacaaaaatgaaccaataccagtaatcctgaaaccattccaaaaaattaaggagggagttctccctaactcattttatgaagcaagtatcaccctgatatgaaacccaaacaaagatataacaaaataagaaaatcatagaccaatatctccgatgaacataggcacaaaagtcctcaacaatgtgctagtaacttgaatccaataacacaatgaaaagatactgtaccataatcaggtgggatttatcttagagatgcaaggatgattcaatatatataaattaataaatttgatacatcacatgaacagaaacatgttaatctgttcaaaatcacatgaaaaaaactatatgatcatctgaatagatgcagaaaaagcatttgataaaattcagtatcttttcataataaaaatcttcaaattagggacagaagaaacataactcaacataaaggccatatatgacaaacccacagccaacatcatactaagtggggaaaaggtgaaagcattccctgtcagaattgaaacatgacaagaatgcccacttttatcagtcttgtgcaagatagtactggaaattctcaccagggcaattgggcaagagaaaaaaaataaaaatatcaaaattggaaaagggaaagtcaaattatctctgttcacttatggtgtgatcttatatctagaaaaacctaaagactccaccaaaaaaaatcttagatgtgataagtgaatacagtaagatttcaggatagaaaagtcaatgtatagaaatcaggaacatttctatatactaataatgatctagccaaggaccaaatcaagaaggcaatctcatttacaatattaaaaaattaccttgtaatatatataactaaagatataaaagatctctacaaagacaactacaaaaccctgaagaaagaaagagtagatgacacaaagaagtggaataacatcccgtggtcatggattggaagaattaatattgttaaaataaccatattgctcaaagcaatctacaggttcaatgtaatctttatcaaactaccaatgtcatttttcacagatttagaaaaaacaattctaaaatacatttggaaccaataaaaagcccaaatagccaaacaaccctaatcaaaatgaacaaagctagaagcattacattgtctgacttcagataatactaaaatgccatagtaactgaaagaacatgttactggtataaaaatagacacatatatcaatggaatagaatagagaactaagttcaggaccagcctggcgaacatgaacatggtctctactaaaaatacaaaaatgtacctggcgtggtggtgcatgcctgtaatcccagctactcaggaggctgaggtaggagaatcacttgaacccagaaggcagcggttgcagtgagccgagatcacgccactgcactccagcctgggccacgagagcgaaactccatctcaaaagaaagaaaagaaaagagaactcagaaatacagccatataatcaaaggctactgatttttgccaaacttggaaatactatatactgaggaaaggatacagttttcaataaatggtgctgggaaaaatggactgccgtatgcaggagaatgaaactggatccatatatctcatcatatataaaaatcaactcaagatggattacagacttgaatatgagacctgaaaccgtaaacatattagaaaaaacctggggaatactcttctagacactggtctaggcaaagaattcacgaataagacttcaaaagcacaggaaacaaaaacaaaaaatagacaaatgggatttaaacaaaaaagcttctgcacagcaaaagaaataacaaaggagtgaaacaacaacttgcagaatgggagaaaatatttgtaaagtatacattcaacaggggactcatatccaggatttacgaagaacccaaacaactcaacaaaaaacaaccccaaataatcccattgaaaagtaggctgacatgaataaacatttctcaaaagaagacaaacaaatggccaagaagtctatgaaaaaacattgaacatcattaatcaccagggaaatgtgaactaaaaccacaatgagatatcatcctataccaatcggaattagtattattaaaaagacaaaaaattaacagatgttggaagggatgtagagaaaagggagatcttatatactgttggtgggaatgtaaattagtacgacctctatggaaaacagtttggagatttctcaaagaaatagaactactagaggatgcagcagtcccactactgagtatctacccagtagatactcaaggaaaagaaataattacatcaaaaagatacctgcactcatatgtttattgcagcaccattcacaatagcaaagataggcaatcaagctaagtgtcttatcaatggaggaatggataaagaaaaggtggcatatgtacataatggagtactcttcaggcataaaaaaagaatgaaaccatgtcttttgcagcaacatgaatggaactgaaggacattgtcttaagtgaaataactcagacacagcaagtcaaatactgcatgttcttttttaagtgggagctaaataatgtgtatacatggaagcagagtatggaatgatggacaatggtgacttggaagggtaaatcatgggagcttgctccgggggtacaatgtgcattgcttcagtgatgaatacattgaatgccctgagttcaccacaatgcaatatatcaatatagaaaaattgcacttgtaccccatgaatatatacaaatattttgaaaataaaaataaaaacagattgtagattgcttatactctatcttggaattgtaaaaactgatcatgatgataataatggtaatggaaatctaatattttataaattgactgaaaacaaagcatgaatcttgtgtgattcatgggagggtttaaaaattgagacaaaattaaatgtaactttttaaaatgttgacattggcttcaacattgatatttttggggcccttgaattcattgtttctgaaactgacaaaatgaattttcaacttcatgaagacaacatgaatcttgaatttcagtcttattcttaaaaattctttcacctatgttacctatctcttgatgtaaatgtttgaaaattaggtggtaggttttcagagcaaattttctcactgttttgattagaaaacttaaaggaaatcaatttaatatacaattaaatccattttacttaagatcttaaatatattttaaataatctttgttcctatttagatgggctttttaaaatttgttttattttggttagttgtggggcttggtcctgatgtttattttagtttatgcttcctaaatgatactacttgatattattatattctgcaagggcaaattggcaacataatgctttttatattaccaagcactttgtgtacaattctgtttaagatcagcatgtttccctatattacttgaagaaaaataatttcatttccagcagattaatatgaattaactatagctgaaatatgtaattttgtaagctttagagaaaaaaaacttttctttaagtagcaatattattaatactatgcacctgtgtgttaaataatgaagtgtatctcaatcgaacttattgtcagttaagattcacctattcttacataatagctttctaaattgatatctatggttttatagtttagagctggtaggtctgaattaaatttttataagaaatcacaactgtgataaagcattatcatttcagtaactaacagcctgggtatcattcccaagcgtaaaatcagcaaaacaaattagaataaaagccacatgtgaggtatccattatgcattgacatttagaatctcttccttatttgtattcagaatactatattatacaatgcaatatttatctgtgatattttctgtcctcatatgatggatgtgtagtacgaaagctaaggaacttctccatcaacaaggaacttttcccctctgtagtataacatgtttgataaatgcttaccctctttatgcatcctcctcttctgcaaattagttttcagtgctttgcattcttgtttttttctcccagcaaatgtcatactacacttccaggaaggcctcatctccaaaatcacatataaattcccacatctcagacattcacaaattattcccagatatgcagactataaacaggagaccttgatagtagcttaagacattccacaattcatactttgattaactgacttctccactgaattttatattacattaaatatcctaaggtaatcatcttaatcttacattttaccagttacaaaaacctgaatttttaaaaatttgaagtgctaataatttagtagcaaacggaaaaatctaaaaatagataaaaagtcaatatttaatggcatggtgaggtatacacttttagattagctgtattgtagtgaagctttttcacatgtgttggcacaaaatttttctagggttgttattaaaattttgtttgttttatgatgatctattttgacaagagttctgttactttgctaaatatggtcttgcattttctaatcatttcatatttatatttaatgaaccttataaataggcattgatggttaaataattcattccaggctgggcacggtggctcatgcttgtaatcctagcacagcactttgggaggctgaggcgggtggatcatgaggacaggagatcgagaccatcctggctaacaagatgaaactctgtctctactaaaagtataaaaaattagccgggcatggtggcgggcacctgtagtcccagctacttgggaggctggggaaggagaatggtgagaactggggaggcggagcttgcaatgagccgagatcctgccactgccctccagcctgggtgacagagcaagacttcatctcaaaaaaaaaaaaaaaaaaaaaaaaaaaaagcatttcaaatgtctaaaccaatccaaaatacgtttcaaaaattagaacgctttgttatccatttaaagtaggaaatctgactatttcaagtgtggcttcttattatgggaactttctgtgtctaatttaagttcttatttttaatgcatatacaaattataggatttaaagtatacaatggagagaagacataatgaaaaaatatttaactaggtacatactgtttattcttatttttgttactaacaagctgtgtaattatgtgaagctcacttaatgttaactataaataaggaagttgtactatatgaaattaaaatttgtccccaatagtagccttctcttatatattttatcaaaggctaagaaaagcagcaatagtttttagctctgttgcccactatatttagtagctggacattttatgaaggttcaggcaagtccataatcacataacaacaaaaaagccaatcatctctactgttacctttagaactcatcagttcttcccttcccgtgtcatcttcaagatggagtaatttcaagtgagttaaaaggtaaacgaactgaatgtgtgttgtaatgggataccaaagatcgagtctaactaaatttttgacagagattgagaaaagtgacccagcgttttcacctagtgaactaggatccatcccttcaccatagtgaggattcactgttttctaaattgatgggcaacaaagaaaataagacatttgagaaaaaagtaaagcttttgttcttcatcttgaatctcctttacttaagaatggctaaatttgtcatgattttctgaaagaaactccaatatggccgattttgaaataaaaggctaaaaactgaggaagggttaaatagaagtgtttttgcctttttagttaataaaatattgcatgaaaatgcaaacaggaaatgcaatatctgaaattaatggctagttcccaattaggtaatatcattttgagatagactgaacattgaagctattttgaggattacaaaaaacaatagacgtattttattccttaaactgaagggaacttcagaagaaattggtgaacatttatacatgaaagcttagttattgtgtttatttcaactatgtaactaaagatttcagatcacaagaatgagttgtgtttttgtataagtcatatacctcccaccagttgtccaaaagggaagattcagatgttgataaacacaagtaacctcttgcacttgtaatgttgaaaaattatttctgtatctctaaccatcttggaaaattgaggaccatcaaaatgaccaaataatctgtaattttgagatatatctgtagagtagatttgttgcagcagtgtgaaaaacacaaagaaataagagcagaaaaataagaaccagttgttttatattcatcaacttaaaataatgattatttaaatttgttaagattaacaagagggctaactagtatatatttttaaaattagaacttgttggccgggtgcggtggcgcatgcctgtaatcctggcactttgggaggctgaggtgggcgggtcacaaggtcaggagatcaagaccatcctggctaacacggtgaaaccccgtctctactaaaaataccaaaaaattagctgggcgtagtggcgggtgcctgtagtcccagctactcaggaggctgaggcaggagaatggtgtgaacccgggaggcggatcttgcaggtagccgagattgtgccactgcactccagcctgggccactgcactccagcccgggcaacagagcgagactctgtctcaaaaaaaaaaaaaaagcaacaaaaacaaaccaaaacaaaaattagaacatgttttttctttactggtttatattacatgggtttacatatgaagctataaaaggtaaatgtaagcatgctttcttaaagattgatcatgtgctgttttctttcagtgaatggaagtgtttgacaaaaaaaaaaaaaaacacttctaagctagcctttagaatatattattagaacatgtttcattctttatgggactctaacattccaagtagcaaaattcagcaataaaaataaatgcaagcatgctttctttcttaagatgcatgataaagccggatgcagtggctcaagcactttgggaggccgaagtgggaggatcacttgaggcttggaatacaagacagcctgggaaacacatagataccctagctctacaaacaaacaaacaaacaaacaaacaaaaaagatgcatcataattttttttctttcagtgaatggaagagtttcacagagaagcaactttgtaagcaaactgaaaatctattagaacatgtttctttctccattggttcatattacatgggtttacatatgcagctataaaaagcaactataagcctgctttctaaaagattcatcataagctgttttctctcagtgaattgcaagtgtttggcaaagaaacagctttctaagctgagctttagaatactttattagaacatgtttctttctgtagtgggccctattagtccaagtaactacaaatttttaagtaactggaaattgtgttcatttttatttttatactcggaagcatacatataattacaaagtttagttattttatttgaagttagaacatataatacgtttacttaaactcttagaaattttcagattcaaatttcacattttcacattctgtgctataatttaggagcacgaaaatgctatgataaaaggtgctatctggaaatatcaaagtagatattactatattttattttgaagtactttgggatatagaatttataaagtaaaacatctacctttcagctgccagattgaaagatgcatgtgtataaatctatgttatgtgccttctatatgttacttagataagtggaagaagctgacttgtcacttcttggattctgattccttactccagttcctttatattaattgacaaataataattgtacatatttatggggtacaatgagatgttttcacaaatatatatatgtgtgtgtgtgtgtgttatgatttaataattccactgtgtgtgcatgatctgatcattccactacgtgtgtgtgcgtgatttaattattccactgtgtatgtgatttaatcattcaactgtgtgtgtgtttgcgtgtgtgtgtgtgtgtgtgtgtgttatttcctccaggttatatcttcattctattatttcctttgctatgccttgcccagttctttacaaaagtgagtagagaaatcctcttcccatgacactgatatttttctaggatattttcaaatgtaattgatcgaggtatgaaatcttcacaggaatgctgattataacatacagaagagtacttgcccttgagtttgtatcaagataaggactgaatgctggatgagatagaagtatgatatggaggagaaaatcaaaccaaatccataaaaccctagaaatttgattctgtttacttggagcttattataatttgaaaataatttatgctgaacttatctttgtttagaaagtatttatttgtagaataaatatacgttttaacaaattataattggggaaattgtgcaatttgaaaagaatttatgctgaatatatctttgtttagaaaacatatttatagaataactatacattttaacaaaatataattggggaattttttcagcatttaagtagaaaatgtcttaagtatattccaacatttttaatcaccacctacaaaaaagtacatgtaaaataccaaataagtcttgagaagtatctaaaagacttctgatagtgtgatacattcaagtttttgattaaatataaaatattaaatgatatttccttttgaataattatctgttactctaaatatttttgttgtcaaatattcattgaatatttactatggttaagacaacatggtagatctaggttagtaattcctgaaggagttcaatttagtaacgaaaataagagacatttttgaaaaacacaggaacagaatgttctaagtgtcattaagaaatataaacacacaatctccagttccttaaaaatttgtagttacgtggcctaacagccctcaatagagaaagaaatatgttctaataaaatattctaaagctcagcttagaaagttgtttctttgccaaacacttccattcaagataatataatcaagatctattcatttaaatacttgaatgggttttgaagaatggttaagattggacagaaatgggtggtgagacctggtggacaaaaacagacaaagaagtatgtcatatatcagaaaaagaaacaattatagaagatgtacaaagcattttgggttatgactctgagatgctttgacaccagattgtggagggacctacattcactctacataatttgaactttttatgattgggcaataaaaaataaagatatttaagctggagactgaaataatcaatgttgtgatataggaagattaagctgcaggtggtgtatctaataaagcactaatatttttaccaagcttttggaatgaattaataaatgaatgaatgaactattccattaaatacataccaagatgaaacacatcattacgttaagttttttttttttttttaattaatgcaagtgaatgcttttactttttagaagctttctttcttctggtgaggtggatggatttgatcccagtttcagaattattttgtgggcacaaaataccaaattcttttgtgaaccaaaaagaagagtaatacaacttgttaaggaagaatttgcaattttgtctgtgaaaatattgctgaattttgaaagaaatgtcatatgcatattttagaaatctctcttcctgacttggccaaaaatgtagtagtacaaattccagctgatgcaataagcattgtaccatatgccaagtggcaaagttttactgctggtctagccattcgctgctcacacggagtttcctttcttctgcgctgtccatctgctgattacctggtggtcctctcccactgccatgcccatctgctggctacttgcagatgccctcctattgccccatgcacctgttaagaccgttcttcccaaaatgcaatgcatgtcatcattaccaaccaaagtgtaaattaaatatacataatcatctctttggaaaaggatagaaaggtttttcctattaataggaccaaaacaagtttaaatgttaatcaagcaagtcatataaaccattttcttagagaagtggtagcacagtgtctgtaaaatgctcaagaaataactgatgaaaaggcagagaagatgcatattaaatttaaaagactgtctttgatcttagatactaaatagctctctaaatactctacacaagtaataggaaatatatttggcttcttgaagctattaaatattccttgtaatatattcctgtttggcagaatggttaaaggtatcagaaaacaatccttccatatgttatatacttgagagggggcgttgagatggaagaatgagtgaaaggatagtgtactagggttctggatttgctctaactaaactaaaagtgacaaatgaacaatgcagtggaatgaatgatagatatttttttcttaaagtaagtattgttttaacaagggtctggaaagacttctcaaatagacttttctgaaggactgaacagcgttcttcttcagataacttcacattatttacattgcagggtattaaaagataccttgaaagcttgaaagaggaaagactccccacctacaactagcaagtagtttgagcactgaactaatcagttaaaagaaattataaacaatgctaaagaaaaaagtatgatttccaatactgagacacatcgagatatgttttactgtcgagtatttctaatctttagggtttttaaaatattttaaattgtttcacacaacatatttttttcctaaggagatcactgctgagaaatgcagattgaatgagtagaatttgtataacagcatatctcctttaaatatatgaatataatttaaaacatttagacaagcaagaaacaataaggaacctattctgagagaaagagtagaaatggatatcagtttttaaaagggctaagaaaacaattattttaaaattgtttttaaatgtgaataaaagataagattcatgaatatgggaagggtattaactatacttccttatgtcaaacagatctcaaaatatcctcactgtagctaaagttgtcattgattttggtcccatatttctaataaatactagtaatgaaactttcatatagtttggtgtctgattttaaaattcaaaataaaaatgagattaagttatgtgtggcttaccttttagcatccattacctaatgaaactagtttcattaattatgttaatatcaattacattgcatgctttatttattcaatctatttatttggggaggtacttataaaatgacttctaaaatggcaaggtgaaagaaaagactagatatttcaatttaatactttcacatcacttcatttgctaagtgaacaaatttaaataatgtgctatatatttatatgcttgtgtatttgggtttacctgatgttttatcttctttcaataattatcctagcctttccttcctatatagcgaatgaaagtgatatttaaatgtgcatactacagtgtatgtagacattgcagacagctgcaggtcctcctgccggggaattgtccttgtttaagcaccattctgatgctttccttcctgccccagcctcagctttgatatactggcaaaacactctgaaattgaggtagtacagtggttcagttacaccacctttacattacctggagtatatgtctttctttttgacttggggtttctttaaaaagaaagaacaaaagtaaagacaggatcaataaacacacattgatgaaaaattagatatcaatttggtgacagtcacatacatatccattctgtatattttcataggtacatgtttatacaaaagtatcaattcacatataatatacaagtattcctgcaagataattctggcaataacttttaatactgaataaacgaaggtcttacttagcttggagacaaagtgtgtcacttttggtcctgacttggatatttgtcctcttccattgacataggtattttttgtgccccatattaatccatatcattctggcttacaacgattgcttttccacatcagagatgaaatactaataatcactaaatccttgcctattacggctgcttaaaatttagtccatacaggtcttcactggaagtccttattgcttgtgtttttgaagtagataaatctgtgttttatagaattacaagtaacattacccaaagtcaaattattttctacacacttattactgatttggttttgtgtatctatcttccctgtttctaacctttctatatttctacagttttgtgtatctgtgtctttctatacttccaaaccttactgtcttaaacttaagttacttctctgtgcatacttggctaccagtattcactgcttaatgtctctggctaatttgaaagtgattagctaatttttaatactttctcatagatattgatatatttaagttatgtactttttggggggcggggcggggcggggcggggcgcgggggccgaattctcactctatagcccaggctggagtgcggtggcacgatcttggcccactgtcacatctgctgcccgggttcaagcgattctcctgcctcagcctcccaagtagctgggattacaggtgcctgccactgcaccccgctaatttttgtatttttagtaaagatggggtttcaccatcttgcccaggctggtcttgaattcctgacctcgtgatgcacctgccttggcctcccaaagtgctgggattacagatgtgagccaccactcccggccaagttatgtatttttattaaacttaatttgacgcttttcctcgtaagtcatttattttgtgcatagcatttataatgtaatattttctctcttctcctgtatgtactttctcattctaatgtttgcctattttttaaataaaacttccagtgtgtattttttaatagcatttgtatttatttagcaattctgtggtttttttttttttcatttattttgtccttgtctttattattttatttcttctgcttttctgggtttgtttggttatgtttgtaatttcttgacttggttaaactttttaatcattttttaaatcttgaaattactttatgctatatttttgcctcaaaatacaattttaatcacatggtacataagctgctattcttattttcttattttatgattgtaatcatagatttgtttttcatagtatgtacatttttaaaagttaaaattcagcttttgaaaaattccaattaataaataattgaatcaaattatcttgtatacaatttgatattttagaatgtaaatatttcctttgtaagtaatttttatcagtttttataagtgttttacaaatacttgaaatcatactatattatatatttgtagaatacaatgttttatatgtatccatttatgcgaacctccaattatgtcgtattattttggcctatcatctctatcaaagcatgatggagattatgaaattctatagaaaactgtgttgctatctattctttcaagaaatacttcctgagtgccatgtgctagtcactgtccaagtcctaaaggataaaacagtaatgaaaacaatttcgtagaactaacaatctactagaaacatagaaattaacttggcagccggtttctgattagattaggccaatggaaaggcagaatagagagaagtaggaagattggagggtaagaggaagaaagaagtcagggtatttctccattctcctttcagggtatctcacctgataaatcaggtggccactctggcagcagccacatttttctccatggctctggacagcagataactgacccttcacagtcaaacctgaccatgaagtccatcaaggtttgcacttttgccagaaggcctcagctcattggtttcattgttactgctttctctatttatctgcctaaccttcagggtgatagtggcttcctatattgttccaaattttgaggtagcttcacctttcctgattgtgatttcagcttgtctaacatctttgaaagtaattctctgtattaaacaaacactcaatattctaactctgcatattttggagtaggagataaatttatttgccatttctctaacttaatattcattttaagtgacataaatttgctttgtcaagaggagttgataccctattcagaagtataaaacaatacattctgaataggagaaatcactgaagtattctctatataattgtgtctttgaagaaggttcctggaagagggttgtttttcctcaacagtcatacattttgtaattagcaaagaatgacatgggactttctttgaattttgcacaacagtccagaattataatgtatactgttaaagaaaattattcattttcttgttcagttgaaaaaatattttctactaattaatttcattaatgaaccaaaaaatatatttccatattcatagtctatgtgcttattacatttcagtgacaaatattccataaatccccattaatttaccctctattgcttagcagtttactcattcattgtctgtgggatatcatttaacattgttttcagttataagtaaaaggatactcagttaatatctattaaacccaacattgttttcagctacaagtaagaggatacccagttaaaactctattaaacaattagattattatttcttgatatcataattataaattcagcgcgttttcagggtttattcagtggctcagctcttaacttctttgatataatagtttgcattttaggtttgactcctcatagttacaaaatagtggttacagtttcaggaatcacattttgaaacaaaaataatcaggaaaagaaaacaggtatttcttatcaaagctctctttttattatgatggaaaaaccttcatcaaaaagtgaacacattggaagcggaggcaggtggatcacaaggtcaggagatccagaccaccctggctaacacggtgaaaacccacctctactaaaaatagaaagattagctgggcgtggtggtgcacgcctgtagtcccagctactcgggaggctgaggcaagagaatcccttgaacccgggaggtggaggttgcagtgagccaagatcgcaccactgcactccagactaggtaacagagcaaaactctgtctcaaaaataaaataaataaaataaaataaaaataaaataaaataaaaaaatttaaaaagtgaacacatatttccatcatgactatttgttgttgattgggccaaatgatcatttcatatcatgacagaaatgaaagggaggctggtgaaacaaataattggcgttttaacctctacagttggtgataggttgcgataataagaaaaaagctttgagtggtatttagaacaaggacataagggtatggcttacaatcacaagtatctgacactgcctatacctttggctatgcaatattcatgcatagacttttcctgcaaatatacaacacaactcctcacagttatataaaacatatttgtcttcttctcaaagtgagagaaaccaaaaatgtcatgtcaactttaatattagccaaggtatttatttgaaaactatctacaagaattctaggtaatttccacagaaaaatgtcttcttaaaaacatacatgttacctcttatcatctcaaaaggaaccatagaatcatacttggagatcatatagcctagaacgatgctcaaatcatctctcctttagatcatttcctcatactctgtagtgtgtatttgccatacttttttgactgtccatattttgaacacttttcctctattcagaaattacctgagttatcatattattgggaacaaccctcagactatacagcccgaaaattccaactgtgcacttgcccaacctttcttatagcagaatacaaactatcagggcttccagggaagacattatcattgctgccactgagtacagacacacagcttgaatcaccaacagtaaataactggtttctggtttctgccattcaggctgctactattggtgtctttggaaaatagaagtatctctctttgatagcagcagcattacaaaaatggagtccttgttcttcctaattttttgcaaaactagcttctgatccagtttgaggtgggtatacctaatgagcaatactcaggttatatgcttctgttctactataagagaggttggtcaagtgaatagttggaatttccaggctgtgtagactgaggaaggccctgataatttggtaatttaggtaattcctggacagagaaaaagtgttcaaaatatgaacagtcaaaaagcatgacaaatatgtactatagtgtgcatgagaaaataatgtgaataaaagacatgaataggaattaggaaaaggtagcagtatgcaagatcaataatattattactataccctctaaaatccatataattaccaattcaggtaaaattctaggagatagattatctcttataatactagttactgggatttatattttccttcgttcattaatttgacttttggtctgatgtttggagttttaatttttaatttatcttgagtgtacaaaagaaggctacaaacttaaattgaagttggttgccttactatcattatcctaacattcatccatgaagcatgattataaatttgacagttcttaataagactgttacattgggtctttgtttgccactgtggaaagtagattagtggttgccaggggatgggggtgtggtggaggtggggattgactggttatgtatagtaggtttttgggggcatgtcgaaaatgttctcaaattagttggtggtgatggctgtacaactttataggtatactcaaaaccagggaattgtacactttataagggtggatattaaggtatgtgaattatttctcaatgaaaatattattaaaacattagtgacttaaaaaaggactgttacatttgaaaataatgtgctgatatgaaagaaaagacattagttcatatagatgacaaattagtagacagatgatgacaaaactgattttttttctgttcaattcacttagtacatggtgatattttgtctaaatatatcaatactctaacatgacatacaaatatgaaataaaaattcttaccacacattattaattatccttaccaatacctaagtctccaatgggactggtgaaaagtatgaaatatccccagaaaacattccaataataaaaggaaaatgagttatacaaactgttacatttttctattttgctactagtgataaactaaatgtagaacttggctagactctgccaatttaatttctagtactctcattaaacatttctgctttagaattaatattagaaatgacaagtttttttaagactatagttatagattccctctccacttaaatttttttcagttttttttttataattgcagggttgattgcactttacttgagtagaagctgtttctactgagttagtggctatagccactgtgtttaacaatattttctcatgccccgaggtacacgtatttccacttctctatgctccaatattaacagacttttttcctcctcggtcgttttaggaaataatgcctacaaagcaacacttgcaaaaacacatttcttagttctgtaagaatatttatattccagtacattgaggtgttaagttttgtgaatgtgttgctttaattaatggttctctttgaaagtccctaaacaattcttttactcttcattctttgcataaaataaagcttttggtataaatagttaataatacttttatgttctatgtaaaggatataggtttgggcagtacacttatttatgtattgtctgaattatgtgagtgatgggttctgctgaccttcttctagataactacatcttggttctggtttagtgatatctctgaaggtctcctggacatactctccaaaaactattttgatgtgacctgatttgcatttcttttttaacttttagttttatgggtacatgtgcacattcgttatataggtaaactgtttgtcgtgggggtttggtgtacagattatttcatcatccaggtgataagcatagtacccgagaggtaggtttttgatcctcagtcttctcccatactccacttttaagtaggcctcagtgtctactgttcccttctctaatgccttcaattaccaatacttcttgaagtttgttattttttcccttttaaattatactgtcttcagaaatcagtatgacatagcatgaagaagaaccttaactaagggtcaagataagaaagtagctacgctgaaaattttcttaatattcagatttagaattctcaatgtttaggatagtgaatcaatgaatgatgataagaaagggcactataaggagaagaagaaacaaaggtagattaaaaagagcatttattgagcccttgaagagtaagtataagaaagatacaccaaaagtcacaattaataattgttatatctaggacttaaacaaaaacttgtatgtccaaggaatttttcttctatactgttttatggtaacttagacatgaacttctcatccataagcttgtctatgagcatattttgtttattcacagttcccaatgcttaaaataatagatcaaaacgtatttgcaaaattgattgagaatcttggctaatgttaaaaaagtttttaaagaaatttacaaaataagatgtttctcttaatgaaatatggagtttggggatacaaaagtgtatcaggcaatacttccagaatttcagagtttgatagaacagtttaattctctcttattttatagtcttatgtaagctgggtggctggtggctcccctctaggttctaacttagagatgacccaggtatctctcataataaatacttggtattttaggtcatgaaagaatgacaagagtaagacaatgatgcaatgaggttaacaactatccttggaaatactgcatatcacttctgcccacatcccattgactaaaacccagtcctatgaccccaacctgattacaagggatgttgggaaatatgatctttctgtgtccacaagaaaaagaaaatgaagtcgtgttttgacttatgacatgactcacagtttgactttaaaaatcaaaattatttctctataacctataaccagtcttctgtagtcaatagaatgaagactgacctagaaaaatataagatagtacctctgatgtttgaagatagctaaaactatgaaaaacatcatataattttaatcattttgaatataaatatataaactatttaatttcaaaatctgttgcagttctgcttcttgtctactccaactgagactgcatcagacattgtggttattgggaaaccaaattttctaaaataattatagatcatgatttactagctggcatttcatatgaccaaggctgtaatacttccactttaaataaacatttgttaatattgtcctagtgtaaattgtaacaatcattatcttataggataatatattccaactcaatagtaatatacaaatttctatcacttttttgggtaagcatctgtttaaaaattttatcattttttatcaattaaccaaaggtctgttccaactaaagataaggaaataaaagccatcagttagatagaccagcatcttttctgagaaccaaaaggtgcttactctatggttatataagatgttgacattaggggaaagtgacttagggacatatgaaaactctgtactatcattgcaacttttttataaatctaaaattattccaaaataaaaaaaattttaaaaaggcacttatagcataaccccatgattttaaataaatttcatgccacatttctatggataaatatttattgactacctatagaacacagcagtatatcagtggttacattttttgtttaattttgtgagtctagtaaacacgtattgcaaactgaaaaagaaaactaattaatacaaaagtggatcaaaggtctactctctaatctccctaacttgatttttctaattctaatcaatctttcacacagcatccaaactaatcttactaaagtgcaaaattattagattattcatgaccatctttctgtttacctctccagtcatcttctcattatcattttcttcaaaagtcttttctccatggtaataaacactttacactttcagtgcctcagatacctcatactccctcatgtctctaggatgtttttgtttttactgattcctcaaccctccatctgtgatcctttctcttcctactgtcactatatagcctatctactgcctcttgcccatcttcatttttcttctagctgtaagtcatttggcctgagtttccacatcacatcttctaatcatccctatcctctttttaaccattccaaaatgagattagatgctcctctttaatctccctcaagcatgtaatttcatgttattagagtattgattatgtgtttgacttccccactagagttggagctccatgctaaaaaggggtctgaattgtattgatagtggttgttgtattgatagtgatacatagtgggccttattatacatttgatacatgaatgactgaataattgagggttacacaatggattctggtcgtcagggaaaacttcctgagagaaataggccttgtactgaattaaggtttggggaggatactatcactatttgtatatagaacagcctggtcagaagctctgaagctaatggatgttcctttgagaatttaaagagaaaaacgaaagtaacaaagaaataatggaaaatgaatgtggaaggtacaatagaaggtgttgaagagtagtttcatacaataatacattctagggttggaagaaatcttagacactgtaatttatatataagaaaaattcaattcagaaatactcagtgacttcttaaaacatatgagaagttattggtagaatggaaaaatgttgattcttgattcctttgattttcttgattcttaatccagtgcttatatccatcatgccaagttgatgtagggtcagattagctataatgaaatgtgcatgttggtgtggcgatatctgaaagtagccataaaaatggatctcaaacaagtaagtgtacccgttataatgattagattattgccaaagtggatatgtattgaaatttttttaaattcttgtcattatacagtgaagagttacatataatcacctctggtttaatagtgcacaatgaatcaatctatatttctcataaagtaggtaaaaccatcattaaagttatgccacattgctcatctataacttattccaatggcggccaaaatctatggctcatctcatgaatgttttgaggaaggaaattacatgaaatgacttgatcaggcaagtgcaaagttgttaaacagggacttggcttttccatgattacctgctttatgttataaaaagattttcaagctggctaaactttgatgaagttatgaaagcctcaatttacttccaaagtgtgagtgatacgatggttacaaaatattccagatttaatgtttaaattgtaggttttgagtttattttaccaaaatgattttttctctgatttctgattccaagacagttgaaaagattaggatgccttaggatgctatggtaagtgaacctctagaattcaaagaaaaatgtttcagtccagtctgaacaaatatgaacattggcaagttttggaataggccaaattttctttcaaaccttccctttgagtaaactttctggttcctagttactttctcttcagtctcccctcgccatcttttcactgccctgacaacacactaaacatcacatttcttcattttggtaaccctggcctttgctacttgtacatttgccccattgaaatggttttcatattccaaaacaactttactttctttacacagctgatatggtttggctctgtgtccccacccaaatctcatcttgatttcccacatgttgtgggaggcactcagtgggaggtaattgaatcacgggggtgagtcttccctatgctgctcttgtgacagtgagggggtctcatgaaatctgatggttttaaaaacgggagtttccctgcacaaactctcttctcttgtctgccaccatgtgagatgtggttttcaccttctggcatgattgtgtggcctccccagccacgtggaactgtaagtccattaaacctctttcttttgtaaattgtccagtcttgggtgtgtctttatcatcagcatgagaacagactaatacaacaaccattatatttcctgtatcttgactattatactctttgatagttattaagatgaaattgaaagaaaactcagagcatgttttaaggacgtacatatcttaactccttcctccacagccaactcctgtcccagaatgttatattttgaatagagtatgcatataatttatacttagagaaatatctaacaagttgattttcagaaacagatatagaatgttagagaagacactttgatatcagttcaaccatttacatagacttgtcttgcatgagaatatgtctataagacatttttctgaaggtagttgtttcgatttaggggaagagagagtttgtctcaaaattatcaatagggttttagtaaactacagaggtttgaggtttacctttctcactgtcccaagattgagagcccctattccattgtaaaacaatctctttccaaaactggtccttcgtattgatttttttctcctcatttactttaaaaaccacagacactctaattgacaaagctgagttttaaacacagacctttgagagagtgacacagtaggccctggcatagggtgtgtgtgtgttcatgtttcacacattttcatttttgcgttacattaaaggagggataaaagatgatgatgtggccatatttattgattagttatttacaatcaatattagtgaggaaatacttgaaatgtgggagttttattataagaggatctggatccttggaagtatcctgtagtttgatttacttacaatagatgtattagtccgttttcacactgttgataaagacatacctgaaactgggtaatttatacaagaaaaagggtttaatggacttagagttccatgtggctggggaagcctcacaatcatggtggaaggcaaggagaaacaagtcacatcatacatggatggcagcaggtgaagagagagcttgtgcagggaaatttccccttatagaatcatcagttctcgtgagacttatttactatcatgagaagagcatgggaaagacctgccccccatgattcatttacttcccaccaggtccctcccacagcacttgggaattcaaaatgacatttggctggggacacaaccaaaccatatcaacaggttatttgaacatgctgactagcaaaatcttcatggattaccactaagtctggccacctggaatcaattgtgctctatgagtaatactgttttaaagaaacactctggtgaatcatccaaattattaatattactacataaacaagatagggaaatgtaatgtgatttgcatatatacgtataatgatattttagttatagttatttaaccatctaattatttggccattaaactaatgcccaaatgatattaataatactaattattaataataaatgttgattaatacctattaatatttgaccattatattatcttgcactcatttgctttgaaatcttatttattaagtagaagttatcatcattttgtgcttagaaaatcagacattttaaaactgtgaaataattcatccctattttcagtacatatttcaaaatctgtttgtactttcttctaagttccccttcttccaccctctcttcacctaactggcggtttgttgctttttcaaatcttacaggtacatatttgtcactaaatttcccttttacccacacaacgggaaaagctgattcagacatagcagttagtgcataaatgttagattgaaatttttatttgcatttacaaatgacactaagtgtgaagagcactataagatgtatgtgaccattttagttatctataatccagtctgttgtggtataaaagactacattgaaatagattgatgttcagtacctggtctgatttaacaggcccattctgttttctgaagagctatgtcactttctcaagaaatgttttagacatattttaaatattatttccattcaacttttgaaagattaaggtttcagggtaataatttgaaatttttcatctcatgactttagtttttaataatacatactttgttataatgacaaaaatgttgctagatcctgattacaaccaaaaatacaagtagacttgatgaaaatattagtagctgaataactactcttcatcagaaatacactgtagttatgatattctagggtactgctactttttttgatctgtctgaaaagtaaattgaatgccaccttagtttctgaaaatgaattggttttattaaaattttaaaatactcaaatctgatttacatgggcacctgcaagcaggtatgtctttctgtaagcaagggaatagtttgttgtaaagctcaatatttttatattaaattttaaattatttttcttatagttccctgttgttattcagagaattgtaagaggttactgtatggttaatttaacacatacttttaagtttcaatgggtaaaataatcaaaactctttaacctactggatgaagtacccgctctgtttttgaaagaactgagattgcattctattaaagtttgatttctattgattttttttgttattacaattaccacttaaattcttataacattatcagaatacaaataaactggaaaatttttatacctgactcagaaagtagcatgtgtaaaaggcaagccacaagtatatctgatataataagatgtttagaaaatgtccatgtgaagttaaaaaacccaaaaagtaacttatacaaaacttatttatcagtactgttttaataaagacaaactgtgttaacttttaaaaaacaggatatgtttctttttatattaataatttgcttaaattgcttttggctctttttaatgttgatgtgaaaatttttattccggttaaagatggtgaattttatatgcattcaataattctcacaaaacattaaaggaagttttcaagaagtaaaaccacaagaatgtggagaactagataatgaattacaaaagaataaaaacattggaagctagaaagcagatggatatatgttacctgtattaaagctgaattctaaattgataatgaggaaatgtaagaaattaatccaacatctattttaaaaaagccttaaaagcctaagaattggatggcacaagatgcttctcaatatagagatgaagaaggagtactttttaaataagaaagatcagctgagaactgtttgaattgctcctcagttgccccaaccgtcaagggtcatattctgtgacaaggaaaaaacaggtttcgttcagggtatacctcacacagttcattcatgttgaaacagggagagtaagacacctgaatcctggaagctaagaccccacatctctagcttagtttccctattcagttccaggagaacgttaataactatgacttacctccaggaaagagaagggaaaagcaatctctggaaaacctgcactgcccaggagaggatctaaagtgactgaggttagatttctctcagtgaagtgttcagtcagatcacccccttgtaaagatctccctataatgaatcccagaactggcacataccaacacccaacgggttgctttttttaaaaaaacagtattttgttttgaaacaaaatttgtttctcactcttaaatataagcaaaatcactaggatcatctatttgagaaaagtctatcaatgtgaaaagcttaaggcccaaacaaaacagaaaataaaaacaaacaaaacatggaagaaaaagacaattggtggaaaataaaacttaaaaaaactattattttaactttagagagactatatattactatcctgaaacaaaaagaggctactttttaaagtggaatatttagaaaacaaaaaagagcccttggaaatgaaaactatcatataactaaaatattcaaactgggggttggaaagcaaaattaagggaatctctcagacagtagagaaaacaattcaagaagggatgggaaaaaaacaaagaaaattagaggttaacctaggaggtccattttctaaatctataggtgttccagaatgaacagagaaaattcagggccatgtgcagtgactcatacctgtaatcccagggttttgggaggccaaggtgagaggatcacttgaggccagtggttcaagaccagcctgggcaaaataggaaaaccctgtttttataaaaagtaaaaaaaaaaaaaaaaaaaaaattagccaggtatggtggcacacactcgtagtcctagctacctgggaggctgaagtggaaggatcccttgagcctaggtgttagagtctgcagtgagctatgttcatgctgctctactctagcctagatgtatagaccaagacccagtctctctaaacaaagcaaaacaaaaaaagaagaagaaggagaagaaaaggttgttgtctcaggcctagcatgaggaatgaaaatagaattgtgtcaaataattttatcagaaatttaaaaacactggagagaaaaaaaaagtccttattagtttacttttgctgctataacagattaccacaacttaatggtttaaaagaacacaaattttttatcttatcattatggaagttggatttctgaaatgtatctcattaggccaaaatcaagtgggcagtattggtgtgttgctttgtggaaagtctaagggggaatccattttcttgtgggtttttttttttttcctggcttctaaaatctacctgctatccttaactatggcctcttccatcattcaagccagcaatggccagtcaagtgttcctcacattgcatcattctaactttgtaacgtacttctcctttcacttgtaaggacccttgtgattacattgggcccatttggataatctaaatcatctcttcatctcaatgtcagctatttagcaatgttagctccatctgcaactgtaatttccccttgccttgtaacataacagatttctaggtcccagggactaagatgtgggcatcttgagggggaagggcattattctgtccactgcaatatccttcaagctcccaattagaaaaatactagtctctcacaaatgattaataatcatgtattcattcataattcacttatttcataaatatctatataatgtgtcacattgaagacactatgaatacagtgggaaaaacattagagtctgcccttatggagcttatatttcaatggaggagagacagaaaataaatagataaaaagttaaatacataacatatatgagaatacgtgctgagaagaaaaaataaaggaagaaagaagaataaagaatgtcagatttgggttgtagaatttacatagagtgaccacagggttcctcaatgaaaacccaatatttgaagagccaaccaggtgattatctagggaaagaacatttgaaacagagaaaacacctacgccaaaggccaagagaggagagcatgcctagcttacttagttaacaaaaggcaagggggacattgtggctagagcagataagtgaataaaagtggagtagcagatgagttcagaatgataacaggaccttgttatgtaggaccctgtagacctgtgtaaggactttagctgttactaagtgagatgtgaagagaagatttttaaggaaaggagggacataattttatttaaatttcaatcaggctttctattccagccaaggggacatgacagagatgagatttaccctttgacctaaaacaaggaaacaacgtcaaaacacaaaatgcatgaaacaatggttttcaagacatgggcactgggtaataaagggcaatgtttcctgaaagataggaaacaaatgaggtgggcacttgatcgcctcagatattgtctgaaaaaatcttccagactgtggcatggggaggttcctctaggcagaccacagatgtcttcctgagccaaagagagagagagctgggaattctgtgaggtcaaggtggctagaattcccagggaacgaatctcaagaggaaggaaccaaaaagaactttggagatctgcagaacattttcttctattattcacatgagaacactaatgagcacatgcttataagaaaactatacaaggctaggtaaaaagcaacctgtaaggattagaggggaaaatttacagagctcaaagcagactggacatagtgcctcttcccatcagccagagtgattcacacatcataaagtaagcttatcagaagtgctttgcatcattaatgtggaaaaattagatctagcctgaaatgctgttctggctctatcaaacaaagcttaacataaagaccagaaagattcaccccatttctaaataactgcttcacaaaacaaagctcaaaaataattacaggcccacaaaaatatctagcacacaaaagcgtgaatcacattatcttgtgttcaatcaaaaattgacagccaatcaaaaaagcaagaaaatttgattcatacttaggactaaaaatctgttgaaaatgatacagatgatagaagtagtagacaaggctattagaataattcttgtaactgtattccataagttcaagaagctacaggaaagactgggtatgttaagtagagataaagaaattatgcaaagacctaaatagaacttctagtgatgaaaactacaatgctgaaatgaaaactccactacatgggaataatggacgattatacatttggaatagaagattagtaaatttaaagatgtagtaatagaaattcaaaattaaacagagaaaatgtgacttaaaaagtatgaatcattaagaatgttgaatattggcccccactctcttctggcttgtagggtttctgcagagagaccctctgttagtcggatgggcttccctttgtgggtaacccgacctttctctctggctgcccttaacatttttttccttcatgtcaaccttggtgaatctgacgattacgtgtcttggggttgctcttctcaaggaatatctttgtggtgttctctgtatttcctgaatttgaatgttggcctgtcttgctaggttgaggaagttctcctggataatatcctgaagggtgttttgcaatttggtttcattctccctgtcactttcaggtacaccattccaatgtaggtttggtcttttcacatagtcccatatttcttgaaggctttgtttgttccttttcattctttttgctctaatcttgtcttcacactttatttcattaagttgttcttcgatctctgatatcctttcttctgcttgctcagttcggctatcgatacttgtgtatgcttcatgaagttcttgtgctgtgtttttcagttcaatcaggtcattcatgttcttctctaaatgggttattctatagctcagaccttgtgagtttaagttggtgttatttctgtcacatactggtaagatattaatcatttagtgaattaccttttggccataatgtattgacactgattctgaagattgcaaccaaagttgtgagtagttatagaaaattcagacatccattgtaggccagtgacagaatgatattgggttatgataccttttatttatttatttatttatttattttatttttatttattttattttttttttttttgagatggagtctcactctgtcaccctggctggagtgcggtggcacgatctcggctcactgcaacctccacctcccaagttcacgccattctcctgcctcagcctcccaagtagctaggactacaggcgcccaccaccactcctggctaattttttgtatttttagtggagacggggtttcattgtgttagccagaatggtcttgatctcctgacctcgtgatccgcccgcctcggcctcccaaagtgctgggattacaggtgtgagctactgcgcccggccgcctgggttatgatatctttcaatgaccttaacattttgattatgcaggataatgatgctgactgctatcataaacacccctccaaatattggttttacacaaagtttatatctatgcagttcaggcagttcctgctttaaataatgactcagggccaagatctttccatcttatgatgctgacatcttttaaaaatggcagtagaagaggaaagatgtgtggataatctcatgaatggtttttgtggcaaggcctggaagaagctcacattatttccatccgcattctttggggatgagttatatggtccctacttaagtacaaggaaagctaaaaactgtagtgctgctatgtaactaggaaaagagaatgttattatttaacatctggccagtttccactgtgtcactgaaacatgaagagaagtgtattaaattgaaaataaagcattgtgagacgtaaaaatagtgagtcatacatcatagagagagggagggaaagagggagagaagacatttagatctaagccaatctctatttctttaatgaggaggaactggaaactgatctgagaaatgtgtgtatgcgtaaaattttcataactttgtttttaaacagttcaagataaaaaaaatccctgtaggaattattagagataactgaagtgagaattccatacatgggtatgacattcagtattcagatgctcagaatggctcaaattaggcactgttgaaagctgctcatttctatccaggtacatgctaaacactacttcatctgcagattagcctgtgcttgcttcctaaaatgtacaagggagatatcaatcatacttaatgcatagtgacagctatggattaatataagtaactcatccataaatgctatctttttcctatatttgccatgatgtatcatcttagaattgaaaatctagatcattttcatcactggattattttgagcacctgggcttggttttgtctgtgcgatcaaaacttagcaataatacatacttatctgcgtatctgtgcccaaactctcctcttgagtttgaaatgtttcttcagtaattttttaaagttcctgattgttttttgttgttctgtttcttcctgtttgaaatgacatctagaccagaggcaaaactatttaagtcatggcaacttaaaataagtattactgaaagaagactacttttcaaggggtattgactgtttaaattcccttccttgatgaatactagagagctaggataatttgaagattatattaccttttctttggtgggtcagcaataaaattatgataatgaaatagcttggagtccctcattacagagatcacttaaattagtgaagtactacatgaaaccttttagaacatttgtaatggtatgtatatagtaatcttttatttttatcagggtcactgcatttattaaaggcatttttgcttttataagaattgtatagaagagttaaaacagcttttagtatattgacaatagcattattcttgctgcttcagaggcctcattttctaaagatttatgtacccttttctcactctgatgtgaagaaaagcaaggaaattgtatgctgagactttgaaatgtgttgaacaatttgaaaaagaattgatatagtcagcaaacagtgctgcctggtgcttctcacatgaggcttgtaataaaattggctaccaaattgcaagtaatcagaagaaatagacttgattgttctttccactttaacaggcatattccaaactattcaaaagttgaaggggatttttcttcggtcaaacctacataaatagcacagaatttagttactcacaaaactataaatgagatgggtgattaaagaagatggctagaggtgtgagaagctttatattggagttatttcttgccgttaaactatgtctctctcacttctaagtgggagctaaacagtgggtacacatagacatatagaggagaatgagagacacctggagactccagtggtggggaggtttggaggggggtgaaagctgaaaaattacctatttggcacaatgttcactgatctggtgatgagtgcactaaacacccagcctttaccaccacacaatatgtccatgtaacagacctgcactgctgccctctaaagctgtaaaataaataaataaataaataaataaaagagaaaaataaataaaccatgactcttctctgggccaaattatttgaaagaaaatcttttaatatgattgacttcatgttgaaaccacgccacattcaaactgagactggtttcgccagtggttagagaatatacaaggagtgctgacttgtatcactaaccattccttttgctctctgcttatgattatttctgcaaggctctgcagctttttgagagaagtactattaccagctctctttttcagatgagaaaactgaggtaatgagggatgtttaacttgctgactggcatacatctagcatatggtaaagccaagttttaagcccaatatgtagtaaaagaaaagcctaaaattgtctcaagacttaatctctattccatcaaaggtccagagtattgactttagaaagttcattatatgttcaattaaattcagtagttttgaatgcttttttttttttttgcgttaccccaagcagtagtgagatgacaaacataaagaagcaagattcctgcccttgaatcacttataatctaattagggaaaaaatttatagacataaaatgtagagtaaaacaatatcttttttgaaaaaagtcatataaaaaaacaccagaggaagcatgttaagtcttagcctggagttcagggaaaatattctggaaagtagcatgattcctgtcagttctgaagaataaaaggaagttggccaagtgaagtagggaggagaaacacattctcaccgagagaaaatgcaagcaagcaacaagagtcatgaacgcctgtcatatcctatgaatggcaggctggtcaacattagggagaaggcatgagaaaagaaactggatatagaaacaagaacaaggagagtcatgaaaggtcttttacaccatgaaaataagctttaatgttacctgctagatcaaggaagagctttgggttctttaaatggagacgtgacagagtaagattttcattttatatagatcactgtagtagtaaattagagcatagatttgaagagggcaaaactgaccccacagataatttagaaggctttggaaacagtctagataagaaatgaggaagataaaaactaaagtgactagttctgactctgggttgaatagaatacggacacttccttcacttattctttctgaatgcaggtgtaaaatctggacagaaagaatagaatagctaattagaactctgatacatatgtaggagtagatgtattcaagtggaagaccgtaaatcaaagtgctaatgaatcagtttgtagttgaccactttttccttccagcaacccctgacctgacctcaatgcagcacagagccatatgatgcagtcagaaagagctccagaagaaacctctagttcatgctagagaagcgggaaagggtactcctgagtctcaaagggcagaaatctcctgctttcttctgcttcctcttttctctattatctgtgtcttggctcccaattgagcttatggtggcagtggcttcagtggtaatggggtcccacagaaaccaaaactctgagggaccttaggtcccaagaggttgggttatattttgagaatcgagctaatacaatatcaaccagttctgactggtcactgggtagtacacatgcagaacaggtctgaacagcatttcaaaggcttcaaagtgacattacaaccacagtcaacagaaggcgaattggaacgtgtggcctgaaccaggttgattgcctgctagcattaaaatatcagcatcctccatagaacttaaaataagacccagcacttcataacatcattcggaaaatataccaggcccaattcaagatgatttagcatacaaagaaccaagaatatctcaattcatttgacacacctgtaacatgttgtcattatttgtcaaagactttagatggtttttcaaaaatatttagcaataaattataaacattcttgaagtgaatagaaagctagaaactcttaccacataattagaagataaaaagaaataacaaatggaaattttaaaacaataatgccaaaaccatattaacaacttactggttgggtttaatagcaaaatgaagttgacagaggaaagaattataacctgggcaaaatattcagaggcatgacataaatagtcgatctattaaagaaaaaactaaatacattgaattttgccaaaatttaaaatgattgttttgcaaaagacactggttagactgttaacagtataaaaaataatcagctacagactgagacaaaatattgcaaatcccgcatctcataaagaacttactttcagaatatataaagacatctcagaattcaacagtaagataataaatcactaaaatgttattaaaaggggatgctatgatatgacttgcacagaaacataatcaaagacaatattagaatgctaaatagcacatgaaaagatattcaacattgtcaactattatggaaatataaataaaaacaggatgacataccactataaatcaattaggcttgctaaggtaagaaaaaatatctgataacatcaaatggtggaaaagatgcagagcaattgaaactcatcttttgttggtaggaatgggaaatggtacagccactctggaaaacagtttggcagttttttttagacatttaaatacacagctatcatgtgtcctagcaattccagacctggacatttaccctagaaaaataaaacttttgtttacccagaaacctgtacatgaatgtttacagtaactgtactcataactaacataaactggacataagccaaatgcccttcaatggataaaccaatagtggcacatccatgtaatagaattctactcaacaaataaaagtaataaactgttgatagacataacgtggtgctcctgaaggcatgctgtatcataaaggtcagtcttaaaagttttatactgcatactttctgtttatatgacattttcaaagaattatagtgagcaagaaatcaaatcaggggttgatagtgattaggattagggagaaattatgactagaaagatatagcacaaaggaatttttggagtgatgtaattattctctatcctgattataatgatggttacatcaatctatacgtgtattaaaattaatagaactacatagcaaaacataactttcaatataatttaaaaaacaaaaatgagaaaaaattaaactataacagttaaaaattgtaagcaaaattaacaaatatgctttttagattcataaaagtaagacagtaagggaaaagggatttatgaagacttcaatgattctgacttaggtgattaagcaaaaagtagtgacctcataatacagaaagaggaacagattttgtggggaaataattcagttttgaatgtatggagtttgaggtatccattatacatacaggacaatagtaaaagttataaaaggagagcaagacagcttgtagcctaggaggtgcagtaaacttataattctggggaacatcaccatttaagagacaggaagaagccaggagccaaggaagtgactgcagagtcaccctaccatttccactctcacacatccagactatttctgctcctgtttttatttgctttttttttttttttttggacaggtctgggatatttcattatatactcctttacttaaaggtcttctgaggctttcatcatttaaatgatagatttgaactatctgagataacatcgagcctaaaccacaatcccagacaaagaagtcacaaaggacaagtaaaaacatatgtgttagtatgcttcatattattttaacgaagtcaatcaataacaaatgcactaacaattttgtgtccttgccaacactgttttgatttaggtctgtatatatggatgtattttatttaatacacaggtgtatacacacaacacacacgcatgtttatctctctttttttccatctctgtgtccctcccttcctaaaaagttcatagaaattccacactgttcatgttgccttcctctttctctgaagtcatgtaatacctctcgtctgtgctagttgtctgaaagtatttgtaatctagtttttattagtttatttttatgtatttatatattatttcactgtctctagtggattttaagaccccaagaataagaattatgcttatgtcatatctgactatgcttatatcttattttgcttaaaattcttcagcagatctccagttcttgaatgataaattccaaatatctttgatggcagacaaggtccttagcgtgaccctaaactactctatttcagccttctctgccataataaacaccaattatgccaaattagtggtctttttaaaacaatttatgattttcatgttcctgatatttgtgtgtgttgtttatgtctctctttcctaatgaacttctgttcagaataactgaactcttttttctcatgtaacagtattgttccatcttctggcttccatggcttccacctcatcttgggataaccatttatcatcttgtactgtgcttttgcctttgtgtgtcttttccccatcatattgtgaacttgtagtaggaactggctttaactcgtctttgaagttgtagtatttgtagctatttcactgctatgttaaaaaggatacaaagtaaatagttttgaataaggaaatgaattaatgcttttcttcccatgcctatcaatgtgtcttattcagtgtcttaatcaacaatgagttaactgaaaaaagtataagatatgatagaaagctattgaatctctcatggagatataaatttgagttcaaattcaacctctttaacaagtagccttactcagtaagcttgatttctttctgtctttttaaaaaaatattatgtactgggccgggcatggtgggtcatgcctgtaatcccagcactttgggaggctgaggcgggcagatcatctgaggtcaggagttcaagaccagcctagctaatatggcgaaaccctgtctctactaaaaatacaaaaattagcctggcatagtggtgggtgcctttaatcccagctacttgggaggctgaagcaggagaatcacttgatcctgggaggtggaggttgcagtgagccaagatggtgccactacactccagcctgggtgacaaagcaagagtctggactatatcactgtttctaggaagttcaatgtattagtctgttcttgcactactataaggaaatacctgaaagtggataatttataaagaaaagaggttcaggtgactcacagttctacaggctgtacaggaagcatggctgtaaggccgcagggagctttagctcatggcagaagtcaaagcaggagtggacgtctttacattgctagagcaggaggaagtggggaaggtgccacacaggtgtatacaaccgtatcttgtgggaactcaatatcttcagaaaagcacccggtgggatggttttaaaccattagaaactgcccacatgatccagtcacttcccaacaggccccacgtccaacactgaggattacagttggacaggagatttggctagggacacagagccaaaccatatcattcagtaatcatgtatgttcattcattctgtgggatgtcaaaagagaagctacagatagacagaaatatattgtttttagattagagctttaaaatttttattttagcagcaaacttttcttttcataataaatcctctttaagaccctagttttggaaaaaaagaaaacataaaataaatttctgatggaggccatggttttaaaaaggagatcaggaatgtcatcattttaatcccctgcatacatattcacacactgatacactcatatcatacacatatgcacactctgagacacttctgcaaaaatgtgaaagaatatacataaaaaattctcttagatgacaaaaaataaaacacaagacaaaacctccacaggaaagcagttgataaaataaatgctacagttggactcagaagatctggatttataagttggtcctagtaaattatagttgtatgactttaaatatttatctaactattttagtttcactttaaaattttcagatggaggtggtgatacccacctacatagctgctgtgaatcctaaattgaaagagcaaacataatttgtaaactacaaaatagtatactattatgagctaccatttttactgttatcaggacttggacagtatgatttttatttatttaataataattttgtgttgtgaatatttgaaaactatgataagaagacatagtgaaagatgcatctattggctaccaatagtagcgtccatgttctttcaattaataaaagaaaaaagggagctgaaatatggtaaatcatgggatcataatctccgattgcctagatgaggtaaatgattctaccattaaattagaaatatcctaatccacaaagttagaaggataaaatatttctatcttagtgccatggcgtttatcccctattgagtaactaccatgattctcaagctgaatgtcagttgtagaaaaatgctgctcttaaagtcatttgtgtgtttgggaatgttatgttttcaaggatgaatgcttatactgtaaaaaattagtcttcatgggtataccattacaaacctgaaatagaaataaaatgttatatttgtgggcttttgttgactttgaaaatgttaaaaaaagattttaaaaaagtgaagattatgggaaaacacagatactccaagagctgaaaaacaaattatgctgctaagcaatatgaaaatcaaggtgatttgccttctaatgaatcaaaaagaatgcaatggaaagagaaaatctgaagtaaatctctgactttactgtgacttggtgattatagtaccctgaaacataatctttttttttttgcatttttaaaagacagatatggaatacaaaaagactttcaaggggaacatgcagtaactgtaacagtttcctttatatatatatatataaaaaaataaggcaaaacaaaaacaaaaaggccaccgtgacctgattaagaaatactcatcagaagtagcaatgactttgacccatccattttcaagaaaaaaaagaatgctgtgaacagacagaacccagaacagtgagaacattctcctgatcattttcagaacacagatattagctgaaaactactaggtaatgaactttatacaatgctttattttttaaaaaagtcaggggccttagatgatgcatataaaattcatgctttttttttttttcagttagatatgggagaagcaatccctgtcagtgagacatactggtgaaaatgtccatagcaaattggtcattgagtaagcattaccaatacagccaagagaagagaagtgagattccaagatgagactgcattcaaattttacaaaatacgtttcatgataggctaggtggttataggctcattttgcagaagataaactcagattcagaaaagtaaattaattaatgtaacaagtcatcaggatttgtgttaggaaataggtagacatagttgcatctgtgaagttatatttgtccttaaggagtctgcagtgtagtggagaagacaaaaaaaaaaatcaacaattacagaatagctccatagttgccaagatcagcatataggcaaaatgctaaaagcatatagaagtggaacaagtagatctgagtagcttgtctaggaagagttcacagagtaggatgacctctaagataatttttaaaatataaataaaagtttgctagatgaagtgaaatcacaatatgaaataattctaggaagctacaagtagcagatgtggggtagaacaagggtaattagtctgggaaggggacagatgtttggagacaattctccataaactttgcacatttcttcatatctcaatcttaacagacaatttgctcagatttatttatattcttcaatattaaaggctaatatctccctttccaaagacattacagtacagtacaaagaatgctccctatcctccctggagaagatttgtttacattcctattaagacaatatttctctccagaagggagaatgatcagtgttttttaaattttaaattttaatttttttgcagtctctttataagattagaaattccccctccctcccaaataagaaagaaagaaagaaagaaagaaagaaagagaaagaaagaaagaaagaaggaaagaaagaaagaaaagaaacaaagattaagagtttcctgagctcatggctcctcagctgtgacagacacactgtatgtacatctgccaattcccatctccatatcaacccaatgggacttgaggggaaaggagaattgaattgagcaagaagctcatgctgtctcctgtgctatgactaatacttttttaaaattcatttgagctcattgtctccttaccagcctgatctaaggaagtgtgatgagtcagattagcagttaccatcatactgctgcttagaaactacttgactacttgactgacagtaggtaaggatcagggataggcaggagagaaggtaagaggctacacgttaaaccagccatcaatgcacctctcacaccaatgccaaagcaaagttggcttttagctacccacgaatatagttaggtagaaccctgaacttactatagggtttgtcacgcctgtaatcccagcactttgggaggccgaggcggacggatcacgaggtcaggagatcgagaccatcttggctaacacggtgaaactccgtctctactaaaaataacaaccaaaaaaattagcccggcgtggtgggcggcagctgtagtcccagctacttgggagactgaggcaggagaatggcctaagcctgggaggcggagcttgcagtgagccgagatggcaccactgcactccagcctgggcgacggagcgagactctgtctcaaaaaaaaaaaaaaaaaaaaaaagtttgttagccaaaaaagtagaatccctgattatctttaagtggtctacagaccttcttggccttgccaggaaaccggctaatattgtcagatccttgttgataaaactgaatcttacaattacattgctttgcaaacaagttgagtggagacttgaggagctttcaaaaatatgttatctggagttaggaaaagaacaagatattgttctggttttattgtgtactaataaatcaattacagagttttgaaattttaacacgcaatatgtctattctaaaagttgatgttgaattcctttaatgtttcaaattatattcaataaaaagtatcagtttttcatgtgaaacacatatagaatactatgatgacctcattctggttaatgagttgttaacatgtgagatcgattgtcagatttgttttgttttgttctaagatgacttactgaaaattgtataaaccccattagtccagttttatatttttaaaaatgtaattgggacatatagttctgttgacatatttgatttgattacatcagtgtgaaggtatgctggttatttatagtactaagttcaaatttgtgcaattctggaacaaacattgtttaatcttcaaatatttatggatgttttagtaacataataatgcccacaaccctgagtttaagagttgatgattagtcattttgctcactattcaaaatagagaataacctcacttagctaagctttttttttttatctataatagtcagtttgtagaaaaatattaatagaatccaggtgcaataccatgagaggaatcaaatgcgttgagcgtagagtaggtagacacaaattcagagagaacctcctgtttctctattcagcatattttgtcagtatattagttgattcagcatgatcttgtcttttctaataaaatactttaaacaagcaagaactctcagaataaccatatatccagatgatatttgttccttctccatcccgattcatgatacctcacttatctggaagtcagacttctggtatccttaccctaagcctcgaacagatagatagagagagagatagttttttttttttttttttttttgagacagagtctcgctctgtcacccaggctggagcgcagtggcgcaatcttggctcactgcaagctccgcctcccaggttcacgccattctcctgcctcagcctcctgagtagctgggactacaggtgcccgccaccacacccggctaatttttcgtatttttagtagagacagggtttcactgtgttggccaggatggtctcgatctcctgacctcgggatccaccagcctcggcctcccttttttttttttttttgacggagttttgctcttgtcccccaggctggattacaatggtgcaatctcagctcactttgacctcctcttcccggttttcagtgattcttctgcctcagcctctccagtagctgagattacaggagcctgccaccatacccagctaatttttgtaattttagtggagacagggtttcaccatgttggccaggctggtctcgaactcctgacctcaggtgatccacccacctcggcctcccaaagtgttgtgattacaggcataagccactgtgcctggtcagcctcaaacattttaaaactattacaaaaccaccaaaactaaagttttatatttttatgatatggtcattgcaattagagttgaaaatttcagagattgctgacatgacccttttgtattgctaataaagaagctagaactcaaaaaggtagtcatttaaagaagatcaccagttaatatgtaatggagatagtaacagaatttaggtcaactctctgcttctttgtctagaaacacactcacaaccacctcccaccccctcaggtgctttaaatctgattgcttctcctcagaactcttcctgcattagacagatttgcctgagcccagcattcatgatgtagtaatggccactgacaaatgactggcaacatcttatccttccatttgcactgtgtatgctctaaggttcatgaggagaaatactcccagaacagtaactgagtgagatatgaataccacgtaattattagctttgcaggagcagaataccttgaagtagagctctcttgcaaatcagattagagggcttaaatattgagtcctaactggaaactgccactcttccctgaagttatatcttgggtctagcacagactataggaacctaaaaccactaatttacacatatgatcctgtggaaggattgagcatgaggagagaggaggagaaggaaaaaattagctaatgtttcttgtgcattttaccagatgataagcatggttctaaatgttctatagatagtctcatttaataattacaacaactcattaagataggcttccttcttttggattttacagatgataaaagtgaggtatagagattgagtattctgtcacaggttacagctgagaaagttaagatcatggagccagtgttcttacccactgcattaaactggctgtctatgtatgtgaatgtacatgcatgagtgcatatatatgtgtgtaggtagatagattacagatagatagatggacctagtatatagaggcatgtatatatgtatacagaataacctaaccatgtatctggatgacaatttttcttttttttatttagattcatgatatcttacttatctggaagtcagacttctggtatccttatcctaagcattaacctgaatataaataaacatttttaaattatcacattatatagatgtgtgcacacctatatactaggtcggtcggtctgtctctctctctctctctctctctctcactctttatctatctacctacccatctgtctttcaatcgctccatctagagaagaagatgattggaaacaaattagttaattaacatgcttccaaactacagcctaagaaatttatctatattgctctgtccagcaatatagaaaagaggaaaaggcagactatactttcaacattcattgaccatgtacatttgtaaacatggtccaactaatgtcttgaaatgtgatctattattttaattcccttctttttaggagaaggcagcaaagggatatatggagaaataacttggtggaataggcataacatgatgtagtagaaagaaaaatttgttttctgaaaaatatagatgtggatttgaatctaactattcctgtgttcttggaaaatttattaaggtttaccgagactcagtttgcttatccacacaaagagctcttttgagcagtaaatactattttatccctgtttatttgtcagtgcccccagatttcacccatccacgactgtgactatcaccattggcacgattacactaaaattgttcttgcaatttcctcactgcaattagtggctccttacattttactttgctcaacttcatgcatgtaaatatttggtaaactccatatgtccttcaggtaactcaatttaaaagatctaaaatcaaactcattatctttgctctttaacactgctctcttccctgtgttgcctgcttgaataacattacttttattccagttactggatccagaagtctgcgagtcattttaagttctttctttttatagccacatacagtcactaagccctgtgaatttcatctcatttatctctcattgttagctccttccttttttcccctttgctgctaccatcacttttttgctagattgatgcaataggttaaaaacaggtcctgctgccgtgatatttcccctgacttctctcatccagccccaaaattgctgccagaatgatgtttgtaaatgaaaattatatgttattgtagggcctaaagcccttcaatgatttatcagggctttccagataaagctccaactctctgggtttgcacaaacaggtctacatcaaggattcacaaacttggcactactgacattttgggccagataattccttgttgtgggggacttccttgtacgttgtaggatgtttagcactatctctggccttcatctactacatgagaggagtattccctgcccattgtagcaacccacaaaatgtgccctgacattgacaaatgtttctgggggacaaagtcttcatcggttgggaaccactggtttacctgatttgcctactgcattttcatttccccacaaaaatacacaccccatttcatagttttcctctctatataataaatctttcattctgtccatcctaatcatttccactttctttccgtggccatgcttttccacagttctgctttataatataatattattttagattataatgtcctttcctttatcgagttaacttatacttattaacttaaaatctcacctcaggcaatgttttctccttggaagcatttcctattgtcgatctagataaattctgaaaatacttttatcaaatcacttacatcgcatcttgttaaaaaattaacttatctgtatcatactatccattcttgacaagcacatgtcttacttggtttgtactcccaatgccttgccacagatgacaagctcagtagatgtctctctgtgtaaatgaatattcatcttataagaataaaggaaatcattaaggtaaagcactatttttaatatcttttacataatcatcacaagtttaatgttaattgtgtttttatgcatttcttaaaccttgcaataggattatttatattaggttttaaaaagtttgggttttcagagtatttcaaattctgaaattttagataaaatattataaacatatagctcaccttttagccacacagactatcaatccagtgagactcatcttttcattgttatctgttcaatctttgctgctttccaactttagtccttcacaatttcttctttttgggtctctaatctcttcacctctataaattattctaatccttaaaggccaactcaattccgcttcctccatgaaggcttctccagatgttctagttcatgtcatttttttccatcgtaagaaaactatgcctattttctccctttgattagaaaactctaaagaaacttggtttatttcacttttacctagattagaaggaaaatggaatacaaagaccagctaaggacaatcaacctaaaaatatgggtgagaggaaaatcatctaaacaacaaacagaactatgttacctagtatagtctgtgactgtttgcaatgaccttatttctcaagagatatatgttgcatataactttatttgagaaattatggaaataatcttgtttcataaaagttttctagcaaaaattatttaaaaatatatttaactcttgaaacatttaataatcagaaaaataatttgattttctgcagcccttgattatcatagagtgcaagaaaaataaatgaccatgaatgttgacccatcttccaagtgatatctgcccaaagtccacgtttattagtcttccttgtggataatttgaaaatctatttcatcagattgtggtattagccctaaaacagcaaaaatgaaattattactgtaatccagtaatttgccaaaaaaaaagcctttaacattttatctaaatttaatggcatgatttctttttcaacagttatgttattacaaatattttatttgcaagaagagtcctttctaatccagtttcctattctctgtgttagatggaggtctctgtgtttacaatggattattcattggaaaaggagaaacaataccatcctgaataaaatattttacttttgaaccgtatatatgaaaaatttaaacaaaagagaacttactgtgctattttgtattttccatggcttttggaatattgataagcatttattaatgtatatctagagaagcaagttattgtgttcttgattgttggcatcacatttattattccaattttaaaatataataaaataagatttccttatacagactttcttaatacaagaaagtaagatatcctcaaaaatcaggcttcatgtccttgcctcgaatcagtaatttagtagcatttattagacagattggacaatatcaaacacgtacagcctttatgaaaagtaattgaggagcacaaacaataccctaactgaaatccatcttcctctcccatcctcttaatctgatctaaatatatgtcattttcagaatccttgatataactgatatttaaaaattgaattatcaagggaaagatagaaaggagacaaacggttaattatctgggaaatcagaatctggaataacatgacaggagcaaaaagtatttgccataaccacaacaaaaccatgaagaaaaccagtgttcgcatgggtgtacttattaggagatgctctttcttattttcttttccttataattcattatataaaggaaagagtatttattttttagagtttctttatggtcaggactactctattattgtttatgctgctgtttgggagagggtcttgttcaggtatgtgtgtatgtgtgtgtgtggtttccttgttcatctgtgtgtgtgtggtttccttgttcaggtgtgtatgtgtgtgtgtgtgtgtgatttctttgttcaggtatgtgagtacatgtatatgtgtgtggtttccttgttcaggtgtgtgtgtgtgtgtgtgtgtgtgtgtgtggtttccttgttcaggtgtgtgtgtgtgtgtgtgatttccttgctcaggtatgtgagtacatgtatgtgtgtgtggtttccttgttcagatgtgtgtgtgtgtgtgtggtttcctcgttcaggtgtgtgtgtgtgtgtggtttccttgttcaggtatgtgtgtatgtgtgtgtgtgttttcctttgcactaccatggcatctatttttcacttttaagctgagttctgagtttgtggaaaggttgggaagaagttatgtaatgctccactggaccagaaaactagtgatgagtggaaactccaagaggtctagaggtacagccaagttggagtaacatctgtgagtcttgatgtttattaggactaggaaaaacctcttgagtctacataaatgacccgtgaatttagtgataaaaaaggattttgacaaggttttcaggatttcctgcatccagagagaatggaaatctttgagaagagccattaggtcagaatacagaagtttagggagcatttaaatgaaaaaaagaatggaaaaaattaatcttacatgacaagaatttgggttcaaatttaaggattgtgtttgatattttatatatttttgaataacttgcttaagccatttgaaagtagatcgttggatcattaaaaacacacaaacatttattttatacctgactttcggagtttgtgaaatatgctgtattggatatttgtacttgtgttcctactacttttattgtctatttttgttttgaggaatgagattgaaggtactatggaactacgtaaatttatcagttttaaggtggaaaaatataggcaggagaatacttcagttttcttctgtatcaatggttcatattttgtcctagctagctggcacatctcatgcaaaaatagtgaagacattagtagtagcagcagcagcagcagcagtagtaatagtaatttccagaataacactccttttcctaagcattttatatgtaatatcttatttaatcttctttatgacttgctgatgaaggtattgttgtcttcattttgcaatgagtaaacaaatatgcagaaaaatcttcaagctcagataatatgtaagttataggactgcaattttaatcttggatattcgtatctcaaaactcctgctctactgagcatgctgatttgcaaaatcaataattttgaatgggatgctacatctcttcaatagctgatttaaatttaagatgcctttaattctatatttgtggtttagaaataaagacataagaaggggaacatgtagaattgtgatatgtaggggaggttgtaaatttacccagatcgtgggcagaaatgcttagtttttactctttttcctatgtatccctaaatggtgatatttagggtattggaaaatacgtcatctctcaagtctcacagcaaagagagagattcttaattgtgcaaaggatggtccatattgattcaagaatcaccctacacagcttcctcttcctagatttcaaaaagggaatgtaatcctatcttctctgctttcagtttttccctcaacaattcgaatatcccaccaggactcggacatacctaaagctcaggctgtaatgtcaccctgtctctcttctgttccccaagataccccggtatcaggtagagattttctattgctcctcttatattaaaaatgtattcttttacagggaagcccacctttgacttagtatttgctatagtactctgtattagaaaatcttttcccttgcccattccttaagcccattgtcttgcttaaagaggagtacgtctgtcctctcttgtcatggattgataaaactcagggctcagcctcaaagtggaaagctgctgggaataagatttaagtagggagacaatgcactgggttaatattttcaaacattaacaataatttcaacaattttcaagcatcaataatcaatgtcactgttaacaaggggatcactgaagaaggggccattgcctcctgtgagttcataaaatgggaccccatgagaagaggtaaattggcttcatttacaagactagaaagctctagtgcatactattgggccggttgcttggctttgaacaagtcacttaacttttctctatttaatatccttccttatcaaatatactaaaacagctattttaccaacattgtgggtagatgatggaagtcagattgttttgtaaactacaaatttaaaatataagtttttgtatttcacttttatattatctggatcataaaagaccagtggaaaacaagttactgtttattcatctatatccttcagagctaaaaaaggattggtgccatgcacttccatgactgtcacacctctcagtaatctattgctggattttacttcattgctggctctagggtggacacatggatcagacacatacaatcagggcattgtatttccaaaggccctagatgttgactcagtaataggaatatgagcgggttataaccaaagagaaacaattaactatttttcatactgttaaaaaaggacctcatattctttcttgagacaacctaaacagagctgctggaaaatttttatggagtatgaccattaagtcagtatagcaaaattcaaaactataaaatgtagaaaagctgagctctgataacattgttttagctcttgattaaagctgtgcctgatttctttactttttagttttacaagccaatgtttgtttgtttgtttttaataatttatttactattaactagtatacctaaaaattgctgaaacaatttgggtaactagatggaaactgacttcaaaaaagcttcaagagtactgaggtcatcaggaactgctctttatgccctttattctcagctcttaatgctagcctgccacattatatgttttcatgttacatggctgtttaattacttaatgaagatttgtttattgaattaacagtttttgataaagaacaaagtttaaagaagataaagaggaagctatgattaaaaatattttgttatatcttataaccctttagaaatgaagttctttagacagagtattcttaaacacaattcttattataaatcctcagaagaacagtatataaagcctttgttatttcttacccacgtggaacaaaactctcacatgtcattacatagaatcatttaataatacacaatgaaggagtgggtgtagttggggatgtgtaagttttctttaattttacgtgaaactgcgaatcctgtaagtagaatgtcaagagaatgaggaagcacatcttaactttctctgctgcaaatgaaagtactaagtaacccattacttggtgacacctattctcgtaaaatatcttaacaaactgccgacatacaatttcttgggcagtttcaggctgcaggtttttgtaggtgagatgtactgtcaatcattgcatgcactagctcccagaaagaggagaatccaaattaagtaggagtggtcctccgcatcagtgtctaggcatagtacatagcatcactaattttacagcacgctttcttttctcccctcaccgcccgtactccgtaagattgagaatgaggaatttaaaatattctaaacattccctaaatattctgtgttatctacaggaatttttgtaatcgtacactttgatgttattttatttccttactgcgcactcatgaagaaaaaggattctaggagaaaatctaattataagactaatcacaatgaagtaagaaaggtttgcataattattataaaagtaatttaaaataaatgagtagacactattgtggctattttggggcattatacttctttggataataaaggtaattatgaaatctcataatatattgtacacaattatgctgtagaaccttgctattcaaggtgtgttccatagtctagaaacattggcatcatctgagaaattactaataatgtagtatttcaggctccatgccaaatctactgaatcagaatcaatcttttcccaagatccccaggtaatttttatgagcattaaggtttgagaagcactgctctatatcagaatatcattggatttaaagatattatttcatattaaggttaaaaatctggttgcttaggatttaggttttctaatttacagtataatttgtattccagttcttctccttttcttgtaacccagcaagacagacttgactcatgtattacatgttgctctataaaattgaaacgagaaaagcactgcaacttgcgattcaatacacagtgacagactatggatcaagaacactattctgacaactgtattatctacctgaatatgcatgctacaatttggctaatccccaaagtcaatgttggttacagttgattgataaaaatatgctttcttattcaaggtcaaattaatttggaagaattttcttttgcttactaagcagcctccatgagaaatcccagtctgacattatagctgtgcagcatgcattttctcaccctaatatacaaccctcacctcaacttcagtgtatgtgatatactatatgttaatgcttaaaaaaaattgtctcaaaatatcagcttattcagatttgcctcacttgacctgaaataatttacaattacagatgctgcttggacatgtcctgaggaacatttcaagtaagagtaggaaaaaaaaaaaaaacaacaaaaaaacactgctttttagagactacattatgtgcctgaaatagcaatattaatggtcaaagggtaaagatattttaggacaagttcatgaaaaacaataaaaaatagtaataactgtatttgttgacgatattacaaatatgtgtttgctttactcaaatacacaatatagtccttatttgctagaattaagaacattctgttgaaatatgtgccaatattatttgatctaggggaaggcataaagcaactttaggtctcttacaattggaagacttgttgtggtaacaaggaaaactataggaatttaattttgctgaactgtttttgcattatgaagaaggctatagtaaaattgaaaagctgttctctcgggattctaatgaatataaatttatcccagtgatctagtttttaaatgagtgaaaatctataggcatctcttttagtatagttgataaagtctaaaagtgtaggcttttatcagtagatttttaaataaaatatttgcaaaataagttacctaatctcagcagataaagatggtgagacttcatggttaatttagaatatttcggcaagcccagggttcctccctcaaaggagctcttgtctacttaaactaacctttgaagtgacattcatattttcatctgcagacttcccctccagccattttgcttttcctcttccaagccattattatgatctccatttcctgaaacctaggtgagaaagccagtctgaaagagacacatgagagataactgaagatttctgtacatattttaaaaggagataaagtgaagaattattacttcttttagtagcctctcctccactttctattaaaaaatttccatacttaaagagttattttaaatttgacttctttaggaaaacaaccccaaattcatatagctaaaattgatccttctttaatccatacaaataagctaattcttatctctaacccctatattgtacccttaaaatttcttctcttgtttcttgtgtatgtttgtatccatagcacattttcagagcaaagcttgattgagacagaaacagcacaagttacaaatctttgtgttagtgtagtacctggtatggtgactaacacatagcaaatctaatgtttgtcaagtgaatgtttcaagagtaaaatgaatgaatccagttgttcaacataaatcctattttaggagccaaggattccatttacaagacatcagaagttaacccttagtggtgtttttgtttttttgttgttttgttttgttttgttgttttgactgcatgagggactgacagtgcaagaatggctcagactgattaaaatgttaatttttagcagttcaagactcatgccaccaagaatggcactctgggcctttgagttaatgctgagaacccatgacctcaaagataaacttcagaaggaaaattttgcaactatcatctaccaagctctgtgctgggttatttttcactcttgatcttcccaaattttcacaacaaactttctgtacaattattaataacccaatttttacagagatggatttaagttacctggtccaaggtcaagctaaataatcaatgagcaccaagaatccacaccctgttctgtctgacatctaagtaaatcctctttccaatatatcattcttcttggaaatctggaatggattatattcaaaggagataggtatacactaaattgtgtctcccacctcaaccccaaagcatatgttgaagtcctaactcctaatgtgactctacttggagttagggtcttcaaagtggtaatgaaggttaaatgagattataagggtgggaccctaattcaatatggctgatatccttacaaaaaaacaaagagatggtagaatgttgtgtacacagagggtacagcttgaaggtagccatctgcaagccaaggaagacaagaccttgggagaagccaacccagcggacacattgattgatcttgaactttcaacacctggaactgtaagaaaataaatttctgttttttaagatacccagtgtgtggtattttgttatggcaactaacacagaaacactattaaaaatcaaagtttatccaatatagcaataattcttaggtctagagcttatgaaatgatttaaagatacaatgtctcagtgcttagtgtggcaacctcattcaattgtgtcaaatcaagacacattgattgtatacttactatgtcctgccacattatgcccagtgcaagaggaaaagctttggaggctcccagtttggcatctctttataaactctacaattcccttttgtggcatcacctttctagattatagtttaataaaacttgttatcattgtaccttgccaaatacaaatactgctaatccccaaagcaaaactggctagtacttaactgtgaactctgttttcctaggaatgcaatgaattgcaaatgagtagagatttatgaagctgtaacactatggggctgtgcttatccacctcaccccccatggcgggaaagccacatcaaaagatggtcaacttaatgcgagtcagcgtgcagattctgcttactgaggatatattatcttttcccatttgctcatttccctctctttctttatgtacccttcaatgctcagaacttcttttgacatatatgtggcactttttcctcaactgagtgactagtaagagatttataaaacagaaactggtcatcattgcccctaagaggtagtttccctacctcctttgtgcccttggcttttctgttttgttttcttggtgctacatttttaaatgcttttatttacacaatatttcttcaaaggtgctgttctcttttaaagtgatacaatggaaatgaaaaggatattgaaaactctgagcagaaaagtgtattgctttcttgtttcagcatgacagaaaatggtatatagtgaaaggaggaactttctcattgcaataacgttgttaaatgacagggcaatcaagccctcaagcttcatttttaatttgaaaagacaaatgtattgctagtactgtgggatacgtggcatctgtaatcaaaagcactttactttaaaaggaaaagaatcttataaggctatccaagacaggagaagattcatgtcaaaatcattagctttccacggggttcaagcagaataaaacctgggaggtgattcttctgccatgaatctgatctcttgttcaaattccctgaaaagaaacaaaaatggtagaatacgtttagaatttgttacattgagccctatagtaaaactctttatagatattagatgttggtcacaaatagaaaaaaatacaaagccataaagcctgtggatactaatgtagagatgttaaaaaaaaaaaaaaaaaaaaaaaaaaaaaaaaaaagaccagactaaagatagaggattttctgcattttacagaggtattttctgagttttgcagtatcaggtaatcccagaggcaattaaaacaaaacaaaaaaaaattctgaaaggtctcctgcaggataagtatcaggccagtgaactcagcttctgatcagatgtgaatgatcatcaaagtcagagaatcttctgttagttcatcacatcatttccttttggatgaaataattaaaagagcatttctaacaattgaacttatagctaattatatataataataacaatttatacataaaaatacatttataaaatacaatcattcggccgggcgtggtggctcacacctgtaatcccagcactttgggaggctaaggcaggtggatcacgaggtcaggagacagagaccatcctggctaacacggtgaaaccctgtctctactaaaaatacaaaaaattagccaggcatggtggcaggcgtttgtagtcccagctacttgggaggctgaggcaggagaatgggatgaacccgagaggcagagcttgcagtgagccaagatcgcgccactgcactccaccctgggcgacagagcaagactcagtctcaaaaaaaaaaaaaaaaaaaaaaaaattacaatcattctttaattctcacaacaatcttgattggtagactttattatgttcatttttcatatttgtataattcaacattcaaaaagtttctatctctgatcaagtaaatgtcacagttaagactagatttgtgttccttcagttttaagttcaaagctctttgtgagagtaccgtaatagtccctacctgtttggttagatactgtaaggagatgggtaacatttttcaccacttctttttcattcgagaatatgtaatgtttaattcttaggctcttgcggggagaggcttaaatttattgaagatttcttgtaggcctatacatatatatatgtgtatatatatatatatgtatatatgtatatatgtatgtatatatgtatatatatgtatatatatgtgtatatatatatatacacatatatatatatatataaatttttttttttttcttttgagacggggtctcactctgtcgcccaggctggagtgcagtggcgccatctcggctcactgcaaactctgtctcccgggttcacgccattctcctgcctcagcctcccgattaggtgggactaccagtgcccgccaccacgcccggctaattttttctatttttagtagaaacggggtttcatcatgttagccaagatggtctcgatctcctgacctggtgacccgcccacctccacctcccagagtgctgggattacaggcgtgagccaccgcgcccggccgtaggtcaatttttaagcccgtttaatctcagtttagttgctttataagaaaaaccaaatcttcaattttcttttaactatacattccctaggagactcaaaaatatttctaaattacacatcttaaacaaaatgtaattcatttaaaattatatggaagagtggtgactatgaaattatgtaattgcatttatgtttaagagggaatgtatccctttagagatctataaaaacaatatcttatattcaaaggacaaaagtcttagggaaagtcttacctgaagacagagctataccaggtagcctctgacatatctttaaaccctaatttgctgacgaggcatgcgagtatatttttatttggaatgtcgatacagaatagatcatcatcactgtccagaagcttttgttttcaactaaggccaagataaaaacataaaaatgttgagaaaagtatcagtgtgtgtttttttctaatgcccgcccaaaaaagaagtaaaaattttccaagaatctaactaaatgtcctaatagaaagttaaaagcagaattaatttagaactgacacataaagaattggagagacaataaagaggaaaaaagcatggtgagaaaagaatagatgtgtttgaaaaaaaaaaaagagtgaaatctgtggattaaggaagacactgaaactagtgatggagaaatgtaaaggcaggagagattcagggaagttgctcaaatagtgtccctaaaacctcagttccccaagttatttttatatacatttctgtttccaaaataatcacccacttgcagtgatcactaatgtatttactaggagtgaattctcccttaagtaccacctttggaagtttaagctgccagttaattttaagttctgatgttttctcattccaatattattcagaatccaggaaagagtaaaagagagggaaaaaaagactgtatgttggcttttttggttttggcttaaattccctcagacaagtaagcactgcctaccttcaaagatacaaaacagaaaactgttttttgatgattctaaaaatgtctccattttattttgcacccctcacataaaaagctttcattgtttttgatatattttaaattatttttccttcaagtgtttttttttctttttttacaaaatttgaggaactaaaaatttctaaggagtatgcatgtggcagaactcttaaatgtgtcacattttagattcaaaggaattacaccatcaagaggaaaacaatgtcacagtgagagattcatctagtattactgctctacaataatagaagtgcttctatcttggttaatcataaagaatgaggccaagtctttaatttaaaaaagaaatagtgtaagcttcttggattttaatctattttaatgattaaactctactgtgtgtcggggtggggaggatgtgtgtgtttatatgcacacataccttataaaaagatgtcttcacttagctgttacctagagcagaaagtttttaaataaaagaattagcagtccaggtgtggtggctcatgcctataatcccagcactttgggaggtcgaggtgggtggatcaactgaggtcaggagttcgagaccagcctgaccaacatggtgaaaccccgtctctactaaaaatacaaaaattatccaggcaggcacctgtaatctcagctactcaggaggctgaggcaagagaatctcttgaacctgggaggcagaggctgcagtgagtggagattgtgccactgtactccagactgggaggcagagcaagacttcatcacaaaaaaaaaaagaattatcaataatcttcaaaattctacacataaataaatggattacattcagaaaaatacttactaatgcaacttagtcaattttttgttgctataacagaataccatagacaagtattcttgtcacaaccacttaagtaccgttgaccttttaaccatctccacacagtaaaaaatccatgtataactttgagctcccccaaaacttaactgttaacagcctattgttgcccagaaaccataccaatcacataaacagtaaattaacacatatttcgtatgttatatgtgtcatatactgtattcttacaataaagtaagataaagaaaatgttattaaaaatcataattaagaaaaaatatgtttaacattattaagtagaagtggatcatcataaagtttttcatccttgtcatcttcacattgagtaggttgaagaagaggaggaaaatgaggggtcggccttaccgtcttgggggaaatagaggtagaggaagtaaaggaggtggaggaggtagaaaaggaagcagcaggacagccaggcacactttgtgtaacttttatcgaaaacaaaatctttgtatggtaaacccatgcatttcaaaccagtattattcaagggtcaactgtaatctctaagaagattcagattttccctacatttctcctcttttcaccaaaatctcccataatgctccattcatggcaaagcaagcttcatctagcctgctcctccaaacttttccagcctctgcccattaccctgtcccaaaggagcttccacattttggggtatttcccatagcaacagctccaattctcagtaccaattgcctgcataaatctgttttctgttgctataactgaataccatatactgagtaattataaagaaaataaatttattcttacaattctggagtctgggaagttcatgagcatagcactgacatctggtgaaggccttgctgtatcataatagtggaaggtatcacatgacaagagggcaagatgatgcctgtcaactcagatctctcttcctcttcttacaaagccaacagtcccatcatgggggacctaccctgatgacaacctacctctattacctctcaaataccccacctactgacagcatatgaaattgaggtctaattgcatatgattaagtttccagtatgtgaagtttggaggacccatttaaaccacagcaacaactattcagcctatagtggagccttgaaaaaaacccagctcactaataaaatgttggtaaaaccaccaaagaacccagtttccccagtatcctactgtatcttcaataactgtaagatagtggaaggagagggatagtaatctttagaggggattcatttgaaggtgtagaattcaggttggcatcattcaaggttacattctagagaaaaaagattacaacaaagaaaagcaaaatgtgtggcctctctgtgccacagaggtaccaaaaatatacatctactagagttctctattagagacaaattagtcaagatctttcattttgtatgtataaacacatggcccacttagaagatggacttaaacaatatgattagagccaagaattcctatatgcaggtcaatgctttttggaggagaaatgctggcaagatagaaggataaaaataaaataactttaactttagggctgtgaatcagaaaaaggatgaccaagtctcatttatgcttcttaatgatgtcacattttctagtaagtaacaaaatggagagcaacattatgttttcatcccaaaggaggtgaaaataaaaggattagatagagaaaaggctggaagtagtaataagattttactttcttttgcttccaaatttcaaacttgtctgtgtcttttacacaatcatgggcatcaatgtatttcacgaatctttgatatatctctttctaatttgcatcgtcttattttatttaagccactttaacaaagtgtattggttctgttcatgaaatttaaaagcctattctttattcttccttcagtcttctttgtgtgtgtccgtgtatgtgcatatgtgtatttgtgtctgagagagagagagaaaagagagaaagtgtgttatatactggtttctcatcttcatttttaattaggttatgatctctaggtgtcacttgttagaacttgatctctccaatcatcacataaaatgatgaatggaaggtatatatcactctgtgctaggtactatgttagatgttttaaacagattattgtagttcatcattataataaccctacgaggtatgcactaatattatttttattttgcaaggggacaaaatgaagcccagagatgtcaaggactttgtataagatcacacagttttaataaaactctacttaaaccaaggtttaaaccaaagattgagtttataatagaacttaatttctctactaaaattgctaaaataagacatgaaaatagagtgaaatgcttgggttttctttcttgaggtctcatttcttctgtacaatcttttatgttgtagtaaactgactatagtacttagttgtttgtctacctatacatacaatattctttaaaaagtttccattatcccctttcttttggaaaggtactctctctaccaattgccttagtccctcaaggctgccttaacaaaatgtcttagactgggtaatttataaatgacagaaatttattgctcacatttttggaagctgggaaatctcagattcaagtgacagcagatttgacatttaaggaacacttatctttcttttttctctctctctcattttgcaattgatgtcttttttgaatttcttataaaaaaaagtggggtggggtgggatccatgtgcagaacgtgcaggtttgttacatagttatacctgtgccttggtggtttgccgcacctattgacccatcctcccaagttccctcccctcaccctctacccccgaactggccctggtgtatgttgctcccctctctgtgtccatgtgttctcaatgttcaactcctacttatgagtgagaatatgaggtgtttggttttctagaactatcatctttcatagttaaggtcttctttctgcctcctcacatagcaaaatggggcaagagaataagtctcttcataaggccactaatcccattcatgagagtggaatcctcatggcttaatatcttccctagggccttacctcttaacactattacattgggtattaggtttcaacatatgaatttttggtcaatgtcagtattcagaccatagcatcaaacatatccacttcaatctcttttccgttcacggaaggagaagacagaaaattatcaaaaccaagcccataagaattcttttgtagaatttttaaaagtggaacaaagacaagttattgatgtctttatttccaactaaaatttcaagatttgccaaaacttgtactaaaattcattgtgctacaaaacaaattttcaatctgatctatagttgaaaataagcaagccaacaaggcagaggcaatgaaaataaacagagaatcctggcagtatctcacatgtggttccaaccaagattttacaagatttgccaaaccatgtgctaaaattcaatgtgctacaaaacaaatcctcaatttgaagctggattacctggatttatatttcagttgttaacacctgctctttttaatccttattatttgatatcatcaaattataatatcaaatattatctttaaatttaaattatatgagatgtgaaagtttcttgcaaatactatgtaataaataaaatttattttagttttttatgggacaaaaaggctatttggtaacatgttagtgtatggacctaagtgaaggaaatatatgggatgatggtaattattaaaaagcaacaatcattttgatatccaacatgttgtatgtttatgaagctgtgtgtgaaaatagaaggatactctacatatctaaaaactgtacactttgtgtgccaaatctatttttttattaatataatatcaacaaaacatggtaacgcaattaactgctcagaaaaatattttgatttttataataggcagtactaggtagtctgaacatttaaagtataaaatccctgaatccattgtgtttactgaaaatgaaaaattatagtagatgttgacaaagataaatgctcaggacagtttgtgagttgaaaattcatgatatacctatagtttttctgataacttttgttatcagctagaaatgacttgtttgtaagaaaacacaattcaaactgttatgagcatgaaagataaatttttggcttacattataataaatccagggatgggtttgaactcaaaagatgccatcaagacccaatttatctctgaggttttgttgttgttgtttatttgtttctatattggctttattctcagtcaccagtagcccaaatttcaagtcttctcaggtgaaagtcctattttgcagtgacttacatttgcatctcattaactctggtggggttatatactgattcctgaaccagtgcctgaacatgccatgcaggggcctggagatcactcaatctcttccaccagtgttggcacataagcacttcttctgaagaccataaggtagcacatccaacctgctgcaactcacctgcacatgccaccttcaggcctgaagactggcttacccagcccatcacagccaccaccaacaccattacaaagcacttgggagccagagagtgggcctgccactggtactgccatcacccgtgccacacctgctgtccaagaccgtaagaacctgcccacacacttggcccactgctgccaatgccagcacctcgacaacctatctgaaggcccaagaatcttcccatatggacataataacaccagtgccaccatatgctgctctggctctcaagcacaagcatgctcagcccaccactgtcatcactggggcccaaggagtgacccacctggcatgcattcctaccccagaaaaacttcacaacagcctccactaacaactgcatcctaaccttggatgtaaacaggttaaactttccactgaaaagaaatagactagctgaatgaatgaaaaataaaaaaacatgactcaactttatgctgcctataagagactcatctcatctgtaaagttatacagactgaaagtaaacggataaaaaaaggatattccatgtaaatagaaaccaaaaccaagcaggaatagctacacataccagataatacagactttgagtccaaaacagtaaaaagagacaaagaagctcattatataatgataaatggatcaattcagcaaaaatatataaatattctaaacctatatgcacccaacactggagtacccagatatataaagcaaatattattaaatctaaaggcagagataaactccagtacaataatatttggggatttcaacaccctactctcagcatgagacagatcatctagattaaaattaaccaacagaaaaaaaaaaggatttaaactgcacattagaccaaatggacctagcagatatttatagaacatttttatccaacagctacaaaatatacattttccccgtcagcatgtggaacattctccagatagaccatattttgaaacacaaaagaagtctcaacaaatttataaaaatataaatgatgtcaagtatcttctctgaccaaaatggagtaaaactagaaattaacaagtggaactttggaaactgaacaaatatattgaaattaaacaacatgcttctgagtgacccctgggtcaaaggcaaaattaaggagaaaataaaaaaatttcttaaatgaaaattgatacataataccagaacctatggaatatagcaaaagtattgtgaatagagaagtttatagcaataaatgcctacatcagaaaagaaagatttcaaataaattatgtaaaaatggacttcaaggaaaaagaaaagcaagagcaagccaaacccaaaattagaagaaaaaagactggagcagaacagaatgaaataaaaactaagaaaatgcaaactgtctacaaagtgaaaggttagttatttgaaaagatcagcaaaattgataaactgctaactagtctaatgaagaaaaagagggaagacccaaattaacaaaatcagatatcaaagaggaaacattacaactgatatcacagaaatacaaaagatcatcaaaaactattataaacaatgacatactaccaaattggaaaacctaaagaatattgataaattcctggatatatcaatctaccaagattaaattaagaagaaagagaaaacctgaagaacccaataatgagtgataaaattgaaacagtaattaaaaaaagtccattactcaatggcctcacttgccaaattctgccagacatataaagaagaatgagtaccaattttcctcaaactattctaaataattgaagagtaggtaattttaatagttcacactgattttcctcaaactattctaaataattgaagagtaggtaattttccataacttatttttcgaagctagcactaccctgataccaaaaccagacaaagatacaacaaggaaagaaaactacaggccaattcctaaaaaacatagacacaaaattcctctactaaatactagcaaatcacattcaaaagtatatcaaaaagatgttgatcactatgatcaagtgggatttatctcaattatgcaaggatggttcaacatatgcaaatcaagaaatgtcatacatcacattctcagaatgaagggcaaaaactatgtgattatctaaatagatgcaggaagaaattgataaaattcaagatttcttcatgataaacactctcaacaagctaggcatagaaggaacatacatcaacataatagagactgtgtataacaaacccagagctaacgtcagactgaatgtggaaaagtttaaagcctttcctttaaaaactgaagccagacaaatatgtccacgttcaccactgttattcgacatactactggaagtcctagcaagggcaatagggcaagagaaagaaaaggcatccaaactggaaaaacgggaattcaaattctccctctttgctgatggtatgatcttatgtctagacaaaaactaaagattccaccaaaaactatcttataactgacaaacaaatccagtaaattcataggatataaaatcaacataaaaaatcaataacaattctgtattccaataatgaactagatgataaaggaatcaagaaggcaatcccatttacaatagctacaaaaataaaataaaataaaacacctaggaatacctttaaccagggaggtgagagacctctacaaggaaaactacaaaacgttgatgaaagtaattggggaggataaaagaaatgcaaaaatatcccactttcatggattggaagaattaatatttttaaaatgaccattctacccaaagcagtctacagattcattgtaatccctatcaaaatgccaatgtcatttttcacaaaaatagaaaaagcaattataaaatttgtatagaacaacaataacaacaaaatacaaagcaatcctaagcaaaaagaacaaaaatgtaggcatcacattacctgtcttcaaaatatagtaattaacatagcgtaatattggtacgaaaacacatagaccaatggaacagaatagagaacccagaaataaattaatgtatttacagctaactgatttttgacaaaggtgctaagaagaaacatcaaggaaagatacccttttgaataaatagtgctgggaaaactgagtattcatattcaaaagaatgaaactggactgggtgtggtgcctcatgcctgtcatcccagaactttgggaggctgaggcgggtggatcacttgaggtcaggagttcgagaccagactggccaacatggtgaaaccccatctctactaaaaataaaaaatatatatatatagaaaaaaacaatagctgggtgtggtggtgcatgcctgtaataccagctgctcagtaggctgaggcaggataattgcttgaacccaggaggtggaggttgcagtgagccaagatcacgccactgtacttgagcctgggtggcagaacgagactccatctcaaaaaaaaaaaaaaaaaaaaaatgaatgaaactggactcctactttctcaatatacaaaaagcaattcaatatgtcttagagacatgaaactataaaagacctaaaattataaaatcactagaagaaaatttaacggtaagacttcaatacgttgatctaggcaaatattttatgactaagacctcaaaatcacaggtaacaaaaataaaaataggtacacaggacatattaaatgaaaaagcttctgtgcagtaaaggaaacaatcatcagagtaaaatgacagtctgttcaatgggagaaaatacttgagaagtattcatccaacaagggactaatatccagaatatacaaggaactcaaacaactcaagagtgaagaaacaaataatcccattaaaaagtaggtaaaggaaatgagtaaatatttctcaaaagaatacatagaaatgaccaatagacatatttttaaaatgctcaacatcactaatcatcagggaaatgcaaatcaaagccacaatgagatgtcatctttcccccaattagaatggttattattaaaaagacaaataataaaagatgttggtaagcatgtggagaaaagaaaactcatacattgttggtggaaatgtaaattagtacagccagtatggaaaacagtatggagatttgcttaaaaactaaaactagaactaccatacaattcagcaatccactcttggttatccaaaggaaaagaaatcaatacatcaaagggatacctgcatctctgtatttactgcagtactattaacaatagcaaggctgtgtaatcaacttaagtgtctatcattggatgaatggataaagaaaatggggtgtatctttggccataaaaaatgaaatcctgtcatttgctacaacatagatagaattggagatcattatgttaagtaaaataaacctggcactgaaataaaaatattgcataggttcactcatatgtgaaagctaaaaatttttatttcatggaggcagaaagtagaattatagataccagagactggtaaggaaaggtgtgtggggttggtgattaccatgaagagacattgactaatggatacaactgtacagatatgtaggagtagttctaatatttggcagcagagtagagtgaatacagtttacaacaatgtattgtgtatttcaaaataactagaagagaggacttgaaatgttctcaacacatagaaatgataggtactcaaggtgatggatacgctaaatagcctgacttcatcattaaccattctatgcatgtaacaaaatatcacaatactccataaatatgtacacatattatcaattaaaattaaatatacatatataaatctgcttttgagtcatttgttcttaaaaagatagatctccaattagcatatgggtattaaattgaatatggaacatgttaaagcttgtttgtctttcacaaacatctgttggtggcattttcattaccaggtacttaagaccattcacgtaattgctagtattcattatatgtcaatctcctctttatccttcttcaataaaaagtgagtggtaaaaatttaattattgatattgcacaaggatttctttattaattaataaactagtcgttttctagatagggctaaagctattttgtctgaagtacttaaatcatgtataacatgatcatctaagaaatataatctatccaaatagatttgacattgatatatggtacaattagctttacagatttcacttgtattatttgttttttatgaaacaaattgcatagatcaacatgagaaaaaggaagaagactgccatcttgtaacaatagggctgttctatattttcaatacaattaagaatgtatagtacagttagttagctttacaggttttgcttgtattattttgtttttatgaaacaaatggcataggtcaacatgagaaattaaaaaggaaggagactgctatccaataacaatagggctgttctatattttcaatatagttaagaatggtgcatcttctgtaactgaagtgagcagttaggaacaaaagagttataactctggaggatattaattacataatctgaagaacaaggaatactgtttgggtagacttgagaaaataaaatatttagcataatgtactggctttgcacacctggccaaatgttctagttgcattaaactttataaataaagtttccttttgagttaactagtcttttgtattgctattatttatatatttattctatttcaaataccagatatttaacagaatgacaaaactgcaactggtaaacattgttttctctcctatctgtaagagaatgctacagttaattttcctgggagatatttatgcctttatttattttcaagctcttgaattttttccagaaataccttgtggcttacttgtttgtttttattgtatatatgtatatataattttttgttttgtttaattgttgttattgttttctcccttttatactcagccaagtgaattagcacaagctaagggactaatgtcaatatatcagtcctcaagcacataatatcttaataatttttcacccacaatggtctgtttttttaggctactgatttattctttaaccagaggcctaatgattaagccactgaggagggtggatgttagtgaaaatgctgccggctccttccatgtctgcaaactgtaagatatgttgacacaatcaagcatccatgtcaacgtatgtatgtgatggatacccagtatatactcctggggcaatagcactgttcaggaaatgagctattacaggtccaaattggccacttatattctggtagtggcaagtcatttaatttctgtaggtctcagcttttctatttggaaaatgagaataagaaagtgtacctcatagggatgctatatagacttggagacacattgagacactctatttactatggaatagaattagatttcagctagttttctcttattgtatgtgatctgagaggtttgggaggctaaggctagttttccacactaaacaatagaatatattgacattataatatcttgatatcatcagcactctgagtatagccctcaggtttaaaacaacatattcactgtattaccatagccataacttgtaagagatcaagatataaaactagaagccacttcattatttagataaaatatttattcccaatgtcccgaatactcatgcatctctcacacacatggagtaatgttagaatttctgggaagtcaaataaatgataaaattaccctagagaatgtggactaataggtaaagtatgaaaaattttaaggaaaatatcttccaagtcatgtaaaactccataccccacaacataatatatctcctgcttctaccaatgtttcccagacccattatctttttcatttggacaataataaatattgaaacattcttcctctctgacttctttttattattctctctaatattcttattttatatttattattcttcctcccagtagaatattctttttccagacatcatataacactgttcattctctcaacacctgaggactctataaagaaacaacactgctataaagaaacatctgaagctgggtaatttatacagaaaagaggtttaattggctcacgattctgcaggctgtacagaaagcatagcggcttctgattctgaggaggcctcaggaaactcacaatcatggtggaagcaaaggtgaagcatgcacgtcctacacagccagagcaagagcgagaggggcgggggaatgctgcatactctgaaacaagcaaatctcataagaacttactttagggatgatagcaccaagggggatgttgttaaaccatgagaaaccaccccaatgatataatcagccacgaagctcaccttcaacattgaggctatcaatttgacctaagatttggttgaggacactgatccaaaccatttcagattagtttaggtttacctagttataatccatttccatatttaactttccaggcctactgttttccataacaagtgctctcaggggtgcttttctgtacttatatccaatgctcaacccaaaacttaacctcaattgactatgaatcgagggttaaaattttaaaatttatataatggtgctcaaatgactttgggattccctcaatctttgtgtacctccaaagcagttgtcttagtcagttttagctgatatcacagagtaccatagactgcatagctcatattcaacagatatttattttgcttagttctgaagcctggaagtcgaagatcagagtgctagcataattggattattgtgtggggccccttctggactgtagactgctgacttcttgttgtatcttcatgtgtcagaaagacggataaagagagctctctggggtctcttttacaagggaattaatcccatttatgggagcttcaccctcaagacataaattatcccccaaaggactcatgtcctaatgccatcatattggaggttaggatttcaacatatgaaatttggctggacacaaacattccatccataacaacaatgctacacactaagattacctgtgagcttttaaaaaaatattgaagtcctgggcccatcaattaaacattctgattcagccacttgatataagtattattcttattttcattttactaattaggtaacatacaaaaggatgttaaagtgtgattaattttagaatgagttttttgaagtaagttttagaattgaatttatttgtgaatatttaaaaatagaattcatccttttctgagacagtccgtgtacaattactgctagaagaaaggaagatggtgatatttcaatgacttatgactctgcaatatttaaattgactaaattcatgactaaatggaaattttgctctgaccacagaagaaactatctaaattataatacaaagctatgtaaaagtgaataaaatcatttaatatcaagtaccagttcttagagatggtcacacatttaaaataagtagtatcattgtgtttcttatcatatagtacctagatatgttaccattacaacaatcaaaaattcttaacatatattcttcaaaagaaatgaggtcctcaattgttattataaaattgcagatagtgaaattgaaacctgagaggttaagttactttcccagaggtaaaacatatatttgtctgaaggccttatcacatcctaagaatgtgatactatctgctcggctcattacactgcaagaatcatttaggcctcttatctagagttagccatactgaagttcgaggacactgttctccataagaccatcttcacttctgacactagctgcaagtttgggggtagttttccaaagcagttcccatgtcaataatttactatatggactgacagaacatactgcaaggtattatactcatggttacaggcttgttttgtttttgtgggttttttttttttttttttaagatggagttttgctcttgtcacccaggctggagtggaatggcatgatcttggctcactgcaacctctgcctgtcaggttcaagagattctcctgcttcagcctcccaagtagctgggattacaggcaccaccaccacacctggataatttttgtgtttttagtagagacagggtttcaccatgttggccaggctggtcttgaactcctgacctcaggtgatccacccacctcggcctcccaaagtgctggtattacaggcgtgagccaccacgcctggcctcacttacagtttattacagagaaaggctacagattaaaatccagcaaaggaaaagatgcacaggaatgtctgggagggctccaaattagaagcttctgttgtcctcccctatgatgctgagcctcccagcatcaatgtgtgtcagtatgtagagtattgccaatcaaggaagctcgcctgagcttatgatgagctttagtgtcctaattttttgtgtgactttgttacagagtcatgacaaattgtccacattctggaactcaatctccaggtccactgataccacaagatccaaagtttccaccttaaattacatgattagtttttctagagtggccagcccctgccttaaatagacattcctatcaggcatgacatatagtacctcccaaaagccatgggcaagggcaaaaattttctttgggcaaggccacatttttactacacacctccaaacactttctatagtcatttgtttctggtcattcatttcttcaagaattattattcagttaatagctactctgagagacattttgccaggtgctgaaaatcaatgaagaaaaatgatacacccttatgaaattattgagggagcatcataaagtcacataaatcaccatatagtcatgctttgtttagtgatgaagacacattctgagaaatgcattgttaggcaattttgttattgtgtgaacattacagagtgtacttacacagacctagatggtatagtctgctatataactaggctatatagtatagactattgctactaggtgacaaacctatacagcatattattatactggatactgtacataattgtaacacaatggtaagtgtttgtgtatctaaacaaatttagacatataaaaagtacaggaaaaatccagtactatcatcttagggagcaccgttgtatatggggtccttcattgacagaaacattgttttgcaatgtacaaatataagtaaagtaattattaagatagatgaagtaaagtgtagggttttgtaactgaaaaaggtcaggattttatatagacacaggacttaaggaaggccttatgaagaaagaaacatgtgaactagtgtctagtagcctgcagctggctaaatcaaaatcagtttcagtaatgttgactatagactatgttcagatttttctgaatagttaacctttaagattttacttaaaaaaaattgtcccaagtacctccctgaagacaaaaattaaaaagcacttcaactcttacttcttagagaaatcactaaactgctctccatagtggctgaactaatttaaattcccaccaacagtgcataggcattcccttttctctgcagtctcgccagcatctattagtttttgactttttagtaatagccattctgacttgtgtgagatgatatctcactatactattcaacccagcatccccttactaggtatatacccaaaggaaaataaattgttctaccgaaaagacacatgcactcatatgttgacagcagcactactcacaatagcaaatacatggaatcaacctaggtgcccaacaacagtggactgcataagaaaatatggtacatattcaccatgaaatactacacagccataaataagaatgaaatcatatcctttgccgcaacatggatgcagctggagtccattattctaaggaaattaatgctggaacgtaaaatcaaatattgcatgttctcacctataagtgggagctaacaattgggtacagtagtcattaagatgggaacaatacactagggactactagagcagggagagagggaggagagtaagggctcaaaactgctactatgctcagtacctgggtaatgggaacatttgtatcccagacctcagcatcatgcgatatacccatgtaaaaaacctgcacatatactccatgaatctaaaataaaagttaaaattattttctaaaagggtgtcaacagcacatacttaatgcaatgtatgctattttacatacttatgtcagtgcaataaataaccatgtgttgagcatctatcataaacctattctaggcattgagtaaataaccagcagtgaaaacaaaaatagaataaaatctccatcttcatgtagctaacagcctagatatttaaataactgaatttcaactctgaaggcagttatagaatagtggcttagaatgcaaaatcctgggttagactgcctatttagtaccagttctactacaaaatgtctgtgacctatgtacataatttaatttgtctgtgcttaaattcccttatatgtgaaatgtaaatcatgaaaatacttatctcttgagcagctgtgaagactaaaacagatattgaataagctagtctggtattatttaaatactgaatgcattttgatatagcttttgcttttttactgacttacggaatgcttcaaatttcatggcctcagtttcctcatttgaaaataaggagttaggatagcttatcactaaattccttaaaaaatattccatgatttttttatgaccatagatgggctcctaaaggccagactttgctcctttgtacataattttgggaagaacctgggacaaagtaattactaccttatacttgttttttattatgttgattgaaaactgaaagttattccttagccagaattttcatgtctgctatgatggaggtaaccattttgcctaagcggaaattaaccgagactacagactcaggtgataagtttttgtggagtaacacaattcattaagatgctgctggaaagccatactttgaaagaggtcttctgaagtcagcaacagaaaattaagcttggcaagaattagaggctagatgccccactgttatgtgtgtgtgtgtgtgtgtgtgtgtgtgtgtgtgtgtgtgtgtgtttctctcctcatagtaaagttggagtagttgtttggcatttccctcttgacaggagatgactagggaaaaagacatctataaattgctttcctataaagataaagtaaaagctaatttaccagtgtcctactgaatctcatgcctcacttcaacagatcaaggtagagttagtgatcagaggaaacaaatgctaaagagatgtcaaggagacactaagcaattgctttactgactgctactgatccaataaaattagttcagaccattgacaattttttttcctccctaaattgagattcattaaaacctaggtcaaactttagatagtcagtgtgatgtaaagaagacttacggtttgaaagaaaactgatgaaatggacagggtataatcaaaataagaaaacatgaaaacaaaagtatctcttttgtaaacccaaaactgagcatttttagaattgatcaaaatcttaaagatatatcaacttgaaataaaatgaaatgggaattaaatttatgataatataaggggatatccccaaggtaagattcttggtaaagtgcatcagttgaaatatataaataacattaattatgtaattggcagattttgaaactctaagcaagaaatataaataacattatatttcagtgaagtttcataatctagaaatatcatacaaagattcatgaaggtagatgttatactaataaaaaatatttttgctactttgaaaaatatctttgtaaaatgattaaagcaatagaaaagtgtggaaatcacttaaatgtgatttatttgacaaattattattacctttttaaataaataacaagcaattttttaacaaatataatttaaaattaaataatctcattgagaacaaaaattatggaaaatagaaataaatcttatttgactgcaaattgaatttctgaaaaatagcataatatattttcattttggaaaaatcaatttttgttttaggtttctattttttttttttttgagacagaatctcattctgtcaaccaggctggcatgcagtggtgtggccatggtgcaccgtatccttgaactcctgggctccagccatccccccacctcagccttttaaataactgggactacaggcacatgccatggcatccagctaattttattttattttactttatttttttttttgtagagtcagggtcttgttatgttgcccaagctggtctggaactcctggcctggagcaatcctcccaccatggcctcccagagtgataggattacaggcatgagccacagcacccaacctgttttaggtttcataatagtttagttacttaagatatttcatgataagttctattattaaattaaaacattttactgagtttgtttaaaaatttaatcttgacttttcttaagtcataatatgtttatattaatactaatccaaagtatattttttctgactcttaaatggtgccatcaggattctgtgatcatttaacatgcactctgcactttaagaacttgaatttctagtcataaaagcaatacaatcacattagaaacatatgaaaaaataaaaagatatttttgtcacctctactctcataatttctagtgtcttccttggtctttacctgtttagtctcttttttccctgtatacttctaaatataacataattttggaatacctacaatttgatgttatgctttaaattttaagttaaagatactttcaaattgctacgtatatttgaaatcaggactgtaatagatgtgtacctacatgcatacacatatatgcatatagaatatatatgtagtaatgtgctttccaattgttctatttttgaacgttaatacttggttttgaaatttttgatatgagtaacatgaatgtgtctataagaaatacacatgttccatattttatatttattttcatagaaaaattcttagattgatgattacttagtcacagggcaagtaattcagttttgaaaaatattttccccctttttacttaaatgtattctgggtttggatatttaaataacatatataccaatctaaaagaaaaaaagtaaaattcccaagacagaaaaaaaaaaaaaagaatgtagtgatctttggcatcaaattaaatttacaaaagtggttgccatgatactttttcaatttcttgagcagcacaatttcagtgtatgcatgataactatacattgccattgatgagctatacaacagctatgctgtgttttatggaagatgtctgattcttatagcagctcttcaagacaggaattgttacttcagtttcatggatgttcatagcattcagactctgagagagggcaaatggcataccctaaaccacataattattgagtggtaggaccaggaaaacaaaagatttttgatcccaaagtgagaaaactgtaaggctacagatgtgcattgctatgtatgatatttgagtcatatcaacctacttgttatttctctgaacagtcattctccttttctattgtgaatttacagctgtttcttctttctggacatgtttcttcataccagaaagacttatgttctcctccttcatttgacatctcaccacttaaaattctacattcgaaattagagacatccttttaaaaaagtagacttaaatttttagaagaatgttagatttttttagaatagcataaaggaggaaaattgagaagatagtacgtagaatatccatatattccattcccactttcccctactattgacatcttatattcatatggtacaatttttatgataaactaatagggtatattattattaactaaagttcatgcattattcagatttccttagtttttacctagtatcctttatctgttccaggatctcatgtaggatttcacattgcatttggttgtcaagtttatttcgattcatgttagctgtggcagtatctcagcctttgatgagtttgacagttttgaggtctactactcagatgtttagtaggttgtcccactactgaaaattgtctgatgattttctcatgataatttttacattataggttatcgggaggaatactacagagggaaagtgccattttcccatatcatattagaggtacctaccatcaacatgatttatgattttcgatatagactttaatcacccggctgaggtatatttgtcaagttcctctcctgtaaagttcctttcttttccttgcttttctattctgttttttagatttggtgagctcttctctttattccccagctaccattattattgctcatccaggagggggcaatgattttctttcattttctttttatactgaactatgagttgatagagggagcattctggttatctctgcaccctagatgcctatcacggagtgtgctgtatggaacagtggtccccaacatttttggtacctgggaccagtttcatggaagataatttttccacagaccgggatgggggagatggttttaggatgaagctgttccacctcagatcatcaggcattagattctcataaggagcgcacaacctagatccctcgcatgcacaggtcacaatagggtttgtgctcctatgagaatctaatgtggcctctgatctgacaggaggtggagctcagacagtaatgctacctcacccatgctcacctgctgctgcgcagcctcgttcctaacaggccacggactggtagtagttcatcgcattggggttggggacccctggtataggggatatacagttaaatatttgttgaataaagggatctttttacaataagtcaaattttgtaaccccaaacaagtttttttttttttttttttttttttttttttttttgagacagagtctcgctctttcgcccaggctggagtgcagtggcgcgatctctgctcactgcaagctccgcctcccgggttcacgccattctcctgcctcagcctcccaagtagctgggattacaggtgcccgccaccactcccggctaattttttgtattttcagtagagacggggtttcaccgtgttagccaggatggtctcgatatcctgacctcgtgatccgcctgcctcggcctcccaaagtgctgggattacaggcgtgagccaccgcgcccggcctccaaacaagttttaatgagcaaatatggcataatagatggtatcttcaaatagattttgccgtaaaattgagacatgcccttaaaatatgtgactgtggttttcacatatttacaaaagctagagaacattggtagcaagcagaaattttctaaattttaaagcaatgaaataatttgttcaaaaaattttacacaaattacatatataaaaaagttgagtcgttcttgtcaaagtggaagtgaaggatttttataaagataaaatgttctataaaaactcgtgaaaatattagtaaaagcaaaatatcttgatattattctaaacaattttctcacaaaagtaagatattttagttacactaataaaattaatcctgaaatatgcatcttaatatagagtggaaatttcctgtaatattactggctgaggcaagaaatatctaatctaaaagttgtttataaacctatcaataatgtttctcctttcttttatttctatttttgattacaaaattagattttgaagaaattttttttacctttttttcccttagaaatgagagtggtgacattgccttgatataagaaatctataggctaaaaataacatatcttatacacttgaatagagatacatttcctcagatgttctgtttcatttggcttgaaacatggcattttgtgtttgtttgaaggtaggctcatcttgaggacaatatttaggttattcttatgtgaacttagaaattaatcaccagctacatagtaaaaaatccactttatcatgaagtttttatttattcccaaaataaaaattacaaatctccatgtctcataaatcccaggaaactagttctaatttgtgtttgtttgtttgtttgtttgtttcctactgaaccattgatacatgcttaatatttgcaggaaaaggtctaaatatttaaaattaagtcaggtattaggaactttggccaacatcagatgaattcatacagccacataaaactgcttcctcagacttgtatttaactttacgcactgcttgacaaggctgtagaatttattgttatatcaatagcctcctactttacaataaatacaacattgaataaagtcagggaacaatggtcataatttttactaaaggtatgtaccatataaacaacccaatattaaatgaataattgtcttctacccaaaacatacatattttttaaattaaatataaaaaagaaatactagcattttctggtagtattttaaaacacttagtgggcgatattgaatcttatcattctttctattacaatcatctaatttgttaaatcctccatatctgttgatatttcctccatgaagtagagctattgctctttaaatatagaggagattttccataaaagggtgtttaaatatcctttctcttctgtgtttctttcatgaagcaggagggagaggtgtattgaatgttcatgagcaaagactgtgaaagtttatagcccttggcctgaattctgattcctttacttgtgaagtttgagaactagtacaaatttataaattgactgagcctcaagttcttcattcataaatgatagaaaaaaaaccaagtcactttatagattcacagtgaatgttaaaataaacacacatgtaatgaacaatatttgacatatctttatcactagcagtaacacatatataaggtagaagtaggaagaaacaatcaaaaactcaaatattcggattttctacaggctccagagagattcttagatatttctatgtcccccaaactataaacacattgttactgtttcgtgttttcctatcccatctttgcgtattttaaagcttcttttagaatctttaaagcataaagaaatatacaaatgcactatgtacatgtaagaaagagagtattctaaggttgtctatttttcctaaagtagagccttttccctttgctcctgtgatcatatatctgaaactgtgtgaatatatatatgcctcaatattaaatatgaaatttaaaagtaaacacagtgagaggttgaaataaatgtaaataatgacagtggtagtattatatattccagtaccattttgtaatttatgtgagattattataatatacccagatgcctttttatgcatttgcattcctttttttttttttttttttttttttgagatggagtctcgctctgtcacccaggctggagtgcagtggcgggatctcagctcactgcaagctccgcctcctgggttcacgccattctcctgcctcagcctccccagtagctgggactgcaggcacccgacaccccggctaattttttttgtatttttagtagagacggagtttcactgtgttagccagcatggtctcagtctcctgacctcgtgatccacccgcctcagcctcccaaaattctgggattacaggagttaagccaccgcgcccggccgcatttgcattctttaagagatctacaactacttatttatcttgctttatatttcttaagcgtgttattgtaaaaaccattctccaagtgaagagaagaaaaaagtagccatttaatttccaaagtacatgtacaaacacacaaggtacaagtagtttggatttcatgatattgaaagtgatgtctgcactttctagtgggaataaagcttagaactgcaccacagtagggatcgctattctctaggtcagctgtggtgaggaaatatgaagggaagtttcagaggcagaccataagaatacaaacgcctcttattcttctgtttcagtgaagtaaattcttctagggaagaaaagagttttaggtatattatgtaaaaatatgataattataagcatcttattagctgtaagtaaatatgtaaagtaagaaaaaaattaaaatgtgtctggacagtttagatcatttaagataatcagtttcaggcaaaataaggaactagtaggctgtcagctccttgtttacagaagtttggcttaatcttcatgtccctgaaagtacctattgtagtatcttgatctataatattaacaaaaataaaaataagagtgcatttctaagttacttaggttattttttctcttgtgttttcttgtctcactttacttatttggaattttaatagatggaaatatgcattttcactgcattgtggaggaaaaaaatggctctatttaaggctgttaattatgattaatgttaacttctttcttccagccttaatatctgggtaaatataaaagattttttttttttagtttccataaaatacaaaggacagttgaaaacaaatttttttttttgttattattccatttatatgagatgtctacaataagataatctataaagatagaaaagagaaaacaaaatttataacatttttctacaagctgtataatatatagagatgtaatatatctggcaaatataagatagacaattggattggaagaaagtgttgggatagtagatagtatgtatattggagtgggagaaggagttgggatagtagatactatgtatattgtaatcactggtgccatcacaccacacatacatataaacacagttttatatatacatatgtgagatggaattttaaaagtttcatataatttaaaaggaggcaggaagaattaaaggtagaaataaacaattatgtaatcataggttaagattttaattcccatttcttatcagttggtagaaaaagtagaccaaaaacatgcgacagttgcataattcacaatcacacatataaattatatactgggtcataaaaatgtcttcatatatttaaaacactttatatcatgcaggaaatagtctctcaccacaatggaaaagttttaaagcataacgataagaaatcaatgacaacttcaatatttgccaattaaacaacaattctaaatggtgtattgatcaaagaagaaaccataaggcaaatcagaaatattttaaatggaaaaaggtataatttgatggatgtagataaagtattgcttagagagaaatttagtgctttaaatatttatattagaaagcaaaaatagggcatggtggtgggcacctgtagtcccagctactcgggagtctgaggcaggagaatggcgtgaacccaggaggcggagcttgcagtgagccgagattgtgccactgcactccagcctgggcgacagagtgagactctgtctcaaaaaaaaaaaaagaaaaataaagaaagcaaaaatagtcaaaaattaatgccctatattctcccttaggctattataaagagaagaggagaatgagaatgagaatggcagaatgagaagaactgaaataatgaacataacaacagaaattaataaaattgaaaacaagtaatagagaatgttaacaaatccaacatttgtttttttgaaactaataaaatgaataaactcctaactaagttaatgaagacaaagatagagggaacatagatttttagccccaggaataaaaggggagttatccctagaaacttacaaatctttactacccatcatggtttgccccaactacatacggctatttaaattaactaaaattaaacaaaattcagtttcttagtcacagtctcatttcaagtcctcagtagccacatatggctattagttaccagattgggcaatgccgatgtagaatatttccattattacagaaagttcaattgggcagcattgcccattaaaaggaaaataggagagtgttgtaaacaagtttatacacttgtacaatgtacaagtacaaatgtacaatgtacaaattcaatgtacaaattcattgaataatatgatttagcaaaactaactccagatgaaataaaatctgaatattcttgtatcttttaaagatgttatctctcttgtatcgattaaagatgttaaatttgttatttcagatcttcccaaaaagaaaactctgagcaaaatgacttaattggctaattttattaaacatttaaggaagacattaaaatcttacacaaactctatcagaaaaaagggaggaagaaaatatatcccaattcattttatgaggccagtataaccctaataccaagatctgacagagacattgcaaataattttaataatagtaacaatggcaaatagcctttataaacatagacataaaatttttacacaacattagcaagccaaatcttttaatacagaggaaggtaacacattataataaaaaaaagtttagcttaggaaagcaaggttgactttaaatgtgaaaattattatacaatatacttaactctattaagagttttaaaagtatatgaacatttcaaaaggcacatagaaaaagaacttgacaaaatttaacacatgatgattaatatttcagcaatccaagaatagaattttcttttcctatcactatcaacatgcctactataaggtattgaacattttttttttttttttttttttgagacggagtctcgctctgtcacccaggctggagtgcagtggcgggatcttggctcactgcaagctccgcctcccgggttcacgccattctcctgcctcagcctcccaagtagctgggactacaggcgcccgccactacgcccggctaatttttttgtatttttagtagagacggggtttcaccgttgtagccgggatggtctcgatctcctgacctcgtgatccgcccgcctcggcctcccaaagtgctgggattacaggcgtgagccaccgcgcccggcctgaacatttttaaaaatattattattcttggccgggctcggtggctcacacctgtaatcccagcactttgggaggccgaggtgggcggattacctgaggtaaggggattgaaaccagcctggccatcatggtgaatccccgtctctactaaaaataaaaaaatcagccggccttggtggcgggcacctgtaattccagctacgtgggaggctgaggcaggagaatcgcttgaacctgggaggcggaggttgcagtgagctgatgccaagccattgcactccaccctgggcgacagaacaacactccatctcaaaaaaaaaaaaaaaaaagaaaaaaaaattattctcaccttttctattccatattgtactgctcattgtaataaaagaaggaaaagaggccaggcgtggtagctcacgcctgtaatcccagcactttgggaggccgaggcgggtggaaaacgaggtcaggagttcgagaccagcctggccaacatagtgaaaccctgtctctactaaaaataaaaaaaattagccgggcatgtggcgcttgccacctactcaagaggctgaggcaggagagtcgcttgaacctgggaggcggagggtgcagtgagccaagattgcaccactgcactccagtctgggcgacagtgcaagactccgtctcaaaaaaaaaaaaaaaaatgaaatatgggtttatataggaaattctgaagaatgtaaagaaaaactactgctaaaactaatatgtgaatttagtgaagtccctgaatacaatgttaaatgtataattttttgtagaaattgacatgttggttttaaatttttttggaaatgcaaaggacctagactcatcgaagcaatctttaaaaaggatagagccggataattttacactgcttgatttcaagacttattttaaaactttaataattaaaagtgtggtactggcacaaggattcacatgtagatcaatgaaacagcaagactagaaataaacacttaatcaatcattttgatttttgacaagtgttccaaaacaagccaaggtggaaaaaagtcttttcacaaatgttgacataataactgaatatctcatggaaaataatacatgtaactctacttctgtttatactacacacaaaaataatttgagttagatcatagttctaatcataaaagctaaaatcgtaaagcttttagaggaaatcttttaactacgctttgtgcgtgggaattttcctaacaaaaatttgggaataaaaatagagctatctttctttttccattcctagtagtaccttcagaaatttcttatttcacataagaactattcaataaccacctaactaatccctgtacatcctatacgtatttccaatctttctttcacactgccaccagacatatctttctaaactgttgttttattcaagtcattataattttcagtggtatctcattttctacagatcattatttttcactaaagcccaatgtctcatacactttattgcttcatttattcctttattcctttattctttcaaacaattattgagttccccagtccttgattaatccatctgtgagctagtcccttcttttttattgcactgctggagaaaaaatatcatacaaatgtggaaattgagaccactgtgcatttttattttcaaacttcccagaaatacttcaaggtttcctgactcagctgtcatttgtgttctccacaagggttatttctaacattgcactctgtaaaactctgactgtgccacctcctgcttaattctcagcgtgtgacctcatctactcttccaagaaaaagtataagcaaacagcaaaagctcagataattttttattatctaaaatgataaagttgtccacaattataaaatacctatattattcccttcctttttatgacaagtgtcattctttttttttttcttttaaagtgtctctcccaccttgaccaagatggtgaaaccacgtctctactaaaaatacaaaaattagccggatgtggtggggcacacctgtagtcccagctagtctggaggctgaggcaggagaatcacttgaacctgggtggtggaggttgcagtgagccgagaccgcgccactacactgcgtctcaaaaaaaaaaaaaaaaaaaagtgggtctctttgtctgtgctctcacatcctcaaggactttgctgtttccattctcgtttcccctacatgtctaatctatgtcagtttcctaatccttcagtgattccttattactcatggtaatttctaaactccttaacatagtttatgagcttctgtagcctttcccacctcaccacctccccacctcccccgccttccttaaaatcgatgttcttgtcatcccaaacttctagtttcctgattataccatgtactttctcagttttggacttctctcacatgctattcttccttttagataaatctttattcctctcagcctgatacatttctacttagcatgtaggcctcaacttacatgcaatttacttcagggaatcttccaaaacacccctcatatttttttagcacttcacccagtatctcccttatcataagacatgccattttatattgtaattacttacttacttgtttttatctcttaagtctgaaaatgccattagttcaggtatcttgtgtataaacttgaataattgaacagtaggtggttaaggaagcaaggcaccatgctaggcatctggactagatgaaaggcagactctctgttatcaaggactttacaatctaggagaggagacaaatgaaccacaaatgataatattaagatattaaatactacactatggtgcctggccccatttccctttcaacttagcctccaactgcttacattctttaaacctctacacccgtaagacatttctactacttaccatttgaagaagtcttatactttttctttacatgttttgctcatgcttctgaatctttctggaaaccatggacacttctacaatcataaacaacattaatgaaatttgctcaacttactatagaccatgagattctctccttcctctgcactttaatagtaattctagtactaccattcatatgataatcatgataaaggcttgattaattatttatacatatatataattacatcacattttatattgaaatctcctggaagactaacctattatatacctgtatatgtatattctctccttcctttgaacctatatagatatacatatacatatacatatacatatacatatacatatacatatacatataaaacccccgagaggcccaataggaaatagaaaagtatcttgctcatagaacttttatcataattgatttttttaaaaaattatgaattatgccatcagtcctatttctgctctgctgaatcttttggattcattatctattgtccagattgtctctacaaaatataaagctcatttatcttaaaaagttgaagactagtgttttatttatattattaactagcttttacatgtcccaagaattatattacgtgctttatatacactttgccctttagtctcccctgtaatcccatgaagcaggcacagctggtaactctattacctttgaaagcaatgaggtccaaaattggttcagttactttttcaaggtcatccaaaagaaatttgtacaggcactatgacatactttagaaaaataaatcctacacatttaagaaaatatatatttttagaaaagtagctactatttaccaagatcagagttggcttggtatttggccagcattatcttttctttttcttcccagaagatttgtaaagttaatgttcttatgatcactttacggtttagaaacttaagacttggaaggatcaagtgatctcttcagggtagctcacatagctagtaagtagaagactggatgtgaaacagtctgtcatcaagcttatgtttctaactactataccatactgccttgttaactcttacttaactctttagttttgtacctctcagtttgtttaatatctctttattgttgtgttatggcatagaatattaatgtgagcagaatacagttatgtaaatttactgactgggttctagataactagtttaacaatatactgactctctactatttgaaaaacctgcttgagatactacaattttatcaaatttaaagacataagtaaaaatattaacatcttttaatatttcattaagcatatgtgttcaagcacatgccttcctggcaaatctatcttgttttagaattagtgattggcatatttatataagactcattttatacttttaccaatgtctctcttgtaactcttacccagaattttcagattttttttctgcaaagtctctattttataatctagacagagttataggcccaggtgggatacctacaatcattacatttttgtcacagtctttttcatgtaataagtaaaactaataaaaagacatactaatgtaagataaaagccagctgcattatttcaatccagtgattgaattctatcaatcaaggtaccctttgctgccagaaaagaaagcaagaaggttttatgtggaggaaaataaggcttagggtaaattaaagtaaaaagctcaatctataaaataaatgtatttctaaaattgggactatgaaccaggaaaagcaaacagtatttgataaggcctgtctagacattggtattttgagtatgaatattgaataataaaatggaaatgaataatattatgataagatcaggcaaatttatgaaaatataaatcaatgagagagagcaaaaatctgtggcactgtcattttaaggcctgaatacaaatatgggctgcacctttatttggcaaactctctaatcagctaattactttataatgcctactatgaaaatcactgattcttttcagtctagttttattgtggatttaataaaaccactttgttttcttaataaaatttactttctattattaagtactatatgtttattatcaaaatttagaaaatttaggaatgtacaaaaataaaatttgctaggtagcagttattttcagagtaaatccttgctaacacttttattactgggactttaaacaagccaatattaagcgttctgcatcctaaataagactatataaatctagaatagaaaattatttattattaagttgttgcaaaagtaattgaggtttttgccattgcttttcatggcaaaaaccacaattattttgcaccaacttaatagcttatatgttgtttcttgtaattttttatttacttgtttagtttctaacgtagtctattatatgtgttaaatcatatttgcagagataaatgttagggacatcaaaagacacatttaaaactatgaagtgtgagaaatatcaattttcaccttgtgtcttatgtgtgtacatgaaaccaaataactcgtcatatggaagctggactgtttgcactcatgtaattacagtcctgtctcttgggactatgtggtcactttggggaaaggcaatgtaattcagagcatgtgcatgtatctctcttgaaacccattcacaatttgaaaaattcacgcaacgtagtaagaggtggctcagattcctaacattacttttaaaaactctaaaattgaccataattatggttttcctttacttaaagggattcaacttgtttacttgggcttttgctactaaattctgtagaagcacaaatctgctggtagaagaagagataagggacccacagtctataagtttgcatccacaaaataaaagtaaattgctaatggaaactgattttctattgacagtgactagcttgccttgagacattaactttatcttcaccaacatgtttgaaaacaacctattgtattatcccttatcttcaccaacatgtttgaaaacaacctattgtattatccctcccctccaaaaattagtgctgctcagattgacaaatcgtaagtcagagcttgcctatattaagaggcaaacgaatgaatcacatcttcgttgagaggatagcttgttccaggctccaaaagaagaaatgaaatatgacagacatgtagttttcattcagcacatgtttactgacatatttcatgtgtcagacactcctaaggccctgggggtactggagaaatccagtactttttcttgcaatgctttcaagcaattgttttctaatttgtgacatgccaagcaaaccactttctattaccctaaggactgattaaattgttctagaaggcaattaactctttgagtaatcacttctacagtaccaatcttttggtacttttccaagtatcaaaaatccatagaaccaaaaggatttactgtaagacttggtgttaggataattttgcaacctgcatcatggatttctaaaatgaattctcctgagtatatgccttgattccttccccaaaatactcaatatttaacattataagaattactataaacatttaaaaaattaggtgcataatcaattcatttaatcttttcaacctttttttttgcttcgtttctgtatggtttgtataagatacctactatcccccaaaaaactgttaatttaaaatgtcctatttatttacaaaatcagagatgttataaagtatgagagaataattattcttcacataaattaatgataatccttgaataatttatctgttggctaatttaaataatttttgcataggtaaataggtatgtccatcccctccaataaaacggaaccaagtgttttcttctagctccactctcaggctgtgtattctgcctgtgcaattaagagtaattgaagaaatctcagtattggccagagacagataataggaaagggcaagaagtaaaattaaggaaagggtatcaactcagccttccctggatattttacccccaaaagataaacagaagaccagtttaggcagaagtcagtctgttggtcttccagacttgaatgtatggaattgtgaagcctacattattttaagcttcaacaaagcaggcctcatgggtccctttgctccttctatgcaaagtattccctaggtgaaataaaaataagctaagggaaaagatcaccctcatcattttagccatagtgttacactaatctttcttcctaagagtcggattatagccttaggaaattcactctgctttacttagtcagcaacgtgacccagtacatgtagttaattaaataatagattaattaattttaaaattaaaggccaaagtgaacaggtttctaacgtggcatagtacaaacaagatccaaagccttcttctgcagctgacctatttatactaggaatatactattatatactatttatactaggaagcctatctttgccaggcccgaagcaaggatagaagcctggagtactgggttctacctagaatgtaacagaaaatttggataatctcaaggtgactcttcctgggactgagcaattctctgagccccagccaatttctcctgaagcattaatacctctccttcagaaactttattatatttttttcctttacctttgtagagtacatataatgagtctaagaaaggaaatttgagacaacttaggattttgatgagtttgactcatgctcacgaatcaaaataaatttgcttgttgaaatattgggaagataagcttgagctcttatatttacttaatgttttcttattattttcaagaagtatggatattattattcttacgtgtcattgcaatatcccataaggttattgtattttattttgggatttttgagggttttattttgtttgcctttccaatgtgcaaatacatataatctgcccctttgggtagcacttgtgattaatatactactctctttttaaattatcttgtatctgcaccacttctaaataataattggattgtgtgatcttctttttgggtgagaacattcacctcacattctttccctgggtgtcataggctagctttttccaatctgacatatatgcaccaacagaaaaaaaaaaaaaaaggatgaaaaacaacaacaacaaaaaatatatactcccatccatatattttctgattatataatctgctatcttttattcccaaaagttaaagttttaatcatggctttgctgttcagttaatcagcctgaagctatgttattaaatgatatctcaacagtattcacagttaacactgaaggcaagaaaaagtgaaagcaattaaactacctgtggaacttttcaaaagaagacatacacgtggccaacaaacatatgaaaaaatgttcaacatcactaatcattagagaaatgcaaatcgaaaccacagtcagataccatctcacatcagttagaatggctattattaaaaagcctaaaaataacagattctggcaagactgtggtgaaaagggaatgcttatacactgctggtgggaatgtaaatttgttcaaccactgtggaaagtaggttggcgatttctcaaatagcttgaaacagaactatcgtttgacccaggaatcccattattaaatatacacccaaaggaaaataaattgttctaccataaagacgtatgcacttgcatgtttattacagcactattcataatagcaaagacatggaatcaacctagatgcccatgaacagtagaccagataaagaaaatttgacacatgtacaccatggaatactatgtatacatatccataaaaatagaatgagatgggggccgggagcggtgtctcgcgcctgtaatcccagcactctgggaggccgaggcgggcagatcacgaggtcaggagatcaagaccatcctggctaacagggtgaaaccccatctctactaaaaatacaaaaagttagctgggcgtggtggcggccgcttgtagtcccagctactcgggaggctgaggcaggagaatggcgtgaaccggggaggcggagcttgcagtgagccaagatcttgccactgcactccagcctgggcgacagagcaacactctgtctcaaaaaaaaaaaaaaaagaaagaaagaaagaaagaaaaaaatagaatgagattatatcctttgcatcaacatggatggagctggaggccattatcctaagcaaactaatgcaggaacagaaaaacaaaccccatgtgttctcactagtaaatgggagttaaacattgagtacatatggacacaaagaagggaacaaaagacactggggcctacttgaggctgggaggtgggaggagagtcaagatggaaaaactacctgttagatactgtgcttattacctcagtgacaaaataatctatacaccaaaccccagtgacacacaacttacctatatagcaaacctgcacatgtacccctaaaactaaaagctaaaaaaaaaagtaaaaattatcaagccaaagaataattgaaataatttacagactgtggtaagtgctgcgaaggaagtgaagatagttatgtgaaaccacaaacaggttgagagaattaaatattacaagtgttttggaaagtggaaataaaaaataaaatacttttggaaagcaatgagtgaaaacagctaagatagccttcaccaaaaaaatatgatccattaaaatgaatacttttgtttgatgaaatccctcagaaagcacccaaaagtgtaaacatgtttgcactgattatatgtgaaaacttatagagaggccatctggtttatatttttaacttaatcagttttgaaataaaagttttatatatgtgtatgtgtatatatatatatatgtacattacatggcttaaaattcaaattgttctgtaaagcttaacatacagatgagtggttatctacttcacactacgccatttctaatttctgttctccaaagacaccccacttttagcttttctttgaatgtgttttagtctgcatatttaaaaaataacatgcttatactgatatttcttttcttttattttttgaaaaagggtctcactctgtcatccatcctagagtgcagtggcgcaattatggcttactgcagcgtcaaccttctgggcttaagttatcctcccacctcagcctcccaaatagtagtcaagactacagacatgcaccaccatgcccagctgatttttgtatttttttgtacagatggggttttgccatgttgcccaggctgatctcaaactcctgggctcaagcaattcactcgccttggccgcccaaagtgctgggattgcaggcatgagccaccacacccgaccattactggtatttcctgacttttccagtttaggtaccatcaactccctccctactgaaagatgaatattttgtttgcttagaattctcccccatactctgcctaccacacagatgtttccaatattatatcacagtattgtttaaaccaatattcactgttttcacctccttgtatattatctagagagctgaaccacatagtatgctatgaatacatttatttactttactattttaaaaaaaattattggtgatacaacttctgaaaccccttgtgtatttgttgtagtttagactggttgcatgggtgttatcaggatttccttttaccagcctcctgggaagtagctttgctttctcatgtgtaggctcttctgtcttctggatcattcgcctttttccaacttggttttctcttttttggtggaggacaaaaatgtttctgtattgttgcttctgtataagcttcctgagaaaagttgcttgggtaataaatttttggttgacttatatgtccaaaaacgtctttattctgttctcttaactgatagtttgactatgcatagaagtagaagttgaaaatcattatatattagaatttaaggtagtacttaactgctttctaaattccacttctgctactgaagttttcagtgccattgtaatgtctagtttttttgtatgtgatttaaaaataatggctttataatggtattatttacataccatacaatttacccaactgaagtatgaaaatctaaagatttttaatatatttatagttgtgcaaccatcactgcaataaattatagaacattttcattatgccaaaaatagccatgcatccattagcagtcactcctcattttcccacaatatcccccagtactaggaacaaccattctactttttctctactgctttgtctatcctggataattcacataaatgaaattatacaatatgtagtcttctgtgactgactactttcactagcataatgatttcaagttttactcatgttgtagcttgtatcatactttattcttttttattgccaaatgatattccattatatggatatacctctttttgtttacctatttatccattgaaagattcttgaattgtttccagttttggctactgtaagtaactctgctatgaatattcatatacaagtttttgtgtgttctaatttcttttgagtatatatctaagagtagaattgttgggacatacagtgactctacttataactttttgaagaactgccaacatgggttccaaagtagctggatcatttatatgtccatcaagagtgtaggaggattccatttctctatatcctcaccaacacttgttattgtctgtcactatgattataaccaccctaacaggtgtgaggtagtattttgttgtggttttgatttacatttgcataatgattacagacgttgaatatccatttatgtgtttattggacatttgtgtaacttctttacagaaatatctgcagatcctttgtttttatattgggtttcctttttattactgaattataagagttatttgtatattctgaatacaagtctctcaccagattggatctgaaaatgttttctcgcattgtatgaattgtttattcacttttttgatggtgttatttgaagcataaatacttttgttaagtccaatgcatgtattttttcctttgtcacttgtgcattttatatcataccaaacaagccttttttctaacccaaggaaacaaggatttactcacattttttcttctaagagttttctcgttgtaactcttttactgaggccagcagtccattctgagttaatttttgtatgtggcataggaagtttccaactttattttttttgcatgtggatttccagttgacctagtacaatttgttggaaaaattaattcctccccattgaactttcttggcaccctgcaaaaagtaattgaccatagatgtgagagtttatttctggattctcaattctgttacatttatctatgtgtgcatctttatgccagtaccaccctgtcttgatgattatagatttgtagtacgtttttcttcctttttttttttgagatggagtctcactgtgtggcccaggctggagtgcagtggtatgatctcggttcactgcaacccctacctcctgggtacaagtgattattttgcctcagcctcccaagtagctgggagtacaggcatgagccactatgcccagttaacttttgtatttttcatagagatggggtttcaccaaattggccaggctggtctcgaacttctgacctcaggtgatccacccatcttggactccaaaagtgctgggattacaggcgtgagccaccccgcctggcataagtgttgcaataggtattctgctattgttggacaagatgttgtagatgtcaactaggtctagttgtttataatgttgctcaagtattctattctttgttgatctactgcttaattgttcttgccattattaaaagtggaacattgaggtcttcaactatttttcttgaattctctatatttccctgcaattctgtcagcttttgcttcatatattttgtgagtctatttttttggtgcttttatgtttataattgttgtatttttttctgatggattcaccctttcattgttgtaaaatgtctttatttgtttctatatttttatttttaaagtctgttttgtcaaataattatatagccactccaactttcttatggttgctatttgcatgctacatttttttcccatccattttctttccacctatttgtatctttggatctcaagtatgtctcttgtagatggcatatagtctgatctgaagtttttatgctgttgatagttctgactttggatttcgtgtttaatccatttacatttaatgtcattattgatagagtccaatttatgtttggtattttaccttttgttttccttatcacatgtcatttttggatttctatttcttttttaatgtttctcttccttaagtgaatattttgtagtgtaatatttcaattattttaatagtttatttcattaggtttgagttgttttcttaatagttgtcctaagtaatacaagatatatctcagtttatcataattgacttcagatttatactacttttagatatagaaatgttactcatatataaataactctattctctcttcttgtatgattgctattattgttatacatattaagtcattgtgttataaacccaataatacatagctataattgttactttgtataattttatgtcttttatagaggctgagagaagacaggttaggaaagatttttgtattaaccttctttttagcagttctgattctcttcattgtttctgtggattacaatctgatgtcatgttcttactccaagagagcattgcttttgtttttctcctttgtgctattattggcaaatctattacatttctatatgttataagcctgatacaattatgtacataatttttacataattgctttataaatcaactatgaaatgagacattatgtacttgtaacatcttttatacttagctatatcattatcaatcctgggtttttttttttttcatatggtttctacttactatctgcagtcaattgttctgtgtctaaagaatttcctttagtatttcttataagctaggtttactaacaatatgttctttcagtttattttgaattctaattttgtaaagagagcttcgctggaaataagattcttggttggcatttttttctctttcagcactttgaatatattatccaactgccttttgacctccataggttccaataacgagtctgctgttattcatattgggacttctttgtataaatatttttttctctttctgctttcaaatttttttctttgtctctgtccttcaacatttttactatattgtgaatgcctttgtgtttatcctacttggacattgttgattcttggttgtgttgatttttttaaaatcaaatatagaaagtttttgtgttttttttttaatgttgttgttctgttcccttcttttcttcttattattttgctactctcattatgtgtatgttggcatacttactgatgtcccacatttatctcaagctctgtttatttttccatagcttttgttccctgcattattccgattatataatatgacttcaagtttatcatttcttccttctgttagttaaaatgtactatgaaacccctcaaataaaattttcattttggttatttttcttttcaaaccaagaattcctatttagttcattttagtaatttctatcttctcatttgcatacttctgttgatggggcattcattccctttatagcttcatttacttctttttaattttctttttactacttttattgtggtaacacacatataatataaaacttgccattatagccaatttaaattatatagttcagtggtattaagtacatttatactgttgtgcaaccatctatcttcagaaattttttatcttctcatactgaaactctccattaagtaatccattaagtaatggattcttgtttcttgtttcccctaccctctggcacccaccattctactttgtctctatgaattttactaccctaagtaactcatataaatagaatcatacaatatgtgttcttctgtggacagcttatttcattaatggtaatgacttttaggtgtatccatgatgcagcatatgtcagaattttcttttttgttaagcctgcataatgtcccactttatgcaaatgctatattatgttaattcattcatctgtcagtagacatttgggtggtgaatttgttccacttttttattgtgaataacactgctatgggcatggttgtacaaatatctctttgagaccatagtttgaattcttttgagtaatgcccagaagtggaatagtgtatcatatcataattttatctttaatttgttttccatagtggctgcaccattttacctctctaccaccaatgcaaaaggattctaatttttccacatcatcaccaaaactggttattttccatttgtgtttgtttgtgtgtttagttttgtttaataatagctgtcttaatgagtgtgaagtgatatttcattgtggtttttatttttatttccttaatgattggtgatactatttttacatatgattattggcaatttgcgtatctttggagaaatgtgaagtcttcgcccatttttaaactaggtgctcttttgttgttgacttgcaggagttctttttatgttataaatattaattccttattgtgtatgatttgcaaatattgtctgtcattctatgggttgctttttcattctgatcatgtcccacttacacatgtttggaatttttgagtttaaatgtatttttttcttttgttgtctatgtgctgttgtcatatcattcctttacttatttaagcatgttttcaaaagttttttaaatgtatttataatagctgatttgaagtctttgtctgctaatttcaacatctggggcttctgaaaggcagagtcttttactaactttttttcttgtatatgggtcgcacattgctatttctttgtaagtctcataatatttagttgaaaaaagaattttatgtaatgtattttagcaactctgaaaacctttccttccacagtggggtttatttttgtttgcatatttaattgtttattatctgggcttggctttttcagtgacatctatttccccatagtatgcagtccctgatgtaccccttagagggtataaccttgagcatgttcacaattaccctgtgttgacagtgggcttaacatgattctctttgactatctgtttatctgatctttctattattaagctgtgtgtctttattggtattacacttagcagatagcttgcacggtcagctgattgttctattagtttaaaaaaatgcttttttgcataaattgctctaaaatagtcttatgcaataaaatctttgctacttttcaggagatttagagctttgttctaaacccacagtggttcctcttagctatttttttctgtctggttttatctgtcctgaattttaccttgctatttctgtgaagctaccatctttgtgctaactgatcaccaccaaaatattcattgtttttgacagttcctttaggcttgagctttcccatgctctgttaccaataaagttaatattcttaaggtgagctacctagctctgtttgttaagccctgcatttccctcagcaaaacatctgcatcatggctctggagctggggactgggacagtgcttcactcttcttagagttatacctctgctttacaagtgtcatgctgagtatgagtggttgactttggtcttcttggcttgcctcttttggcttggaatcactgccctatgaaggatctggatgagagtaactggaccccagtacattcttgatctgttcctgggatagagcttctaccctatgagtgtatttctccaatttgtaatttgatattcctgggttttggctgtgtctgttgttttttggttagaattatctagttcagtctcttcagagagtaattcttcagtattctgctgcaaatgttaaaagagaaaatctaggaggtgtaacttcccatttcaaccaatactccagtttatgttcccaccgcattccactcccatttccactattctcaggggtgttaagtacctgtaattcctgaggctttccattattttggttttgtattgatttccttcttggcctttctccaagagcctccatgttgcacgatttcattgagtgacattcatatcaaaatttattttaatactgtcccctggagttgttagtgcacagtctttgtggttggaatatagctgccctgaccatcatctctctcattatcttcaacctctggcttagattttactgcattagaaatgtaaagagctaagtagctaagttagctaacactaatgtactgcttttttgcttctaaatttttgttgatatcatttgtctactctagcttcctgcctagtctctttatccttatggatttctaccttgtatttttattaaaattttattgggatttaggcaaagtgcataagtgaagaatatgttcagttgttacatttaacacacagttggcattttttgacctgatgtatgccaggcgtggtgttggagctttgcatttgtctttgttcatctcatgatgttgaacatagagataccttctcaaagctgttattgcctcctatgtctgagtctaatatggggatttatgtgtcccatgaggggaaaaatgacttttcacttttaaagtagatttagtcacaagtacttctaatttactaaatatgaaaaaatcaaaattttgctagcaatatggatccccttttacaaaggaggttacattattcatgttgccaaacctccgctaacccaactgctactactacctccatcctattatattcctctcacaaaagctaggtaacatagaagttatatgtgtataatccttcttcaattatatatgcattttcttacactcctacctcaaggcacagagaaattcccttattgggtatacacagtttctactggcaattgtatttttctcaggtccctctggtaaatttggttgcattttttcctcacgcatagtttctctctggtagcaactaaatacattgaatcaggcaaagatctgatattggttattttattattaataactctagtatgtcacccttactgcaaaatcaaatgcaaaactctactacaaggtatgtaatatcccaaacaccctggctttgccagtccaatgcaccttgtactctcacctttttctctcctatctttctctgtactggctcatatctcagcatttatgagatgctctagaaattatagagtatattttcactccttatattttttaatattcatataaacatatcaagatatttgctagatcagaatctgaagctcagatagtttaagaaactcacccatagttatatctgtggtaagagatagcacaagtagaactatatcttttactttagggtctggagcacactttgagctaccattgtgtcttagtttattctctgattcaaagaaaacatggaaattaaaatcactgaattcctttggttgtgactataatgataataatacaattgccaacccacagaaggtgtttataatgtgccaagctaagtacttctactgaattactgtgtttaaatctcacaccatgtctatgaaatgtcattgtcctcatataattagtctgaaaagagaacctcacacaaacatattttgctttacgttatcttctcatatctttttatagattatgctaaagtaaacatttttcctcatacaatattcccagtaataacttatacctaaagattatacatttattttttagcaaattgtgtcaatgaataaaccagtcattttatttataatttgtaaaataaattaatctctcttcagatttgattatggccttgtagctatattttaattatctgtgtaataaaatctacaataaaatgtttctaaataaatcagaatctaaagttgctaagttgctaaaaatgattatatatggagattcaaaataagcagttgtttaaatccagtattcaccaatgagttgaggtggttggggctctttctctgagtgatttcttaacttgcaggcataacacaaaatgagaaattctcttagcattgatgtggtacactctcagattttttaaaaaaaattgttactttggttttttgtttaatttatacatttcaaagcatacctagtggcatacatcagaattgtattacagagaaatatatgagaaaacagcatgaaaatcataaaagtaaattgaaatttccagacaagaagaagggaacatgagcatggagaaaatatgcatatatgcatattcttttttttttttttttttttgaaacagagtctcgctccatcactcaggctggagtacagtggcgcaatctctgctcactgcaagctctgcctcccgggttcacgccattcttctgtctcagcctcttgaatagctggttttacaggcgcctgccatcacccccggcaaattgtttgtatttttggtagggaccaggtttcactgtgttagccaggatggtctcgatctcctgaccttgtgatctgcctgcctcggcctcccaaagtgctgggattacaggcgtgagccaccgcgcctggccagacatgcatattcctactctccctgacacagaagttatgcatatcacttccactcatgttctattggtgagaacctgttctatggctctaacccgactaaaggagaggtaggacgtagagtctctggctggatagtcacttctcagaaacaattctgcagtatgcaagggagagcacaaatattttttaacagatagctgtatttaccatacaaactgaatgtgtttcagcaaagaattggttaattaaattactcatcattcataaaatggaacaatatgcagctattaaaaaggatggggagatatacatgtatcgagtacacacacacacacatctatctcattacttttttgttttgagaataagggaaaggctttattgaatgtgtacagtttcagtggaagaaacatagcaattttgagtagatctaaaggaagagttccttagcacattgcatattattcattacatgaagagtttttctaaatgaaaaatgttcaggacgttcagtagaaagaacaaattaaggaatgatctccacagcatagacctcaaggctcttatgcatgcagggtacagttctagcgcagaatcctcagggacagcatgagggcctccactggggtgccttgggctccttccagggcagcagttgaagggggtcgcgctgcagtccaggagacaggctggggttactctcctttctggttgcttcctgatggaatcctgggatttcagcatcttcctgggcggcctgaactgtagagggtgccctgcaacatagagggcaccctgggtgtgtgtccttccacctctgcagccgctggtatctctaacgctggctcaggctgctttggacccctccattggtagcatctgcgtcttcttgaggtgactggagcctgtttgtggtttcagccattgactcctggacatgggagtctcgagagagtttgtggcccctctcatctccgggaagggctcggtgcccgatggaggtgcattagcaggagcagcggctcagcacagggaagttatccagtgccctgtcctaggcttgctctaggttcaggtccagtgatatctggggctccggccctgcctgcctccaagacagctcttccaaggttgatggatgaaactctatagcctcagcctcccaaggcttgaccaggcacagccacgtagttagtctaggaaaaaagcaaatggcctcattactttaaaaaacaaaacaaaacccaaaaaacatatacaatcttttataaattccaggctccacttggcagggtgcagtggctcatgcctgtaataccagctcttcgggaggccaaggcaggtggatcacttgaggtcagcagttcgacaccagcctggccaacatggtgaaaccccatctctactaaaaatacaaaatttatccgggtgtgatggcgggcacttgtggtcccagaaactcaggaggctgaggcaggagaattgcttgaagccgggagacaaggttgcagtgaggggagatggttccattgcactccagcctggatgacaagagtaagactctgtctcaataaaataaaataatgaataactaaataccgccaactcagtccatggaatattttctcagaccacatggttggtccacagcttccaccttattacagctaaattatagaaaattttgctttttctttttgaaatagttgtaaaatcttatgaaatattaacatgcaaaatgaaaattatcaagtgacaatgttgtcagtcacgtttattaaataaactttcaatataattgcttactagttctggtgggtttttgatggttttaaaaacaattttgtatgtagacatttgttgtttctgttgcttacaaacagaaaccgttttacttatttcattctttctaatttgtgttcctaaactttgttaaagccccttaatgcactggttacaaacttcaatatattactgaatataaatggtaagagaagttatcctacttctgttgtgacatgttcgtgtttcaagggcaaaatcattcattaggttgaagaaattcccctctattactacattgccaagggttgtattttaaataatgaatgggtattgttttttattaaacgctttttgggcatctattgaaatgatagggtttttttcccttactgtactgattgatagggtgatctggattaattgattctcaaatgcaaaaccagcctggcatcaccatgacatattatccttttatatattgctggattttagtggttagtaattttgaagaatttcacatctatattcataaggaatgttgttctatattttttctttaatgcatttatatgatttgtggattggggtaattccagcctcataaattagttggaaaatgttttctttctttctgttttctagaagggcttatgcagaattagttttatttcttccttaaacatttggtagaatcttcagggaagctacctaggcctagcatttttgtgtgggaaagtttttaaatcacaaattcaattcttctatatatatagggatattcagattatatgtttcttcttgaatgagctttggcagtttgtaactttgaagaaacttctctatttcctctaagttgtcaatatgggcctagagttgttcatagttttcttttattatcctttaaatctatagggtctgtagtgatatcttctgctgccttgctgatgtttataattcattagatttctaatttgatatttgtaatgtgtttctttttagttttctttgttctgtttagcaaggtcacatgatacaagttcaatatatataaattcatcatatttgattgattgctagcaatggacaatagaaaattacagtgaataataccatgtaaaatagaatcaaaactatgagacagatataaattgaacaacatatgtagaagagctatatgcagggaactcatgaaaaatttaaaaaattaaaaataaatgcatatatacctaccatattttttaattagaaggctcagtagtgttaagatgtcaatatcccccaatctataaatttaacataattccaattaatatcctagtaggattctttaggaactgaaaagctatttctaaaatttacatggaaatataaaggacctagaatctaaaggaatctaaaaatataaaagaacaaggcataaaaatttatgctaccagatttcaagatttgctgtcatcaaaatagcataatttatagaaaggacagacatacagattaacgaaacataagggtacaaaaatatacccatggatacttggtcaattcatttttgacaaaggtacaaagataattcaacagagaaatgttagtaatctcactaaatggtactggaacaatttaacatttgtgtacaaaatgatgaaccttcagtcatagattttaccatttatggaaattaaacaaaaataaactacaaatctaaaacttaaaatttctagaagaagtataggctaaattgagtcagtaatggatttcttagaactcccgaagcaggatttatgacagaatatattgagatttgattttatgaaatgtaagatttttttctttgaaattgtgttatttgaaaagcagtaataagagaatgcaaagagaaactataggctaggagaaacgatatacaaatcatatatctcgtaacaaacttgtatccagaatacatatacacgctcacacatgcacgcacacacacacacacactccgtctcgctctctctctttcagagctcaataataagaaaacaacctaataacagtcggcagaagattgaacagaatttctctgcagataacatatatgactagctaataagcacaatgaaaaaatcaataataattagaaaatgcaaatcaaaataattgtacaatagctaccactacatatatactcaaatgactaaaaaataaaattaaattaaaagctgaaaataccaactgctgggaagaaggtagagtagctggaagattgatatattggtggtaggattataaaagaatgcagccattttgaaaaatagtttggtaatttattataaagtaaaacatccacttaccacataacccagaaatcccatatttacccaaataaaataataacctatatttacacaaaatctgtatgtaaatatttatagagacttaatgcatagtaactccaaactggaaacaactcaaatgtgtgttacttgtgaaatgaatgaacaaagtgaggtatgtttataccatggattattactcagtaaccaaaaagggagaactacctaatactaacaataatatagatgaactacctaatactaacaataatatagatgaatctcaaatacattatgctaagtaaaagatgtcagactcaaaatactaaatactagatgatttcatttatatgacatactggaaaagacaaaaccattgagataaaaaccaatcagtgatcaccaaaattgtcagcagggcaatgggttgactgtagaggtgcaaagggggtattttggggtaatgatcctgttctgtatcttatgaatggtattggttagacaacaatacacatttatcaaaacttgcagcattgtacgtgagaaagaatgaattttgctgaatttaaaatatggacttcattaaaataccaaaaatagaaaaaaatgcaataaaaaagcattgcctcgctgctctatcttcttgtaagagaacacactgaaactttgaggccagtaagtagtctagcactaagacaaggaaattctgaagaaattcatgtaagcagtcataagcaacggcctgatctctgcaaaccagctcacactgcattttactaggccaaagaaacaggggtaagaggatgaatgatgtgacacaaattatcaccattctaaatatgtcaagcatatgtcctgctgacaagaggagctgtctggcatggtaagtagctgtgtcagcttttcaatcttcaagcataaaaaacagtgaggtacttgtttttttaatgtgccacatagggaaagaataattttttcctcattactatggttctagttgttggataaaaggcatttttgcacacacctaatttaagaagcaattttattactaaaattgagaatgaaatatcatcccattttgtaaaatgatatcgcagataatttatgtatatggaaaggtgcttataccattctgtatttccaaagaatttctaaaagttctaatttactctccaaaacataacctggaagcatacaaataaaatagctcagccatgttctcactgtcttgctaaatccaatacatgatcaatgtgagttatttgactataggtcacaaaggcagcagcataatgctattgactatacaatggttgatccgatagctatacacaaaagatagcaaacagtggttgtttggcttagagctatttatgtaaacaaaactaatgaggaaaaaagacctctattggtaataactcgtaatgtttggaaactgccaacttctaatcacctttctctattgtcctgttttcactctaaggaaggtcagcatgatttatttacatgtgtttcctaaatcatatactcgcatacatttgtgaaaaggtgtcctaaatcccaatgatgttacaaagcaaaacagcccctaaaagctatgcaaattagtatatttcataaaaattatttgtctaaattgtaaattggcccatggttatgtagcaaattcaatgtggatgtacattgcttccgagggtgatatttgtattttatagatacaaagagatcaatgtagaaaatccttatttcttatgattagtgtttcactatctgttggagattttgctttcaggtgaaaaatttgagagaacttaccaaacaaacaaatgaaaaacttctccaggagacatcaagagatgacaaaactacaaccgagtcatgtcacacccaaaaataaaagcataaaagagaaaacgcttctaatgtaaaaataaacagcaccaaattgcttatagtgtatatacgatatggcaggataacaatagaaattctgttatactaaatggatgattcagcttaaatgataaactgataaaaaatgattatgataataaaaatagttactatgtgtcagcaatattttaagaactttgtatcacttacctcatttaagactcccaacaagcttatgaggtagtttctattattatccccattttagagatgaggcaaagcatgtaatgagagctttagtcatgtacccatcatcactcatatgtaacaaataaccttgatatctcaaggactcaatacaacaataatccaatttttcgctgatatcacagtccagttgggttatcagtggttgacttcccaggtgctgtttcaggctctttccattgtgggcttgtgccatcccaaagggtgagaagtctgctggattccctgcacccagatggctgacaagtgtacagagaggagaagattgtcaggatgctgtaagcatcaggtcaaggagtggcacacaccaattactctctacgttatattggctagaagacaaaaatacggttccaatctaactggaagacaactggggaatgtcatctttttatttccctagaaagaggaaacaagattgatgcacacttaaatattctctgccacactcatatagcctgaaattactgaaacagttggaggtaaagcactcttgttgcagagacaaaggcctcaacacaatactctaccaccattcagaaaacaagataagtggtgaaagaaatttcagttttactctgaattaatttttatccttttagactccctcttactatttattaataatacaaagatatctattttttgactatttctaaatcaaatggcctagaagtcttgatgtctcaaagctacccattacttgtaaactgttaccttgaatttgatagagaaggtgtattcatagtttaataatactctcttttgcaacttttcctcctttacaactgtgctaagggctgtattagtccattctcacattgcaataaagaactacctgagactgggtaatttataaagaaaaaggttgaattggctcacagttctgcaggctgtacaggaagaatggctgagggggcctcaggaaacttacaatcgtggtggaagccaaaaagaaaggaggcacgtcttacatggccagagcaggaggaagagagagtgaaggggcaagttctacacactttcaaacaatcagatctcatgagaactcacttattatcatgagaacagcaagagaaaaacctgcccccaagtccaatcacctccctccaggtttctaccccaacattggggattacaattcaacatgagatttgggtgggaacacagagccaaatcatatcaaggtcataaaaagataccttaaaaacagaacaaagtggatctgtgtcaggggaatcttcacgaattggattagatttgatttgtgaaatgatatcttctctctttttatttatttatttatttttgaggcggagtctcaactgttgccaggttggagtgcagtggcactatcctctgcctcctgggttcaagcgattctcctgcctcaacctcccgagtagctgggactacaggcacacaccaccacgcccagctaacttttttgtgtttttagtagagatggggattcaccatgttgggcagaatggtctccatctcttgaccttgtgatccacctgccttggcctcccaaagtgctaggattataagtgtgagccaccacttccagcgacagcttctctcttctaatcaaaaggatagttttattttataatggtgaggaatatggatcagacaccgtgtttacatgtctgtgttctcacttgcatatttgcttccctgagatacaagtggtcttcctacttcagtctaagttccaaaccaatgataatgttacataagccaatggctatgcttgacgaaagtcactgggtgaagactaatgattcaagtacaaaattttttgttgtactcaaataagttttctaacaaaattaatctgatatgcttttaactatatttatagtcattatagcattgcatgcaactaagcataaatgctaagcagttcaaatagataactctaataattagtattgctttcacagtctgccaaattttaaattttagtattcatattgttagttcttcatggttcttcacgatctgttagcagaatcaatatttaccatttcacctaatatcctaaactgtttaatcatctcgtgtcatcactctgcacatatacaaatcctcacgcaggataagtctaataaactaaaagctaacttgaccttctatattttgctattttcaactaacagatctcctcctaacactcagaaccatgtttgaggtctggtctttcagattaatttttcccgcattttgtatttctcctcaactttccatatcactaaccccctcttttcagtgttcactctccatcttccagaaacgtcaagtagagagagtagaaagatgggatccatagtatttggattttctactttggattgacacagtgaaaaggtgcagctgggctccagggattacatggaaaaataataaatttgactcactgagtgaatacacctgcattaaggtagagactacatgaattagatcaaatctctaccctcattcttttcatagtataactgaatctattttctgtgagaaacctttcctgcttcctctttctgttccaacccctaattacattcacctttgtcttcactgctccactctaatgctttttaacaccctcaatcgatcctattaggaagcctagtgcactttacaggcttcatccatgtttatttctcaatgaatttaacattgatttccctgcttgcctctatagactactcttcttccttaggttttgtgagactttctaggttcttcacttatgtactttattattttgcagtttttcttggtggtagttcttatcgctgatacctcttctctttgattttcacatgaagaggttctacgggtgtttttatttgtaacccaagtattcttcttaagggaatgcttctttactttttaggtttcaatgaccgactttatgcttgtgacttccaaattgatatctccactacagacttctcttcaaagatagacccaaattctcactttctccctggctattatgttgtcaatattttaagctaaacataatcaaagacaaacaatattttcttcccaaactcgtagtacttctgttgtacttaattcattttattagtactactcatttagtgtcattatgctttcaccaagtgtttggccatctttctaggcaaagattcatagtcttcatttagcattttgccattcctagtcacttagatagcttttcttcctttactatctttctctctactgttaggtacttttgaacaatacaagtcagaatgtatcactactgtcctcaataaccagctatgtctcctgttgcctaaacagaaaattctacttaatccgtgaattaattcaccttgacctggctccaaacagcaattccagtctcgctctcatttttttttttaactacatcaagcattataggttagcaatgcagcgttcgttattgttgcctgtgtttcttgcatgctttcaggtctttctatttactttctcatattgtcctctttacctaggctacattctcattaattttgtctatccaaactctcatacttttaagtcccaactcaaattcaacttcttctacaactgtttctcagatatcttcctgcatattcagcttctagatgaatctttctacatcctaccacttgtacttttatttagcatatgtgttttgctactatgatttataaacattgttttatattgttgttctgtccacttaataccactcacttccacactcatattgtaatttttttaatgaattttgcatctgtggaactgtagcagcgtgattagcattgactatgtgctcaataaatatcacattacaatagcttatagactcaagccaattttgaactgattctatgaacataaagtgtagcactgctgaagtgatatccttgactaggtgagaggggatgggatttttacatatgatgttgggttggagctttgattacgaattcaactaactgtgaaatccaaggagaagcagtatacgcagatgtggatagaaatggagtataaatctggaaaatctcttctgattgcttcagttttctcaaagaagtaagaagcaggatcatcatatatgacagaatattaggaaagaggtttgcagttttaagaagtgaagatgtgtgaaataattgtatgagaatgctgaacagtaattgaactaaggatatactatagataactacatttataatacaatacccaatgttcagtttggaatgtttcaggtgttcttttacatattgggcttttattttttaattataatttgattttatttctgtagcaccagctaaactcttggcaaatatcaatgtattttgaatcatttaactttgatcttcaaaacccttatttgcctttctggggaaaagagtaaaaacaacagtatcatagcaatctatttatacccctattttcagacagtcatgcttctatccaatatttatctagtttagcgaatcttatttctgttagcgattgtttgtgcaataaatgtgctcctgtcacttcatctctatttcatgcttttatcatattcaatcctaatttgctctgaaggtttgctaacttttgctttaatcatgtcttttctcaaatagttcagatataatgaaatatattacattcagtatttctctaatatttttctaccaaagaaaaataaaatattgagatgagatatattcacattgattgctatgaaggttacacatggattagtaaatcaaaacaagctctcaaaagctagaaaatcaattgatgtgtcagataggaaagacatagatggcaaaatcaaccgctgagttgacatctttcctcttgaaataatttaatttaccaaatttgaaaggttttgtgactatgaacacagtaataagctaaaaagcgggagaccaaacagattgatctcgaattttatttacaataattcaagcaaatgtaaactaacatattttaggtaaatatttttttctagaccaatcatataaactttctgggagaacaatcaagactatagtgtaaggattgtacactgagaaatacaaactatttacatatacagttaaatatagagaatatatttgttttttctctacagaactgttatccaattgccaacagctgaattgtcagtataaatgtacaatggtcagaaatagtacaagatgttactgtgaggatggattcgaaataacagaagatgggagaagctgtaaaggtaagtaaaacatataacgccatcaaattttgtttatagaggcttagttaacagaaatgtaagcagacatctttgagcacctaccatgtgctctacagtgtttatgttaacttttctttcttgagatttaaaagttgcccccccaacaaaaacataaacattattataagtttatgactctcaaatttcaatttttttgcagtaatttcaaacttgggaaatgtcaacaatcggaaatgtttgggttaaccactaacacattgatctaattattttaacttcctatatgttgtatggctgttatatagctgcagtctagtagacatgtgttattaactacgttaggttaataattgctaatcatgtaatgttctttataatttttgcattggttattctggcagctggcattttaaccatagcaataataatgtaataatgaacataaatattgatttattttaaatgtctggattcttgcttttgtgaatgctttatagcaaatatttatcctccaaaatgactcccttcatgaattctgaagaattttaggttacctttccattcacttgattccaattatacatatattaatatgtatatataacatatccacaaagttaaatgcattgctttgtatgatacttagaatctatctatatctacatataatatttctaatctataatatagcacgtctctctctctctgcctctctctttccttccgcgtgtgtgagtgtgtgtgtgtgtattcaggggattgctgcattgccagagccactaataaatagaatagtttccaaagaaattagtgctttgctgattacttcaaatctttgctccaatattatcacttttaccttagaatcttaaatttgaaaaaattcatgagataattgtttaaaatcttaatgacaaaaatgagatcctgatagttcattgacttaagtccacacatcttcttagtaatagaattgggactgaaactcatgtctgcagagcccacttagtcttatcctgaagaggctcattgacttttcagttacatttgggaattgaattttagtttgttgtttgctttgtgtataataccaattttataaaaaaacatttattatcaagtgtttatcagacccagagactgcataatctgaccacagggaggccaaactctcatatttatttgactcatgtcattatgtcattttaagacaacatttgaaaatcagaaaattgcacacaaaagttcagatgttctggaaaataagggcaacggtagatgcctcataatcacagaaatcagccagataaaaatggtgccagacatggatgatgccattgaacattcgtgctctttccacttccaaacagcccttgccattcgtacgtgtttggcttagatacctattctgcattcttctcactcatttactacacctgactcctgtagtaatcaagctctgcagttccttttgcaagggtgcagctgagttaaatacgtagattcctgagtgttaattaattgcttttatgtgtttaattaagcacgtaaaaacaaacacaacagtaattaatttcttctgtggaacattagtgaagaattgcacagcaatcattttagaagtcacagtgggagaggagatctttgtactttctctatactccttgagagccaagtctgagcatcattaggctttctcaaaactgtatttccaggtagccctctgtctttaaaggagaaaagaaggcagcattgcaagtgatggtatgcctattcctttgtagtcaatgttgtggagttccacctcagtgcattctggctaagtagaaagaagaaaagagataatcgatcatattgctctcctgaacagcataatcatatccaaaaaactgaaatagaaaccaataatattaaagttgaaaaatctgtgaaaatagataagaattattactgccatcagggacagactttaccaaatgcaagccttaatttcattcagtattactgtagacttagctccaaacgctgtattttttctatcaccaaaagcatttacttcaaatgagccatccatgattgctggctgttatgtgactctgaagaaacctgagtttatgaatgccttacaaatgcagagtttcacaatttaaattgtcttatgctactcagcaatatttttgctttctcatggtaagctcttttcttagtttggatattcgcagaagtcaactctgaaacaaggattcactgaatgttttcctttatttgccattgtagctttctctttttcttttctttcctttttttttttagggggtggggggtggtgggggtgagaggatacaggagaaaggcaaccccatagttggagcaattaagccagctacaacaaagggtgactgaagcttaagtgtgtggcacagctctctagcatgagagacaagggaactcaggcatttatacacccatttctgaagagcaaatttgtttttgtttttgtgttggagatgactttaccctcctggaaactggtgggagaggaagaagggtttggaagtatgctcaggcacagataaagatccctatgattgtagaatcacatgaacactctgagggatatgagcagacagcttctgctacagtgcccttgaccattcctttcaatttcttctttattctctcaaaatatgttttcttaatctattctcttttgttgtagtcactgcctttattttctgggtgccatcttgtgttacttcctcaaattactctttctcttctcactatttacttgtatatccacccatgcttgttttgctgtcatttcagaagaactttacttcttctagtcttttttcatacatatttaaagtcccactcacccaaacttttgtctcaacttggtccattggtctatcaatttctacctctttcttatatacctttaagcactacatttccactggctatcaccgtagtcaataaatattctcacatttgttttatgctgaaagaaaacaaaaacaaaactagaaatactcacaacaaatatccactttatatcctatctcttcctatagccatcattcccatcccctcctcctttattatccacaaactttaacaatcaactacatttactttcccaattatcttattttcacttcattcctccatttactgctatctggtttctcatcctataattttcataaagaactttaaatatctcttttcccttaaagtctagttaagactggttaaaacactcacttttattttcaaaggactgttagaggcttctcagcatatctgcagtttttcagagcttctatattctttatgatcttgactccaaactccatcttcctatttatgtatcattttgagattatatatggattttctccaccccatacccctcaacccagaagtaaaactcagctcttttcctagagtttccacaattataaaatccatgcaaacaagacaatttgtatatgtagtaagttttactgaagacttagtaggaaaatgttttatatcacaacacacaaataatttcaaatgtaattttagacatccctatattgaaacccttatgttacccctccgctggggattttttaacatgccagttgaggtttctttattgtcatatcactctgataacaattgggtggtatttttccacataaattatctaattctctaatactaactgggtgtccaacagttcaattcaacccaattctgacattatccagaggtagcgtagactgcatgggttaaggacctagtactgcaagactcaggtaccagatgcaagttccaggactcacctatacctctgaaccaaccagttataaatgtgagcattcctacagccctctcctcagatgtagtcattcactataaccactcacagaactcaaggaaatattttccttatgtttgttagtttattataaaggatgcaacagccaaatggaagtgatgcatagggcaaggaacgggaaggtgggagagggaagcttctatgccctctctaggcaccttatcctcccaggggctcaatgtcttcaccaaaatggaagctctccaagcctgtttgttcaagagttattttttagcccaacccccagtcccctttcttctcactggaggtcaggagatggggctgaaagtttccacactctaatccactgtttggtattttcatgaccagcccccagtctgagactacctaggggccccaccctgagtcacctcattagcataggctcaggtgtattctagaggagctctttatgaacaccaaaagacaatcctattactcaaaaaattccaagtattttaggagctctgtgccaagcactgtgaacaaaggccaaagatatattttaattatgtcacatcagtttaacccacttaataccacagcttcaatccatcctgttatcttttgctcccctcttcatttttctgtttctttttttctcaccccctttctccagaattatttacaggagtcccaaattatcttcagtcatcattcccaagtcatgaggacaaaactctgttaataggtctaagtttgtgtattttatcccatttaaggactcagtaaaaagcaagttccatttaagatcagtcttccatttgtgactatgtccccttctttccctacattacatcaacatcagtacaataatgtcctaattactgaatctaaatgggaattttaatctttatcttattggattcatgcattgcatataacccttttgaacattctgatatcccagaagagctctcatttcttatttttttcttacagtagtcatgaattttccttcacaggcgactgtaggactcctctttctttctttctttctgttttattattattatttttattttattttgagacagagccttatcacccaggctggagtgcagtgtgcaatctcgactcactgcaacctccacctcctaggttcaagcaattctcatgcctcagctgcctgagtagctgggacaacaagtgtacaccaccatgcctggctaatttttgtatttttagtggagaaagggcttcgccatgttggccatgctgatcgcaaacttctggcctcaagtaatctgcccgccttggcctaccaaagtgctaggaatacaggcctgagccactgcgtcccaccctgattcctctttcttgactgccctttccactttggtatcctagagtattttgcactagctaaatttttttcatctcctcttcctctgtgagaaatatccctctcctatttttaaaatctattatatatatgctattgacttccatatactctagaacagatctcaccctatattaacagttccatttttcaattgcttatcattacacatttactcaaggctgccctacagacacctcaaatttaacacagtgaaatcaaattcgttatctcctcccatgatagagccattcaaatctatacttcttacatcctctatttcaaaattcaatcaattttcacttctgtcacatccaatcatttttcaaatgttgtctattctacttcttacacatttgagtctatttcctcttcatttccactgccactgacttagttcaaaatataacttcaaaagacaatttcttggataaaattagcacatatctaattttctaggatcctttctccacatttaccaaagcctttatttcatatgagtgtttttagttttaaaatgcaaagctgaccatgtagcccatctaattaatgctttcccaatgccaatgtgtaatgtacagtcttttagttcagcatacaaatatcttcattatctggctcccaaagtactttcccagtttcatctcttctgccgctttccttcacacacccttgcttcatttgactccttatgcttcttctttgaaatccccatgatgccatcccaataccgttcgcatgccattttgatgaactgaaatgtccctttctgcttagtctgaggaaagccagatcacgcttcacactgtttaatacgaagtcttcacttaagattccccttctaatcctaagcagtttgacttccctgtttctatcataactcgagtatacccctattataaggaaatgtatagtatcataattatatttctctagactcgtcttactcaggggtagggaccatattttattgattttgtcttctgcagggatcagtacagtgcttcgtacataaaacaggctgaatatacctttgtctaaataactaactactgacaggatgcctttttgtttggtcagttaagaatcattgagtatctgttgttcataaagatttgaactggataccagaggaaggaagtatatagagaaaacagaatgaaggggtagaggaatagaatgaaggggtacaggcacacaccattgtgcctggctaatttttgcatttttagtagagacagggtctcaccatgttggccaggctggtctcaaactcctggcctcaggtgattcacccaccaaggcctcccaaagtgctgggattacaggcatgagccgcagtgcccagcctattacaggaagtttctaattagcaatctaatttaatttaatatctgtagaggactacagatattaaaatgaaatttatttaagacaaaatctttatttttcaataggtgtgcttaatagtttcctctctttaaagtagtgagtgtgatttgcatagtgtggctcagaactcttatttaatctgttgattgaaaaccatgttactagtcgaattctttgttaaaacagtgaaaaagtcagtgtcataaacactggaaatattcaacaaatattaattggagtgcattttgtacctttgcaaaaatatccaaagacttctagcctgactatcacaaatgcaaataatcttcttttaaaatacatgatttgatattgtttgatgttttatctctgtaaatattaaggcagcaataattttaatttttagttagtgtggttttgaaaagacttattggaattggcttttccttaatagtctatttccgaagttcaaaaataatattttcttcaaggagaaaaaaaagtgcccaagataaagctgcttagaaatgatgccaattttcctttttagatcaagatgaatgtgctgtttatggtacatgcagccagacctgcagaaacacacatggatcctacacttgcagttgtgtggaaggctacctaatgcagccagacaacagatcttgcaaggctaaaattggtaagttatgaccatttattttttgtctttccagaattacttgtttcctttttacaattctttttcattagagatgtggtatagcagaaatatggactttgaagagagagatttgctttcattttaatacacttctctatagttaggaatccagagcaattctttcagttgtcactaatcattataaaactccttccattactccttccaaaaatgaaattccttccttccttccttcctttcttttttttctttgagatggagtctcactctgtcacccagtctggagctggagtgcaatggcacaatctcagctcacttcaacctctgcctcccaggttcaggcaattctcctgcctcagcctcccaagtagctgggactacaggcacacaccaccatacctggctaatttttgcatttttagtagagacagggtctcaccatgttggccaggctggtctcaaactcctggcctcaggcgattcacccaccaaggcctcccaaagtgctgggattataggcatgagccgcagtgcccagcctattgcaggaagtttctaattagcaaaaatctgttcaaaagatatggattaattgatttgaattacctatcctctctcctggactactatgatagtttcctaactgggttctgtgagcttctgcttcacctccaaaattaattatttatataataaagtgatttactactaaaacataaaccaaatcgtgttgttcttttgcttcaaatctcccaataactttcacctaccttgaaaataaaatctaaactcctcacaggatctctaagggcctaatggcctggtatcatttccctttccagtgtctgatcttccactgctcttgtttcatcatcaatgccagcacacttgtgtccttgtccttcttcaaccatgttgcctttttatctgcctctaatgatttttcctgtgatattcacattaatgtagccttcttatcacttgagtctcagctaaaatgtcaatattcagagtgaccttcccaatccattctatttcatggtatataccctctacatcaccaagttattttccagtgttatttatgcatacctactctatcactatataatttcccagttttattttctttatagcattgccatttgaaattaattcatttatatatatttatcacaggatttctccagaataatataagcattatgacggtacagaacttgttggatttgtttactgttatttactcagtactgatcattgcctagaacatataggttctcaataaatatttgtggaaaaaagaggaagaaggaagaaaggagggcaggatggaaaaaaggaaaaggaaagagagaataaacttgtcttgctaattaaaattactaaaatgagtgctccactcttaagtgcttgcatttcatgtttcaaaactgccttttactgctaacctgcaaataaaccctgtagtttctacacagttttcagcctactgagtaagaaaacaatcagtaagtattgttgattggctaatgaaatagctttgagattcactagtcacaataagataatgctaattattttgtggagtgaattagcttgaaaataacataaggaaatactatacagaatattccatctggcttcttctaacttcctccaaaggtagtttcatatcaggcattttcaaattatgatgtattgatgaattaatgggtgccctcaccctcccttatgagaaagtggtaaattaagcatgaaatttcttctctgaaaccacactgggcaaaagactagactagctaagcaagcttcagttgtttctctttacacatgacctcatgttatgatttcaatgatttcccagagatagtgtggttaattatttagaaaacatatgtatctacaaaatatcaacaacagctaaacactcttttacttcttagtttacttctttgaattactgacttgatttatgaagtcctatttgaaataaggcaatccttgagaaaaattaggtcaggttatgttttcctttttgccaccactcagagttctgatgtaaaatattgatgaactatagaagtggaaggcttgttatttgctgtttctattgagccacacactagtgctacacagagagtgtaatctaatagaccctataaaggaagcacgtcctctttttctacataggtaggttatcttacaataatagaatgcaaccagaaaaagatggaacatgataatgtcctactacatcaaggaagtttgatgactctagaattgataatggaatacataaatctcttcacctctaggtcttttgcttgatgacattgtgagcttacaaaatttgaaaaatatgcagttaccatgggaatgttgttgtggtttatagtttaaggaaaatgagttgctagaatgagcataagtctataacaaacactggcaagttctaaaggtcacatggatatttgaaccaatgtatttgtacaatttaagagaaaaactgcctgtttagctttagttttctcatatttatgggaagtgaaccagaggatacttttggcttcagttatatgtaattccagttagtgcaatcaggtttaaaatttttaaggtagttttgttatacagtaatgtggctatatctgacaagtgctagaaacaagcattataaattgagccaggttcatcttaagtctctgccagtccttctttcagttgcctggctgctgagattggcctctcttttctcttcttttccttacaattctaccctactggactccagaacctaactttccctccacgacaagccagagttccagggctctcagcagctgggtagtgtggaaaacaagggaaggcccgaatggcctagcccaagacaatggatatgtggaaaagatctccaggctttagaaagaaaggatactataaaaatatcaagccaaagtgatgcaatggaaagctagaactagaccaagaatatgattttgcaaagacagtacaagatgatagatgaattaaaagttcctgagaaatagccctttatgtgacggcagagagaggcagagttaatcagctgggaagctgcctctaaaggtgctgaactagtgcaacatagaacagtatcatgatctcttccctactattcaccccaaagcttgccagtggggtcttattttcaagacaatagatagcaattaggtaaattaatctaagttaattgattattcctcctttgtaatataatacctgaacccgagtaaaattcataagccttaagagcatctttaagaaataattgtattgaagggaggagattttagacactacagcagatgggggaagagattaatgttagacaggaggccttttcattcctattaattcatgtaatgcagacaaattttctcctttctacgcttagtaagattgtctctgactaatgaaataaagaatacattgtttcagagttgggaggaacttcaatggtaatctagtgcaatttaatacttgatactatgtgttttttatcttcaaaaaagtaatttccaaaagaaaagtctgaaacatattttttaaagtaattttaatttaagtatgcatagttgaatagttttttataggagacatacaagactacaaatttttatgagagcatttgttactttatgatagaacacacattaaaagctagtaattaatgtttatttatttatttattttctttaagagatgtagtctcacactattgctcaggctggagtacagtagcatgatcatagctcactgcagccgcaaacttctaggcttaagccatttttctacctcagcctttgagtatctgagaccacaggcacgaaccaccatgcccagctaatttaaaaattttttgtacacacaggatctctctctgttgcccaggctggtcttgaactcctggcctcaaacaatcctcctgccataccctaccaaagtgctgagatcacatatgtgagccacgacacctacacaaaagctagctatttttctaattaaatgttagaacttgtcatatgaaaaaaaaaataaaaataataataaataaaaataaaaaataaccatgtataggtacccagtaaaacttcttgcacattttgatatattttttgagagtagagttgtagtaatgacttgtcaaatatgaaaataaaaacatttttaaaatttgactttcttttaattgattttattgaatttgatataaaaatatgtattgaatgtgaaaacttggggctgaaagcaggctcatgtagaacttgtgacagtaaaaataatagtcaatggtgtttaacttacaaattgttggcaattttactcctaataaattcagactcattggactgtacttttcagtgtcctaaccactcactgaaggcaggcacttatcccagcatacaaattctcctgaacccctagggctctactgattgcactgaagcaatagtaaaataaaaaacactaattttatgatcatcactctattgtcagtgcatcgaatggtgccctttgagagtgtacctctttgccgcggagtaattggagcagtgagagtagagagcctattaaaaaacttcaggattctattacagcttatatttgcagttcattgatttagagaaaaaaacaaacagaagactattgaggcaatgagactcttagttgtaagaacaggaattgtagtccctgtataattgaaggaagcatgtttctagacagtgttggggtcagggaacgttttcatatcatttgctgtttcctctgctatgattcttgaaaagagagagagagaaaaaaataaacaaaatgtaacttcctatggctcttactttaaaactctagggggatttaacatctactaacataagtttaaaattttcttttgggaggcggagaatttacccatggtttgctgctagggctgattctgcctgtgggagaattggcaggtgtctgtgtagtgggggaagaattctctgccacatagtatcaccttcttatcagccactgagtaatgcctgaaattcagctattaaaatactattccctggccttttattaaagcatctcatattaagatctattcttaggaagggtaacatattaagtcttaataattttaacaacttatgagactagtggataagatctgtttcagtataccagtggctaagaatggcttcttgtagaatgactgatgtatgaagattcaccatttagggtttttttttttacattattttttagatagtcaaaaattctaattcctgcataagttattatttcattgagccgtaacttcaaatagcacttgatgacatgatagtgcgtgagacctattggctaggagtgagcctagtcaccagcaccagcatagtaatgacagatttattgtgctttactatcacgtatgcgtgcatgaaattaggaacactgtggtaaagagaaagtagcaaaaaagtagctcaatgcctgaagcagagtatgtgcttgacaaatgtttgccggatgctttagcaatttctagaacattcaggaagcgaaatgagggtactgggatgttggggatcaataaaaggagtcagaagactgcaagagattcaaaggtgaatagaatatttggccagttttgtcctgttactccgggctgactctagctttggtatagtattggcatcaaacagtagtttgagaagcactgtatgatctacataagtgtgtcctctccaccaaggaccactcccctctcaaataaacatacaatcctagtaaaagctgtgtgcttgctgtgaaaatacagctggagaacaagcttccctatctgcaatcacactatactgaataagcctctgtactacagaaattctaaagcttcccagcctgcctttggaatcccggaccggtagcctggccattaaaatatttctttattttatggagtatttttactctacatcttttctggccaatcattcagttagaaatcacatttcatggcaggacagggcaaggatttctgatggaatttttactatccaaatgatacaacacactttttttccctctccaaacactgttaatgagtatgtcagtgctggggtacaaaatctcctcatgaatattctatgttggttttggtttttgtttttatgctaggggatatcatcttcacagtctagcaccgtttttgacatttttaatcttctttccagaaacagagttgcaagattgatagcagagacataaccatggtgttttatgtgtcatgacacctttcatttacccttagtctaagaaaatatgagacatggaaaaaaagcatgtcttccattttcttcataacatatttttattgcaatctggctgagaacttccgtgtttgagtatgaaaaattacgtggccatatttatgggctctaggtgtgacagtcaataaactttgcttttataaatggcacaacagataggcagaaatttctatcatgtttttttaataactttgtgtagactagctatcaaattattgattaaatcctcaatttagaatgtgagagaaattatatcaccctctacaattaactctttttctatcttaaaattggatattttaatgaaaataaaaagaaagggagcacatttaaatttataaaaattacaaatggttaaatagatgaggcaagaatgtacataggtatataatttttctgttgctttacctgggaaaaatataaaagtatatcactattgaaatcctcggagggaaaaaaccttaaaatccgagtagacagaataattttgacattttttaagaaaaaaaaattgatttttcagagacttcaaggcatcctctgtatcaattgcaatcaacagggactgaaaaaaaaatctggggtaataaaagcagttagagaatgccctttgggcactccttcccctggagagcataattgcctttgacagagataactaatattccacatatttcccctaatcaggatgcctaaaatcattttagtcttgagaagagaaaacctgttgcattgatttcatttttaaatgtgtgtatttcttttaggactcacacagcctctgtcgatgactcccacaaaagataatccccaccaaattattaaattatatcttagtactctttggatatttagaacatcaagttacaaagaacatagctgataaagtagctagaagtttgatacatcagaatgattgagtacttagagtacttaatctctctttataatagcaaagtagaaatttgtgatcttacttataaattttatatttaaatccttgtcagacaacagtgaaatatattaaatgacctttactttttcccatcactagataatgagtttcatatatctacctcccttctccttattgtgaggtgacgatcttatttcatatttccttgagaaaatagaagcaattaaaagagaattttctcacccaaactccattacctctactagtctatttgaatctagaactaatcgctccatcttcctcttatttgaattagaaaactaacttttctcctatcaaaggccaatcctgcaaatatatacagatcctatcttctctcacctgttcgaggattagactcatataattgtcttctttatttctttaatcactggtattttcttttctcttaggtcattcacatcagcatacaagcaagttgtaaagatgatgcaaaacaacttcctttaaacctattttcctgtccagctacttctccatttttctttttcctgcatagaaaaactcagagtgttgttccttttccactttcctttgctctgctctttaatcgccttcaatgaatcttacattattcttatcagtcacatctattgccaagggcttcagtgacctcccattgcctaattagttgactatcggtcttaagcacacaactgacaactgtctccttgaaggctttaccttttaaagcagcacaatcttgaaattttgctcttgccttactgggcattttttctcagtttactttgctttattatcttcattttgccaatacttttggcatgattcagcgttcagtcctttagacatctttttattgatttcctaggatgtttcatcctgtatcatggccttaaaaacttaccctctgccatggcattaaaaaatataaagagactgagactccccagtttttatcaccagttatgacggctctagactcacagatccaattatatattcaatatctccatttggatatttaacagaaatatcaaactctatgaacttttgattttctatcttaataatgctctttcttcagttttccatcttggcaaggtttccaaattcacctaattgtttaagccaaaacattggattcatccttcactgcactctttttctcaaaccctttgtttataactttgtaaatacattctgaattagattactctctctaaagataagccctcatcctcattactcctatacgttactcactttcatagaatttatcactgccaaacaatattcatatttgtttacttgcttattatcttttttatgtactaaaatttaagttctataaaagcaaagattttgttagttttgttcactgttgtattgctagcatctagaccctggcagaagctagccaggctcaataagtatttgttgaatggataataaatattcaaatactgaggcagtatttcccttttaggagccatattaaatgtggctcttctaaggacccgtgttttcaaactgaaattactttataaataggagttacttagaagcaattttcaaatgagtcaatacccattacattttaaactcaaatattactaatctataacatagagaaagatgtctgagtagagaaaatatttttctgtagctaaagtattttccactggctacaattagaaaggtcactaggagatttttaaagcagccattagccacttctcagtaactaatataaactgaccatcactggactgtctgctagttctaataatcatgtaataatctaaaatttgaatgaattatattctgaaattttgtgatttacttataaatcttcaatggttatcaattacatatctttcattttttctgattaaaataactgcattatttatttcattgtacttattgaaataccttattattttacaatgtgttaattcagtaaagtctctttaaaaaacattgaggagttcatattcaaacagtcccccatatttcattcatgtactaaacacttgccacgtgctaagtaaggctttcagataacaggggaaatgcctccttggtttggttggaccagctctctgcaaaacagggaaattgtgagagccgccagtttgcaaaatgaaaagatatgtttgtgctggggagggcatgatgttattgtcttttgtcgtgcttataaaatggatcttcttccagaaaaacaatatactgaattgcttctcaattatcacatttcaagttgaaatatgctgtgaatgaaggtaccggtatttcactagtaaagtctaaatagcaaagtgactaaattattttaaggtttatgcttaattcaggtttatcagtagtttacctgagtgagtttttacaatgccaaagataagattaaaaagcacaggtttggcacagtggctcatgcctatagtcctggcactttgggaggccaaggaaggaggattgcttgagaccaggagtttgagaccagcctgggtaacatagtgagaccccgtctctatatagaaatcagaattaaaaaaaaaaaaaaaaaacactagaacacaaaacaaaacaagataaaaaacacagctttagccattggactaatgtgccaacactgaaatcatcatcttctctaaaaactgattctactttcttctcttactgtttcttttaatgataccctttatccccatgacccacatctacaatttccaaataatccttgacttcatgtcactcgttgtccacaatacaacaataactgcaattttgaacttctgctttattacatcaacccatttctacttaagatttcaacacctcctactttaggttcttatcaccttgtttctgagaaattaaaatggcatttctgtgttcagtaattcagatatctgatacctgtgtccacaagtttttcataattttgggttactttcttcataaaaacaaatgaaattaatgccattctctatgtgacatgtagaatctagtttggaggaccatagaagaggttttcttagggaaatctctgagaattatctggggcttacatttttcccaatgacctctgcttccagtaagaacattgccacatatggccattcttcatttctgcactgcgtgaatctaaacaggaaaaaggtatcttttccattctcttaactcctttccaactttactctagatttgaaggcagtgtgtaagacgtttccattttacctcaacgtacacatgaattatacttctgacatgaattatactctaccaactaaaaagtaaaattatactctaccatttataaagtaaaagcaagaacatttttaaataatccaacatgttatcattaactatagttaccatgctggaaaacagatctatttaactaattactcctgcctgtgattttgcatactttgtctaacatctccccaacctgatcccccaaatgccttagcttctggcaacaaacattctactctctatttctatgagatcatctcttttagattctacatgagtgagatatgtttacttgtctttctatgactggcttatttcacttaacataatgctaagagaagggatattaaatgttcccactacaaaaatggtaactatgtgaggtaatgcatatgtcaattacctaggtttaactattccacaatgtatgtatacttcaaaacatcatgttgtgcactataaagacatatcaatttatgtcaatttaaataaataatccccccaaataaaagcaaaaacataaaatctggaaagttgagtgggaaatttatacttcctactgtattctacttatctttctcactatattttacccacccacacaatatcttacatattatttttgacttgatcttcttaaagcatagttttgatcacattatactgtatttctaaaattaacactggcttcccattgcagccaaaattaaaaataagttcatcatcttgacattcaatagcctgtacaatttgtccttaacctgttttgtcagctactacaaaactctataaatttgaactcagttattttcacttaatagctatattaacttaagtgagtattaatcttaaaatgtggtaaatattagccgaatcaaagggatgttctgcatatacagtgaactaataaatgtgaaccatgtattacagtgtctggctcctaaaatatgctcggaaaacattaactattattagtgaaatactccaccagttatgcgtgttgtaccctgcagaaaactgaaaaactgaggtcaatctctcctcaatatattcaaatctttcacacatctgtacttttgtcaaagctgtttcttttgcttgactttcttttatccatctctgcatattgaattcttgttcttccattaaggcaaggctgagaccgaataccaacaccatcaggaaacttgtgcctccactaagcagacatatctaaccattctttgaaactcaatgagatgatacgtcttttatgaaagatatcatacctgattataaaaacatagttctttgtagataacttaaactttctacttgattgtatcgttcttgaaggcggactgtcttactgatctctttcagatcccagttaatgcttagatgtataaatactagataaattaattaattaattaaaatatttacccaaagaatacttcagcataaatatattgtgattgatgataaaaggtagtgctaagataaattgtagcaatattcattttcttgctcagtccaatacagtttttaatgccttttcgttttcctaatttgatttatatattatttctataataaaatgtgatagaacagtttcttctgatatatgacagtatgtcattattctgaatattattcattttggtaaagagcttttttgttaaaaaatagttaaggaatgaaaacagggagaaatcaatgtgaccattatgttttgaaaaagaaaatatttcaatgctatatttttttcacttatatgatattaacttgattcacattttcagtttggtttggttgactttcatctacaatttattatatatttgaatactgtaatactttctctttcttttttattttttctccacaccatgattctgtatctctcctttttaaactacataattttctgttaatattacatatttaactttttctgttttttgcatcattttagaagttttttagaaaattagcccttttggctgagtacagtggctcatgcctgtaatcccagcacttgaggaggccgaggcgggcagatcacctgaggtcaggagttcaagaccagcctggccaacatggtgaaacccagtctctactaaaaatacaaaaattaatcgggcatggtggtgcaagtgtgtagtcccagctactcaggagactgaagcaggagaatcgcttgagcccaggaggcagaagttgcagtgagctgaggtcacgccactgcactctagcctgtatgacagagcaagactctgtctcaaaaaaataaaaaaataaaaaataaaaaataaataattgcccttttacagatttcatgcattttgtttcatatattagtaattcacttcttacataagtgttaacaattttgattagaagttcttagtcttctcatttctaactgcaaacccattttccttatttttacagcctttatataatttgtatatgataaaataagagtaaatctgaaaaaaaaacctctttcaatctttgaagttcattactggcttaaaaccgattctttgtgttgtatagattacaactttctgttttatcaccatattagtctgactctccattttatgtactttatatgcaagtcattattcaacgttttatgcagttaaaactgggatttttttcatctatgacttcagaaatattgatgtgcacatgctgggagcttcatttagtggagataattgcttacaaatacaattacaggtttaattaaggaaaattagaatatagaacaactagatgatatacatatatatatacatttattatatacatatgtttgttagttacataattatttgtaagtatatgaattcattacttcaatcacttagaaggaaactagccaaattaatattcttataattgaatacaagaactggaggtttaaatgaaaccttaaaaatgacaagtttttatacaccctgaaaacatttatttagcacaacatatatatcaaaatcatattattataagtaaataaatccacttttagtatatttttgactgtgagaagataaagataggcttgcaaggacacagttatggtggctttgaatttaaataggtatttttatgaacctggtcaaataagcctttccaagtttctcttttcaattcacaattttagaatcagtcttcaaaggttgtgacactaatgaatacaacatacattacaggaaaaatcaaatcatttatgatcatacagagcacaaatactattctccatcacaggagagagaaatgtttttaggtctgtcaacatacaaggagtggtgaggagtatgaggacaatttttctcttctatcatgaatcagttgacagcctgctgtaggtgtttacccaaccaaagtcttggttctctaagttaaaatgtcacctgtgtgcttgtttgtgcttcagtatcttctatgtggaaggttaatgttcattacctctcactaagtgttgacacaggtatccctttgactgaagtcatctaatgtgcttttcaagtgttcttttgggaaaactgtccattgactaaggatgacaaccaataagatcatcacatttattctggtcagtcttatatccaccttacccaagctggtgctcttcaattggcatgtggtaacgatgcacaacagacattagatgtggtgcaggtagagatagattacatttttgccagggctatgccagtttcaacttgaaatacactgaaagaattggatccttagaccttgaggatttttgtggtttctcgtgtttcagtggcttccttcctccatatttgaccttctgtctaaagaggtaaaccacagttagtaattagcagagacccatgaagattacttcagtaaagcattcacaacttatgtaggtatccttcctccagtatgtcctttgatcttttgaagtcaccattattaaatcaaaccctgttagattatgaagcacctgactttagaattagtggtcgatatgtttttcactaaaacaattaactgattcactcatcaagcagctacaaaaaccaagtaagttgactaattctgtcaaataagcattgcctgtgttaaccatgaacccatttgcatctcagtttctcaggggaatctcagcgctcctttatattccggcctctcttcaaagaatgtttatgccctacattaagtttactgactagtagctagccaaaaaatggctgtctaaatctggactttgcataaaactttgcagcaaggatgctttcaatagtgggtcattttgagtgaaagtagtttcactaaaggtcatttcagttgtcaaatgaagacactaaggactgacattgtcagtctatctttgtttacctgataacacacccatctaagattttactatcacctgagaaatctatgatccaacaggtttcaagagtgccaaggtcaacagtaaaatgacaaaagtaggagtagaggggagactaaatctagatccccaaattaaggaatgacaagggcaagtgaaacacagttaaagatagatttaagaggttaggagagaaactgactagctaaccaggctcagatgtggtcaattgacaaggttatgttaagcagagatgattcacaattctactgatgcttctgagaggactttgtttttgtggaaatgatcttagcatttttaagaatatttttgttgtgggtttatactcaggcagtcctggataagactattttctccattgggaagaaactgttgtgctacttagttttataatctcattgaggcttttttgggttatttttgttttactgttttgttgttattatgtataaaaaatatttaatgtcttgttaaaggcagacaggaatcctatgacttgagagaatttcctgggggaggagaggtttatggcagatacatttgacaacaataatgtaacttaagcataccttgtatggcaggtgcacacgatagcaataacaatttaagaaaggaaggttgccacgtggaggttgtgggtggcggggcggggcaggggtgggggtggggggaatgtgctaagggaacgtgctacgtgctatataagctgcatgcttttcccaagtggtagtgattctccaggctgcagccactggaccatctctgtgtgtaagtttccctaaataaaaccctgtgtcttttttttgctacctctgggtctcttctttggcctcttgaacctggcaccacccctattgaaattaataggggtctagcatgatggggataaaaatgccaatgcatgaattataggattgttttaagcctgtgaggggaggccccaaatcatattcactggagggctcttctatctgagacaaacacaggtgcctgatatcctggcccatgccagaaacaaaagaaaggccactaaataatactgcttcaaaacttgagacttagttacttccattagttatagtatatgctctggtttttgtcctacctttacagtgctcagcttcagtttcttatagaatggtcaaatgatatttatgaaattttctgaatagctagtcatactctgaattcccttcataggttaaataaattatttttgttgcgtttcatgaaatgtttctaaagtcttctggtgtgagaattccatgtgtcctttttatttattcagaaaatcggtattgaatgatcactaagttctacgctttttctctagatgctagagatagaagtaaataatcagaaaaatatataaaacatactatggtgaataagaaagaactatgaaggtgtatagaaagtataggggcttaagatttttagacgataaagtgctaggagactcctcaccagtaaaatgacatttgcataatgacctaaaagaggtgagcaagtaagccattctggtaattgataaatgattattccaggaagtgggaagcccctctgaggtggcagcttccctggcttgttcaaggaacagtaagaagtgcagtgtgtctggagtgagacgaacaagagtaagagtagtaaggagatgaaggaaatgaggttaaagaagtaattaatatacagatcaggtagagtttaatagatcattataaggactttgaattttgctctggttaaaataggagccctttgagggactgagtgaagaactgaccttatctgccttagcattttaatggtataactctggctgttgtgttgggatattgtaaaggtgagaagggcatagatggaaaaagggaaaccaggcagaaaactttgaaataatctagatgagtgatcatggcaggatagtagcagtcattactgagaagtggtaggatgtctgatagttttgacctcatggtcaaagtgatttattgatgcattagatacagatgaattaaagatttccacatatttcctatttcttaattagcagaaaagttactctgaatatgattgtatagctaaactctatcaacacgaattttctatcagattttactgttacgtttaaatatgctgttgaaactctgggaaatttgtatatgttcatcaaaaactcagtcctaataccagcaaagctgcattgttcaaaaaaatggtattgaagtttattttatacctagaatcttgttttcctgactgtagaaagtagatgtggaaggaactggctcagtaatcactatctagtcactaaaagaatgtgtgattgtttggctcttggggttggtcaaggagccagtgaggccaaagtcacaggtgcactctttgtttaagcttatgagctttgcattttctgctccggagaatctatttctgatctcatacattcgactcaaaaaaacattaccttgctcgtgagggtaacctgcaaaactgtatggagaggtcagtctagatccatcatcatttctagaaaaacaattcacaccacttcctttacttactagcaataaaagtaaatgacatgtcctcacatttagacaacacattatgactaaggaaataaggaatacaaatgtgctgcagaatttttttttcagagaagtacactaaaacagtgaagtatacatatgacttatagaaagtttttttataagaaaatttttgttatgaatttattaaaagtatagaaaatagctttcaataactagggcaaaactgtaaaataatcttgactcttactgaatttacttctctttttctattttattccagaacctacagatagaccacctatactattaattgcaaattttgaaacaattgaggttttctatcttaatggaagtaaaatggcaactctaagctcagtcaatggaaatgaaattcatactctggattttatttataatgaagatatgatttgttggattgaatcaagagaatcttcaaatcaactcaaatgtatccagataacaaaagcaggaggattaacagatgaatggacaatcaatattcttcaatccttccacagtaagtgtttcaattaaatattatatgccaccctttactgatttcatttacagacccgtaggctggattctcaaatttctagcatagctcatggctgttggaaagctgtatgtgcaaatacaatgaacttgaattactgtattcactacatgttttgcatatacaaacacatacacataaactttctctatttaaataagtcataaattgcagagttaattgtaattatttctttaaggctttttacagtgtcacctgactgggaattgatttttttattccactgagtggtaattcacaatgtgatagtgaaggtgggatttaaaaaaagcagacagagttgataattataagtgcattgactgtagttaaaaataccttaaataattaggtttatgctaatggggagtaactacctgtgttaactctctttaaaggaaattaatttttatacatcctcttccaaaaaacttgtgatttgtgattcactctgacttctcatgtcagaaacttgacagactgtccttctcttcctgcatattaccataaactgaaatctcattgtcacacatacacacacacacacacacacacacacactcatacacacagacacccagggatgcacacatattctctctctccttctctctccctgcttccacatgggagtacacacacacactcatacacacacacacccagagatgcacacatattctctctctccttctctctccctgcttccacatgggagtacacacacacactcatacacacacacacccagagatgcacacatattctctctctccttctctctccctgcttccacatgggagtacaaaaattgctttgtgtatgcttggggaaaccataagaatgataattttaacatgcatccatttaatttatgatttacagaaagtgtttcttacaaattcggctaaaataaaaatctgtagaaaaattaagagaagccgggtgcggtggctcccagcactttgggaggccaaggtgggtggatcatctgaggttaggggttcaaaaccagcctggccaaaccccatctctaccaaaaataaaaaattagccaggcatgctggtgcacgcctttaatcccagctacttgggaggttgagccagaagaatcgcttgaacccaggaggtggaggttccagtgagccgagattgtgacattgcactccaacctgggtgacaagagcaaaactctgtcttaaaaagaaagagaagagaaatgaagagacatgtgtacaatcaagcggaaaagaagaatgctgtgatagaataaatgtgattttcaaatttagaatatttgatctcgtttcaataattaaagcttttcatatacatgaactgggtattaacccttatgtaaagaaataatactatgtaatgtttgatcattgtaattagattaaatgagtcaaaggcaaattgtgaaaaataggacatacaggtataattttatatacttaaatgaacaaagtgtttaacaaatattgtcgaacattttgaagatcctcttaatgaaacaattgataaagttatttattgtgaaaatagaccaaaaattataatgaaagcggtggatatttcaagaattctatggagaaatggtcattcatattaaataataataaaggatggcacaaggcagataatccttattatgtaatttatgtgatttattatgtaagtaataaggattatttgccttctgatataagtatttcagacattggcttaggcagcagctagaaactgaacacaaggccacagtccttgctacattagtgattacctcaactaatccaaatgtatttttcccagcaaatggaatactgaatagtcaaatagctaaaatattcactaagttgcgcagtagaattattttctgagcgtacttaagaactttttatctacacttaatatgccctaataatggtgtcttctcttctttaatatatgttttaaaaacagctatttgttaaaataaatctaaggaaggttaagcaattgcatattgactgttggtagaaaataagtataacttagattaaatttgatttattaagcaattcagcaaacctagaaacatatattttgttgttgttgttgttgttagggaattcactgaaatgctgaatagaatattcattttgaataataaaaaataagttcactggaaatattttaatctgagtaaataatttgtgatgaggttaggtttaagcatgcaattacatagtcactttagaaaaaagtgattaaatatgtggaagtaatttgatgatgggagtggggcaggggtgtgagcagggctgggcttctctgtcattgcttgtaagccatgcattttatcaacatgtcacagaagagctgccattgaatacgatgggctctgtgttcactatgacagtttgtgagatgataatgaagtttgaatattctttgcatctataattacataaaatctttgtcataccatataagcaaaaataatgaactgatggaagtcagcctgaatacctgtcactatccactgtttcagagattctctttagttcctcccacccccattatatttaggtgcttttctcttacctgaagagaacatgcttttttgagaaaatataaacattttagttttcaaaggattgctatgagaagaaaaacattgcaggtcaaactgacttgcagttaacacttccataataatataatagtaaatattttattgcaatattttaaaaaaattgcacgtctcatctcactggatacccactgcatctctgggtagcaagcaggagagatatgcccttcctgttttataatagatggcatttttactcaaagttcagatgtattaggtaaagctggatggctaaaaagaatgcagaagtgggacatctaagccctgtttttttcttttacactagaaaagcaaatctaccttcaatgatatattttaactttattgaatatgctgaaagactatctgcaacagggagatattattcttttggttttttttgggggggaaaattgagactctgagcagttagataattgtacacagcataattaggtaggtttgcatttgggtcagactttatagctttttctaaataccgctctgcccgtaggtctcaactttttcatgttagcaaagcaaaaatgattaggtctacgaatattagtaatgttggcttacaaagacaggccctctaagtgggagacagttatacgaatcttggaagggaggtggaaaaagtgggttgtagaagtttatagcactgaaaaggcccacccaatgattctgatgtggcctccttcaaagtcctacatttaacattgtacatcattcctaaacaatattgtgagagaatcaagatgaatgataataatatgcttaataaagtgtattaatgaaccttggggggaaatgatagacattaaatttcttactgaattttattcttttttataacgataactgatatttattatttagcattttagcttgaaagttgcagactttggggataattttggagttaggtgttttctaagcaaaacttgttttttaaaaaagtattcatacaaagcacatttgtagcagctgattgtttcccaaaatttttcttggagaatactgtggtaaggacacagatacccaaaataacaaaaattatgggatttacaaaagtggtgaattccatctgtttcctcgggacaaagtgcatagagatgattgagataagaatattttctgacttaatctcttattaaggaaaatgattcagaaccatattgtcatcccccagctgcacagtaaacactttcattgtctttttatgggtgaattcttcaatactctgaaaaactcaaggatcacatttaagattttaacatggatttagccagcttctgttgagccactcatgggctcaactccaatccagtagagtatacctagctaaaaataaaataactgcttattcttcatggatttagcttctgaattaaccccattcacaggcttttatctttttccttagcttgttttaatgtcaactttaaattacgttctatttgaacctctaactagagctactaaattacgtccttattgcataattattgaattctgacaattttttatcttttatttttaatttaatttcaagttctgggatacatgtgcaggatgtgcaggtttgttacataggaaaacatgtactgcggtggtttgctgcacccatcaacccatcatctaagtattaagcccaacattcattaactatgtctcctgatgccctcccttccccaccccacccccatgacagtctcagtgtgtgttgttcccctccttgtatccatgtgttctcattgttcagctcccacttgaacgtgagaacatggttctcttggttttctgttcctgtgttagtttgctaaggataatggcttccagctccatccatgtccctgcaaagaaaataatctgtcttttttatggccgcatagtattccatgatatatatgtaccatttcctttatccagtctaccattgatgggcattcgggttgattccatgtcgaatagtgctgaaatgaacatacacgtgcatctatctttacaatagaatgatttatatttttggctgtatatacccagtaatgggattgccgggtcaaatggtatttctggttctaggtctttgaggaattgccactctgtctttcacaatggttgaactaatttacatttccactaacatgtaaaagcattcttacctcttggcagcctctgttgtttcttgacttttgataatcactattctgactggcgtgagatggtatctcatcacggttttgatttggatttctctaatcagtgatgttgagctattttccacatgtttgctggccatatacatgtcatcttttgaggtgtttgttcatgtcctttgctcactttttaatgtttgtgtgtgtgtgtgtgtcaatttgtttaagttccttgtagattgcaaaaattgtcttccattctgtaggatgtctgtttgctctaatgatagtttcttttactgtgcagaagctctttagtttaattagatctcattcgtcaatttttgcttttgttgcaattgttttcagcaattttgtcaggaaatctttgcccgtgcctatgtcctgagtggtattatctggattttcttccagggtttttatagttttgagttttacatttaaatctttaatccatcttgagttaatttttgtataaggtgtaaggaaggagtccagtttcaattttctgcatatggctagccagtttgcccagcaccatttattaaatagggaatcatttccccattgcttgtttctgtcaggtttgtcaaagatctaatggttgtagatgtgtggtcttaaatctgagttctctattctgttccactggtctgtgtctgtttttgtaccagtaccatgtaccagttttggttactgtagccttgtagtatagtttgaagtcaggtagtgtgatgcctccagctttgttctttttcttgggattggcttagttatacaggctcttttttgatgtcatatgaattttaaaatagttttttctaattcactgaagaatgtcaatggtagtttaatgggaatagcatggaatctataaactgctttgggcagtatggccattttcataatattgattcttctatccatgagcacaaaatgtttttctgtttatgtcctctctttctttctttgatcagttgtttgcaattctccttgaagaggccctacacttcccttgttagctgtattcctaggtgttttattctttctgtagcaattgtgaatgggagttgattcatgacttggctctctgcttgcatattgttggtgtataggaaactagcgatttttgcacatggattttgtatcctgagactttgctggaattgcttatcagctttagaagcttttgggatgagacaatggggttttctagatataggatcgtgtcatctgcaaacaaagacaactcaacttcctctcttcctatttgaatcccctttatttctttctcttgcctgattgccctggccagaacttctaattctatgttgaataggagtggtgagagggggcatccttgtcttgtgctggttttcaaggggaatgcttccagcttttgcacattcagtttgatattggctatgggtttgtcacatatggctcattattttgaggtatgttccttcaattcctagtttattcagagtttgtaacatgaaggaatgctgaattttgtcaaaggccttttctgcatctattgagataatcatgtggtttttgccttcggttctgtttatgtgatgaattatgttcattgatttgcatatgttcaaccagccttgcaagttggcttgcagtaatgaagccaacttgattgtggtagataaacttttggatgtgctgctggatttggtttgctggtattttattgaggatttttttgcattgatgttcattggggatattggactaaagtttcctttttttgtaatagctctgtcaggttttggtatctggataatgctagccacataaaatgagttagggaggagtcccatcttttcagttgcttggaatagtttcagaagaaatggtaccagctccgctttgtacctctggtagaattcagctgtaaatccatctggtcctgcagttttttggttggtaggctatttattagtgtctcagtttcagaattcattattcagggattcaacttctttctggttcagtcttgggtgggtgtatgtgtccaggaatttatccatttcttctagattgtctagtttattgcatagaggtgttgatagtattcactgatggttgtttgtatttctgtaagatcagtggttatatctcctttatcatttcatattgtctatttgaatattctcttttcttccttattagtctagttagctatctattttattgatttttgcccccaagggtttttcatgtccatttccttgagttccactctgatctgggttatttcttgtcttttgctagctttggggtttgtttgctcttgattccctagttcttctaattgtgatgttagggtgttagtttgagatctttctagctttttgatgtgggcacttagtgctataaatttccctcttaacactgctttagctgcatcccagagattctggtatgttgtctctttgttctcattggtttcaaagaaattcttgatttctgccttaatttcattatttacccaggagtcattcaggagcaggttgtttaatttctatgtggttttgtgattttcagtgagtttcttaatcttgcattctaatttgattgtgctatggtctaagatacagttggtaatgatttcagttattttgtattagttgaggagtgttttactcccaattatatgatccattttagagcaagtgccatgtggtgctgagaagaatgtatattctgatgttttgggttggagagttctgtagatatctatcaagtacacttgttcaaaagctgagttcatgtcatgaatgtctttgttttatctcaatctgtctaatatttttgttttatctcaatctgtataatattgacagtggggtgttaaagtctcccactatcattgtgtgggagtaaaagactatgtacgtctctaagaacttgttttatgaaactgggtgctcctgtattggatgcatatatatttcagaaagttagctcttcttgttgaattcaaccctttcccattatgtaatgccctttggttttttttttttttttttttatctttgttggcttagtctgctttgtcagaaactaggattgcaacccttgcttttttctgctttccatttgcttgataaattttcctccatccctttattttgagcctatgtgtggctttgcatgtgagatgggtctcttgaatacagcacatcaatgggtcttttctttttatccagcttgccattctgtatcttttaattggggcatttggcccatttacttttaaggttatgtgtgaatttgattctgtcatcatgatgctaactggttattctgcagacttgttaatgtagttgcttcatagtgtcattggtctgtgtactttttagtggctggtaatgaacttttctttccatatttagttctttcttcaggaggtcttcaaggcaggcctggtggtaatgaattccctcagtatttgcttatctgaaaaggattttgtttcccctttccttatgaagcttagtatggctgataatgaaatttttggttggaaattctttttttttttttttttaagaatgttgaatattggcccccaatctcttccagcttgtagggtttccactgagaggtctgctgttaatccgatgggcttctctttgtaggtgacctggcctttctctctgtctgtcgttaacattttttctttttttttttttttccaaccttggagaatctgattatgtgtcttggagctgatcttctcatggagtctcttactggggttctctggatttgaatgttggcctgtcttgctaggttggggaagttctcctggatgtcgtgaagtatgttttccaacttagttccattctccctgtctctttcaggtaccgcatcagtcataggtcctatccttttacataaccccatagttctcatgttttgtttgttcctttttattttttctctaaccttgtctgcctgtcttatttcatcaatatagtcttcatgctctgatatcctttcctccaccttggtctatttggctgttgatacttgtggttgcattgtgaagttctcatgttgtgttttcagctccttcaggtcatttatgttcctgtctaaactggttattctggttaacatctcctgtaatgttttatcatggttcttatcttcttgcgttggtttagaactcctttagctcagcgaagttcattattacgcaccttctgaagcctaattctgtcaggtcattcatcttggcccaagcctagttcagtgtccttgctggagaggtgttgtgatcatttggaggagaagaggcactctggctttttgagttttcagcattttggcattaattctttctcatcttggtgggtttttctaccttcaatattttgaagctgctgatggggtttttatggggtcttttttgtcgatgttgttgttgctttctgtttgtttttcttttggcaatcaggcccatcttctgtagggctgctggggcttactgggggacaactgcagacccaattcacctgggtccctcctgcaactagaggtatcaccagtggaggctacagaacagcaaagatggcttcctgttccttcctctgggagctccatctcagaggggcaccaagctaataccagccaaaacactctggtatgaggtgtctcatggcccttgttgggatgtctcaaacagtcaggaggcatgtgatcagaagcctgtgtaacaaaacagcttggctgccccttgtctgagcaggtttggctgcactggggagaatccccctcatctggactgccagcagacaggaaagactaggtccactaaattcaagatcacggtcacaccttcccccagggtctccttcccaggaatatcagagttttatccataaaaccctggctatagttgcagcaattcctgcagggaggccctgcccaatgagaaaggatggatctggtcccagctaaaggagcaatcttgccgtgatctgccacagctgctgtgcttcgctgtgggggaattcctctcagtttaaactgcccgatctccccaacaccagcagtggaaaatggctgatgacagcctcagtgatggtggctgcctctcccccaaggaactcagttgtcttaggcagtgtccagcctgaagccactggcctcaacccgattggattgcacagctctcagtttgggacccaaggccctggtggggtggactcacaaggagatctcctgatccacaggatgtacagatctgaagaaagaatgcggtttcccaggcagggcagcacagttactcactgcctcccttgtctgggtgtgagagttccccttatcctgtgtggcaccttggtcattgcaccaccctgcttttcctcactctgtgtgggtcacactaactgcctagtcagtcccagtgagagaacctggatacctcagttgatagagcaggattcacttactgtttttgttcttctcagtgggaactgcagactggagctgcttctaactggccatcttggctcctctcccctctgtttttttattgtagattcaggggtacatgtacaggtttattatgtgggtatattgcatgatgttaaagtttggacatcaactgaatctgtcacccaaatagtgaatgtagtatccaataggtagtttttcaatcttttccctttaccccttcccttcttttgaagtcctcttgttgccatacttatgtctttgtgtacccactgttcagctcccacttataagtgagaatatatagtgtttggttttctgtttctgaagtaactcacttaggataatggcttccagctgcatacatgtcgctgcaaaggacatgatttcatccttttatggctacatagtgttctattgggtatacataccatattttctttatccaatccacaattgatgggcacctaggttgactctatgtctttgtggttgtgaatagtgctgtgatgtatgtacacatgcatgtgtctttttggtggaatgatttgttttcctttgtgtatatacctagtaatgggatcactaggttgaatagtaattctgtttttagttatttgagaaatctcaaaactgtttttaacagtggctgaacgaatttacaatcccaccagcagtgtgtgtttcctttttttctgcaatcgagaactaatttacaatcccaccaacagtgtatgagtgtttccttttttttcttcaatctcaccaacatctgttattttgacttgttaatagtagccattctgattggtttgagatggtatctcattgtggttttgatttgcatttgtctgattattagtgatgttgagtattttttcatgtttttgggccacttgtatatcttcttttgaagtgtctgttcatgtcctttgctcactttttaatggagtttttatttattcatttatttaagttccttaaagttccttaaagattttggacatcagtctttcatcagatgcatagtttgaaaatatcttctcccactctgtaagttgtctgtttactttatagtttctttgctaagcagaagctctttagtttaattaggattcattgttaatttttgtttttgttgcatttgtttttgaggacttagtcaaaaattctttgcataggtcaatgttcagaaaagtatttcctatgttttcttctgggatttttagtttgaggtattacatttaaatttttaatccatcttgagttaatttttgtaaatggtgagaggtagaggtcaaatttcatttttttccatatggttagctggttttctcagcaccatttattgagtagggctgatagttcacctctgtcttctatcaagctcacctttttccgttgagttagcaactgtctaataattacacagtattttggaatgtgtattgaatgtttatattgtgcattaggcaatctacatatttacttcattaccatcacacccaattataacacatgtatactatatataattatcagtttatagatgagaaaatgaacctacaaaactaggagcaagaaagtggagggagttgccatgcatctttagatcactagatcttgagagaactcactcactattctgaggacagcactaagccttgagagatctacccccatgacccaaacgcctcccactaggacccacctccaacgttggagattacaatttaacatgagatttggtagggacatatatttgaactacatcattcctctcctggtctctcaaatctcacgttcttctcacattgcaaaatacgattatgccttcccaacaatcccccaaagtctgacctcattccagcatcagatcaattaaaagtcccaagtctaaagtctcatctgagacaaggcaagttccttccacttataagcctgtaaaatcaagcaagttatttccttccaagatacaatggaggtatatgcattgtacctataatggaatcaggatgagtaaacattcccattctgtaaaacagaaactgaccaaaagaaagggctacgtgtccctgtaagcttgaaatccaacagggaaattattaaatattaaagctctaaaataatctttttttgactccatgtcttatacctagggcacactggtacaaggagtaagctcccaaagccttgcacagctctgcctctgtagctttgtagggtacatctactgtggctactctcagagattgagtgcctgtggcttttccagtcatagtgtgaaagctgccagtggctctctcattctggggtatgaaggataatggcccccttcccacagcttcactaggtaatgccccactgggaactctgagtggaggctccaaccccacatttcccctctgcacttacctagttgaagttctctgtgcagcctccacttctgcatcaggcttctgcatgggcaaccacgctttcccatacatcctctgaaacctaggcagaggctgacaagccttcaccactcttatactctctgcaagtgtgggcataacaccacatggaagctgccaaggtttatgacttgcattctccaaagtggcagttcgaggtgtatctggacgaaagtggcggttcgaggtatatctggaccctttgaaccctggctggtgctgtagtggctgagatgtgagaagcagtgccctgaggctgtgcagagcagcagagccttggtcctggtccctggaaccattcttccctcctatgtctctaggcatgtgatgaaaggggccaccacaaaagcctctgaagtgcctttgagacatttttcaccttgtcttggctattaacacttggctcctttttagttatgcaaatttctgtagcaagtatttgctcagcagcctgcttgaattctgctctagaaaaagcttctttctctgtcacatggccaagctgcaaactttccaaacttttatactctgcttcctgtttaaatacaaattccaacgttaactcatttctttgctcccacttctgagtattggttgtcagaagcagccaggacacatcttgaatgctttgctgcttagaagttttttctgccagataccctaggctatcactctcaagctcaaacttccatagatccatagagcctgaagagaatgcagccaacttctttgctaaggcataaaacatgtgaactttgctccagttcccaataagttcatttaaatctgagacctcctcagcttgaacttcactgtccatattagtatcagcatttggtcacaaccatatacccagtccctaagaaatttcaagccatctctcatcttcttgtcttcttctgagccctctaaactcttccaatctcttcctgttacccagttccaaagtcactttcacattttctggtatctttatagcaagaccccactcctctgtaccaattatctgtattaggctgttctcgcgttgctacaaagaaataccagagattcggtaatttataaagaaaagaggtttaatttgctcatggttctgcaggctgtacaggaagcataatgcgagcatctgcttctggggaggtctcaggaaggttgcaatcatggctgtagttgaaggaggagcaggtgtctcacatggtaaagctggagcaagagaatggggagaggtgctacacactttcaaataaccagatctcaagggaactcactcactattgtgaggacagcaccaagccataagggatctacccccataacccaaacatcacccaccagtccccacctccaacatcggggattacaatttaacatgagatttggtggagacatatattcaaactatataagctctatatcccattttagcaaagtgcctatctgtttttagaataaatttagcataaacaaggaagggtggctgagtgaccatgccaaatcatgaccttagacattcagaaaacttatctgcatcatcagtaagatatggtctgtgtctggataaagtgtaagagctaatttcagtgtttctgagacactgggtcttcttagtgactaccggcttttattcaggcttggtctctgacttcccatgatatgcacctataaatttattttgggacgtaacaccaatgaacataggaacagcttaatgcaaatcttttttgagtctcccctaccttcctacccacaccaatgcagttataattaaacaagattagagccaaggcatttaaaataaaggtaaattaatgttagtacaggatcactcaaaatggtgcagacttttaaccctttattccacttaggctgagtagacattttccagtgaaggaagctctgctattttatatataggtgtttagatgcataaaatgatgtgtgcattaggagatacatttgcaatcccaatactatatgttttattattattaaaactgatgtcttttagagtaacagttaaaggacaggctcgggtgtctgtggtatctctcagcctttgagaaactgtcagctacctcaaacctagaaatgtgtgattttcattcttcaccacagataaattatgttaaacaattgattagttctggttccaggattctgttagaaagagtttaagaattgaccacctcctagcttgggagaattgaagttatgatgatgaccatccttaatcttgtaaattaatgagattttgtaaaaagaatacagtcagccttcagcatctttgggctccatgtcctctaattaaaccaacgatggattaagccaaccatcgatcaaaaatatttaggaaaaaaacaaaacagtaaaaaataatacaagtaaaaactaatacagtatagcaactatttttatagtatttacattgtatttggtagtataagtaacctagagatgacttaaaatatataggaggatgtgcataggttatatgcaaacacagcaggtcctcaaaggatgtggtatcattcaacatgtttcagccaaccatcggtcaaaaatatttaggaaaaaaaaaccagtaaaaaataatgcaagtaaaaaccaatacagtatagaaactatttttatagtatttactttgtatttggtattacaattgatctagagatgacttaaaatatacagaagcatgtgcataggttatacacaaacagaaggtcctcagataatgtggtgtcattcaacaatgtttcattatagtgttgatgagaaaaataaattgaatccaggctggggccactgtctgtgtggagtttgtacattctctcatgtctgtgtgggttttcttcagggactttggtttcttcccatgtcccaaagctgtgccactagttaacaagtgtgtctaaatgttcccagtgtgcctgtgggggtgtgtgcgagtacatcttgtgatgaaatggtggcctgtccagggctggttcctgactgatgccccgagctgctgggataggttctggctgccaccagaacctgaataattacgttactttgataaataattatcttacttgtttttattaatctttattaaatgtatgtatcgctcatatttatttcaatgtttaacattagaagtgttttggctgggcatgggggctcatgtctgtaatcccagcactgtggaaagtgaggcaagaaaatcacatcagcctgggggttcaagaccaacccgggcaacatagcaagacctcatctttacaaaaaaaaaaaaaaattaattagctgaggatgatggtgctcaggaggctgaggtgggaggaacaccagagccagggatgttgaggctgcagtgagccatgattgaaccactgtactccagcttaaaagacagagtgagattatctcaaaaagcaaaaagaatagaagtgttttgggtctgtatttagaagtttggtgatgttttcgtgaccagaaatatgccatagcaacataactcttgtttatatcaattactctatggtaaaaatggtttcattatacgtcaacatttggcttaaagttgtagtttccaagaacgaatcaattacattaaatgatgacttcctgtactacaccattttatataaggtacttgaccttcctcagagtttggtattttcagttgaggggtgggtcttggaatcaattccttgcatatacctagagaactatattttctttttgatctacatcacctacatctttccccagcaaaagtgggttatttctgttttgttttgtttttttgctatttagaatctagactttttggccggcatggtcgctcacgtgtgtaatcctagcactctgggaggccgaggtgggcagatcacgaggtcaggagatcaagaccaccctggctaacacagtgaaactctgtccctactaaaatacaaaaaaaaaaaaattatccgggcgtggtggtggaagcctgtagtcccagctacttgggaggctgaggcaggagaatggcgtgaacccaggaggcggagcttgcagtgagccgagatggtgccactgcactccagcctgggcgacagtgtgaggctcagtcacaaaaaaaaaaaaaaaaaaaaaaaaaaaaaaaaaaaaaaaaaaaaaaatctagactttttgatcaatatatcttgggggaaaagtaaattttatacaagaatttttgctgcagtaactgattttatattattccctaagaaactctgtgaagaattctaagcacatcttctataaggatattataactccttattctcaaaatactttacttttttaattaattgcaattttataagcaaatacatgttttattaaactctttatacttaaaagcttcttatcttctatttagcacatttatatagaaacataaaagtggcttttttctgagtcatagtcttgtgtttgtgtgcatgtggctgtgaagttgattaataaaattacttccctgttggtaactggaatttcagtgaggagatcaggccatccattgagagtcaaaaaaggacagttacaattatcaaatatgttgatctgaggacgtgtttccagagaattttcagaattcccttcctgataccatatgcttaatgttgaaggtattagcattaaattattccttaagttttacattaacattagatgaatttattttgaagtaacctgttctgatttatgatccgtacatagccataaaaagccttcctgaatgcttagtttttattttattttatttttctgagatggagtctcgctctgtctcccaggctagagtgcaatggccggatctcggctcactgcaacctctgcctcccgggttcaagcaattctgcctcagcctcccaagtagctgggattacaggcacgcaccaccagggccggctagtatttgtgtttttagtagaggtgggttttcaccatgttggccaggctggtctcaaactcctgacctcgtgatccacctgccttggtctcccaaagtgctgggattacaggcatgaggcaccgtgcccggccctgaatgcttagtttttgttttgttttttttttttaaaaaaaaagaaaaatgggctgggcatggtgtctcatgcttataatcccagcactctgggaggctgaggtaggcggatcacctgagtgcaggagtttgagaccagcctggccaacgtggtgaaaccccgtctctactaaaaataccaaaattagctgagcatggtagtgggtgcctgtaatcccagctactcgggaagctgtagcaggagaatcgcttgaacctggaaggcagaggttgcagtgagctgagatcatgccaatgtactccagcctgggtgacggagcgagactgcctctcaataaacaaataataggaaaaatgaaaaaataaacctcttagcactctactgtgctataaatttgtctttattgttagtttagctgttaggctgcaaagactattcctattttttattgtcatttatcaataagtttgaaacttgccaaagtagaaattagagatgtactaggcttctactgcttgtgtttgtttattctatgcacttgttaaaatagattttacactagacacaaacatattcccttccaaattgtgcttgatgccatatcaaacttttaaatcattattctcaaagttagtattttctgtctggaatcttatgtttgcttgtttcattaatggattttaatattttaagtaggaatttcttgatgataccatcactgtgccatatacttggtacaacatgaaatttatcaggttcattttatctaccaatcagaaacttggaaggtatgatgctctttttatcataagtcatgaaatatatttgaaacccataatgtttaattatgaaactgatgtttctgataatagattttgtctttatggaagaaagaaggaagtaaagatagaaaagtgaacaaagaaaagagagaaattattacttttgtggcaagtagcctaataatttctgagttaatgcttctttgatgtattttttctctttaagtataattattgtcattttaaaatttttattttggactttcctaatggatttttgtcaggtaacatgggcatttttttttcttatatttcctgacctccgtaagtttttaatcttgtagcgatgtttacgagatactgggatattggaaacttatcattgaaactaaagacagtgagcaataggaacctaattaagcaaggtcataaaatgcacgccgcatttcagtttttgattaagattcttgttgtctttttttttttcaggctgtaacatcttgtgacttataggtttattttaacattgggctttgtatttcccctaccacagtatttgggagtgagttgataatggttctagttctgtcattaactagctgtgtaacttcatacaactcactttaaaacaaaaacacttttttgcataattgctagaatctcagctctaaacatactttcccctcagttcccttgtacttgctttccttataatttatggtctacctccctccatccgtgtctgtgtctgtgagtttgagggcaatatttgtctcttcccttaactttctccttttctttttccttcctcttaactgcttacagtagatgtaccttcatccttttatactgccatttccttgtgttccttgggggacaccatttctgaaagacattcttggaaaaaggatttcatgggcaaatgagtttgtgaaattttgcatgttatataaccttattgtagattataatgctattagcatgttgaaaattgtgagaattccttccataaaatacctattaaacattgttaagctcttggattagtccgttctcacactgctgataagaagatacctgagactgggtaatttataaaggaaagagatttaattgactcacagctcggcatagctggggaggcttctgaaaacttacaatcacagcagaaggggaagcaaacacatctttcttcacatgttagcagcaaggagaagtgcccagcaaaaggggagaaagccctttatgaaaccatcagatctcctgagaacttactctcatgagaacagcatgaggataaacaccctcatgattcgactacctcccaccaggtccctcccacgacgggtggggattatgggaactacaattcaaggtgagatttgggtggggacacagaaccaaacagtatcagttctagatttccttattttatttgagtactgaatactttcttgttattgtagtgctgtgtctgtgactgtgtttctgtgtaggtgcttgtttctaaggatgtaatatgagtgtatatatctaatacatattagcatcccaaatatttggtgttttgtgctattttgataatattgttttaaaggcctcagggagaaggccttcagattggattctcccatcccttttttttttttttttttttttttttttttttttttttttttgagacggaatctcagaatctcgctttattgcccaggttggagtgcagcggcgtgatctcagctcactgtaagctccgcctcccaggttcacgccatgctcctgcctcagcctccccagtagctgggactacaggcgcctgccactacgcccagctaattttttgtatttttttaatagagacggggttgcactgtgttagccaggatggtctccatctcctgacctcgtgatctacctgcctccgcctcccagagttctgggattacaggcgtgagccccccgcgcccagccactcccatccctttttaatatatttactgcatctgtggctaaacctataaggcctgcatatgcaaggagatatggaaccttaatctagcttttctggttgtggcgcagtgtgacaaggagtactctctatgccagtagccaagcgattcaagagcctgctgcagtccatgcaggtcttttgatgctaaaagatggcgatagtcgttggcactgcaaatgctgcaatggtctcatcgaggtgaatggatggcgccggaagtgattgactcatgtaccctgcaacacaagctactggaacctgttctgcttctgggccaggagcagtttgcaggtgtggacatcctgtctgggtgaaggatggtggtcatgaggcccagttttatgttatccatcagtccatctccaaatccctggtgtcccattaccagaaatatatggataaagctttcaagaagataaaagacattctcagtcagtatgaccagatactgctggtagctgatatatttccagaactgaatggtagagaaagccctatatatactactgcccaactatgagtctaattttctaacctttaaataaatctgttttaaatcatgcttcccaaggcggacacggcggctcacgcctgtaatcctagcactttgggagactgaggtgggtggatcatctgaggtcagaagttcaagatcagcctggtcaaaatggtaaaaccccatctttactaaatatacaaaaataagccaggcgtggtggcgggtgcctgtaatcccagctactcgggaggctgaggcaggagaattgcttgaaccggggaggcagaggttgcagtgagctgagattgcaccattgcgctccagtctgggcaacaagagtgaaacttcatctcaaaaacaaaaacaaaaacaaaaacaaaaacaaaaacatgctccccacatgtgctagagaatattaattgttagtcttaaatgcttcacacacacaaaatattatttccataactaaagaagcttctattttagatttttatgttgttggtaaataccattttgcttactgaaaacaataacagcaacaaagaaacctttatagaattccattgtgacttgatagaatatttcagcttatatgaaccagtaagaataattcattaccatatgaaatacctcacttggccttaagacttagtttggtattttatattgtttgaaaatatatggattatttgtttggagttgtgagaggtagacaaaatcaaaattattttaaagtctgtaatttatctttatagaatattcatagtgtctgagagaataatttttctaatgtcgatatgtcagtctaggttgtgtacaaggaacagaaacctcaccacttaaatcaggaagtggtttaatatagcatgctcttaaaattgttaaatgagataagggaaagaattttagaatgtgcctttggaaatgacacccagaacgacataaaatttaaggactcctatttctgtggtctttatcaaaattgtgcttaaatcaagaacccactactactgcttcagttgactctgaatacgctggaaacttgaaattgtgcacccacagctgcaatccaagaattagaagggcttgtgctgaagccatgccattattgttatgacacacactacttcttgtcacccaggaagctggatgatggactctgaaacacaactccaagtaaatgtcttactaccaacaatcatgcttgccagttgaaaaagttaaaattagcaggaagatagcctcactctcacttctgcttgccaatttctgaatgcactttgattagcatgcagaaccttagttacaagtttgtgtggaaaagatagttttaagctttccaatcacctcaaatggacagaggatggaatgaggctgaaagagccaatccagggtgcccactacaattgtttttggtgttctttgtttagaaatagtggcgattctttattttttttttgagacggagtcttgctctgtcgcccaggctggagtgcagtggcacgatctcggctcactgcaagctccgcctcctgtatttacgccgttctcccctgcctcagcctcccgagtagctgggactacaggcgcccgccaccacgcctggctaattttttttttgcatttttagtagagacggggtttcaccgtgttagccaggatggtctcgatctgctgacctcatgatctgcccgcctcggccttccaaagtgctgggattacaggcgtgagccaccgcgcccggcaattcgttcttaatagaagttccttaccctaggtacttatgaggacagtaaaaccagcataggaaatggttgttactatgttttgtcgtcttttgggaatcttaaaaacagttttcttggtgatctggcttcctggttgtgcgtgtgtgtgtgtgtgtgtgtgtgtgtgaatagtacacttcctcacattatttttattcacagttatgtcatagtatggttttgacaatttcatatctttccttggcatcaccaattcacttaaaagactcccatattttctccaaggtgcctcattaggcccagtctatggtttgctcctctcaagtgatttcagaaactcctcaagtatttcatcttctttcatggctatcaaagaacgggtcacatctggcaggaagaaagatggcatcattgaattctgctgacatacaaatgcaggtttttaaaataaatgatctttttcttgtttgtcttttattatctcaaagggagatatttagttgtctccaaatttctgaacagaaaccatttctagttaaatttttttcaaagacatttgaaaaataaggcttttctctatcagatgcaagttttactgttttacagcttgagtatttgatttgcaagaagaatatacaattgagtaaattagaactatcgtagttctctccacaaagattttggacttaaaggagtgcattaagtttgcgattactcctgcaaaatgccatggggaattacatcatgtacttacataatttgtgaaaaaaattttattgataaaatacagataatagaggcaaaattatttaatatataaattatgcaaataatcctttcaatgttccaccccattccatgtggagagcctgagcttctattttgggactctcattgttatctatcctatgtccatgggatgatatgcacacagaattacatggagagtcaaggtaattattctgataaactcaagttcaatcatctcaattttttccctctcgaattatacaagttatcaattcttttttgaactcatattgaatgtagcacttaatttaattttaatcatcatataaagttagaaaataatgggaggtgattctagccagatatataacaaacatctaaatttattagagctttgtgttggaacttttacaagaaacattactttaataatattgatattttgtcttggtcagagatcaagtgtattaccatatgtaaaccaatgtttttaaaactaggtgattttcaatctaagattatacctaagataggcattgagctattatgtaatgtatatgcctcatatacatttctaaaattctttttttctttttcctttttttttatctgagacagagtcttgctctgtcacccaggctagggtgcagtgccatgatcttggctcactgcaaaccccacctcttgggttcaagagattctcctgcctcagcctcccaaatagttgggattacaggcacctgccaccgcacctggctaatttttgtatttttagtagagacggggtttcaccatcttggccagctggtctcgaactcctgaccttgtgatccacccaccttggcctcccaaagtgtcatctcttacattcttataaatatgaattattttcagaacttactgttggcaattattatgtataaatttcaatatgagtacatattttatagttctcctttcctcatctcaaacatgtaagtacatttctttcttggtatacacatctgaagtgctatggggtaaatctctcaggaaaataacaccccaatttctatttggactagtcctaggctacctttggaagtgaagtatctgaggtggaggaccataaactggccattgcaggaccatcccaaatccggatttctctcatatcattccccaattcacagatgttctaacaactttcaggatgcctcagtgttattcctggaagtaatttctacccatgtcaaacaaattaaacaagtcatttggtgattggttttgattgttggacttgattcttgaaaaaacagcaatcaaaggcacttattgatttttataatttatgtctccaagaacttgtgccattttatgaccattatgtaattaattttgacaaatcaagtgagtttaatatctaaaatgtttgtccaacctcattaaaattgggcaaagacgttagggtgtcaattttaaatctttcctgctttctcttgtgggcatttaatgctatatatttccctctacactctgctttaaatgtgtcccagagattctggtacattgtgtattcattctcattggtttcaaagaatatctttatttctgccttcatttcgttatttacccagtagtcattcaggaacaggtttttcagtttccatgtagttgtgtggttttgagtgagtttcttaatgctgagttctaatttgattgcactgtggtctgagagaccatttgttatgatttccgttcttttgcatttgctgaggagtgtgttacttccaattatgtggtcaatttcagaataagtgtgatgaggtgctgagaagaatgtatattctgttgatttggggtggagagttccatagatgtctattaggtccacttggtccagagctgagttcaagtcctgaatgtatttgttaattttctgtctcaatctaacattgacagtggggtgttaaagtcctccccccccattattgtgtgggagtctaagtctctttgtaggtctctaaaaacttgctttatgattctgggtgctcctgtattgggtgcatatatatttaggatagttagctcttcttgctgcattgatccctttaccattatgtaatgccctttatctctttgatctttattgctttaaagtctgttttatcacagattaggattgcaactctttttttttttcctttccattcacttggtaaatattcttccatccctttactttgagcctatgtgtgtctttgcatgtgagatgggtctcctgaatacggcacaccaatgggtcttgactctttttccaatttgccactctgtgtcttttaattggggcatataacctgtttacatttaaggttaatattgttatgtgtgaatttgatcctgtcattatgatgctatctagttgttttcctccttagttgatgtagtttcttcatagtgttgatgttctttacaatttgctatgtttttgcagcggctggtaccagttgttcctttccatgtttagtgcttccttcaggaactcttgtaaggcaggtctggtggtgacaaaacagaatagaaaaccaagtatcgcatgttctcactcataattgggagttgaacactgacaacacatggtcatagggaggggagcatcacacaccagggcctgtcggggggtgggggttaggggagcaataacgttaggaaaaatacctgatgtaggtgacgggttgatgggtgcagcaaacatgtatacctatgtaataaaactgcacgttctgcatatgtaccccagaatggaaaatgtaataaaaaaattgggcaaaaacatgaacagacatttctcaaaaaagatgtaacgtgtggccaacaaacatgaaagagttcaacatcactgaccaccagagaaatgcaaatcaaaaccccaataagataccatctcacatcagtcagaatggctattattaaaaagacaaaaaataacatacgctggcgaggttgcagagaaaaaaaggaacactcatacactgttggtgggagtgttaattagttcaaccattgtggaaagcaatgtggcaattcctcaaagagctaaaagcagaactaccattcgacccagcaatcccgttactgggtatatacccagaagaatataaatcattctaccataaagacacatgcacgtgtatgttaattgcagaactattcacaatagcaaagatgtggaatcaaccttaatgcttatcaattgtagactagatacggaaaatatagtacatatcaccaaagaaaactatgcagccacaaaaacaaaacaaaaaaccaagatcatatcctttgcagtaacatggatggagctggagttctcagtcacaagtgggagctgaatgataacacatggacgcatgaggtgggggcaacaacacactgaggcctgtcagggatgggtgtgggggagagcatcaggaagaatagctagtggatgctgggcttaatatctaggtgatggaatgatctgtgtggcaaaccatcatggcatatgtttacctgtgtaacaaacctgcacatcctccatatgtaccactgaacttaaaacttgaaaaaataaatataaaatgtttgtcaatggaaacatggatgaagaagcatctcacaaatatttggtcactgggtttcttggttgcaatttcttttaacagactgaatgaaactgataacattgatctaacaggatctccttttatttacagaatcagtccactaaaagtattcagtccagaatcttcttctctaattgtatattagagctaatactttggggaaacatgcaccatttctattttctatttgttgtgatttagattcggagtctacaacttggttaggttaagaaatatgacaaaaatgaataattaaaaaagtacaataatgttatttgtataaaaacatatgtaataattatatgaatataataataacttaaaatatgtatttttagggacacaaatcaaaacgtaatctaaagtaatctaatatatgcaaacagaagttgtcaaggtaattggtagtctcaaataaaaccgtggactaggtgtcagtaaattctttcctagaggataggaacaagagccataaacttccatgactgtgagtcagaaaatgtttcttggtaggggatagataagaaagcactctagatagcactccagataatcacaagcagcaaggctgtaaaaagatgtggcagttttaacgcataagtggatgtggtagtatttcatccttagtacgacattttgtcagaacattattttgatctttgctttcttagccatttttactcattcagactcaccagttgtcactattatttcgcaccgtgttatggtgttatcatccctcatactattgttactcaccctgggtactcattcctgcaaattgctgtctgcctaattgtcctttcataaaattactcatctatgttaaataatataggtccttctacacttatttctcaggtaaagtgacttattatatttgagctcatggtaaaagcaaagaaaatattgcagctgattaaggaatgaaaaagctatgacttcagatgctgcttaaactgactgaagaggtgagaacatggattttaggcaggaattttttgagcaaaggctattgcaaaaatacaagtatgtatttctaaatattcacggaacacttactatgggctatacacagttctgggttttggaaataacggcagtgaattacacatataggacctttgctcatatggggcttatattctaatgtggggagacagtgcactgataagtcactagttaacttctcagtgatgaaaactacaagaaaaataaaattagggcaatggtatacattgatggggatgagtcaccgcgtgtgtatgcgtgtatgtatgtgtgtgtacatatagggggataagtggtcttcttaatatctactggtcaatggagtcctttctgaaaaactgacatttgagcagatacttgaatgaagagagagcataagccatgactatatcagatattattttgtcttgagggctaagtaatgtctgaaagatgatttcatcacctaggtattaagcccagaatccattagctatttttcctgttgctctcccccacacccacccccggcaggcctcagtgcattgttccctccacctcatgtgtccatgtgttctcatcattcagctcccacttgtgactgagaactccagctccattcatgttactgcaaaggatatgatcttggttttttgttttgtttttttgtggctacatagttttctttggtgtatatgtactatatttcctttatctagtctaccagtgatgagcattaaggttgattccacgtctttgctattgtgaatagttcggcaattaacatatacgtgcatgtgtctttatggtagaatgatttatattcttctgggtatatgcccagtaatgggattgctgggtccaatggtagttctacttttagctctttgaggaattgccacattgctttccacaatggttgaactagttaacactcccaccaacagggtgtgagtgttccttttttatctgaagccttggaagcatatgttattttttgtctttttaataatagtcattctgattgatgtgagatggtatctcattgtggttttgatttgcatttctccagtggtcagtgatgttgagctctttttcatgtttgttggccagatgtatgtcttcttttgagaaatgtctgttcatgttctttgcccactttttaatggggttggacaaacattttagatattgaacttacttgatttgtcaaaattaattacataatggtaataaaatggcacaagttcttgaagacataaattataaaaatcaataagtgtctttgccttttttcaagaatcaagacttaaggagctttctctgcaggttcaaagaaaagcagacaagtgtgactgcagtagagtgagcaaagacaatattagaacagggagtttaggagccttgtagttcatattaaagactttaaattctctcctgatcatggtggaaagccattggagatttttaagtaaaggagcaatattttggggaaaaaagtgcagactgaagatttagagtaaaacctgccgttgattaaaactatgtagaagaaaaaaatacacaaataaaagcccactgagcctcagttcctgagtggccttcatggtaaaatgttataagagaaatactctaaggtgttttaacataaaattgagctaaagtctagtaagctgagatgttggtaaagatattgatgatgtatttctgaaagcatttgtgcgggacagtaaatcttaagagtctatcagtttaagacttttcttcactgcaatctactgaaacagaaccctgatcacaaggagcactgatttcttctatggtgtcatggtataatttatgttttgcaatgatcactctgggttctctgtgaggaactttacagtgggtctagaaaggaagcagagagagcagttatagaaactattgtagccatccagaagagataagatagtgtctaaacaaggagcgtaatagcagatatagaaagaagtggatagtttcaagaggaggctttaagatttattgatagattgaatatgtggtgaattggggaaagataaaaatggaatggatgaatacttttgatttgtggatcgagtaagaatataatgtttgcctactgggaaaaagacacctctgtgtaaactatgttttctgctgtagggaagggataacctggagtcttttctaagtgcatctaccatagtagataaaattggcttgtggcctgtgctagaagaaggaattggggaaatggtgtaaaagtgagtggaaggaggtacaaaagcccagtcacctgtgcctcctcccccaaacaaaaagcataagaatatccaagaccccgcacagatacctgatattgacctgccaccaaatgacaggagccctttccttgtctttttccaagaaagacatgcacaggttctatgtagagctttgtgactgctagcattcagaagtgtcctagatatttgaattcattttatctgtttaagaaacaggatcggagcatagatggggacagtctttcattaaaggaataaggaaaggctctgtaatgtggcacagagccttctctgatttaggatgtgcctgctcattgaacttccataataccattttaattactgtaccaacctgacagagcctttgtttgttcaactcagtttgcttaattccttccagggataaagtgagtacatgcttcttggtaaagattatggtgacatataaaagtaaaaataaatgcaattatatcatcttattcagtaggcattttcaaacgttcctgcaaagaaatgtggtataaaacctaaatgttaatttcccacttaaaccattcaagagatacataaatcgaggaaaatggaataggtttcttcataatcttaccttttcctttaacatcacaacttatggggcaataattgagtagaaataaaaatgttaaaatattcataatatacaagaacagaaacgtgaatagaaacaaatctggatttggaatttttctgattttctgtgatgtcttcaaaatttctgccatcatttttggctcctacaccaaagctagaagacaacttaaatgtatcccattaaatatgattacatatttaatattgactaaagaaaggtggtgagtttctgttacataacttcactactgctttgatactctttgaagttaccatatttccctcctggaaactgcagtatgttcctaactggtcacttgttttcagacttttcccctttatctatacagcaaccagaatgatctttttcaaatactgaatagacatctccttgccctgcttgaaatagttctggtgaccttccatgaaacactgcagatgaaacaagtatttatatcatatatgttcttttttgaaagtctactctaagtacagtaaaaaatgcttttgaatgtattaacccaaaaataccaaagagaagagacaaattatgtgagacaatttcggacaataaggagcagataattaaataataaataagatttcatattttcctgctttaagtgagtgtaagtaaaaatctaagataagaaccccagcaaggctaaacatttagagacttcaggcaccaatgaaggtagggtttttccagtggggctgagaataagaggattagcttagagcctgttttgaaaatagctaggcctctaggttccctaatacaaccccaacagacaggcaatttcttatccactactatagtctgatctcaccctgctaataaagatatacctgagactggataatttataaaggaaagaggcttaattgattcaaagtttcacatagctgggaaggcctcacaatcattgtagaaggcaaatgaggatcaaaatcatgtcttacatggtggcaggcaagaggtttgtgcaggggaactcccatttataaatccatcagatctcatgaaacttattctctaccacaagaacagttcaaggtgagataccttgcattgtaaggtggggtggggatacagccaaggcatatcaactactttggcagaaaacagggaatttaatttcataagcagtaagtctcaggactaataaaaggaagcccccaaaccatggcgaaggagtaaaccgttgcagtttggaacaggaagatggtaggcaacaggaatgatgtcaaaagtaaacaacagcaacaataaaaaactgactagaatactgattttccatttggggaggagttttgtagttcttttgtagaattatgcaataataaattctaagaaagaaaaagaaaagctgaaacacaaagcaattaactctaactctaaaaataacccaaaacttgttcaaggaaggaagtgtagtaatactaaactactttctcacctatcaacaaaaatgtatatagtcataattatataaagactgaatattaatttaactgaaaattagattgtgggaggatgaggggagagaaagtgtgaatatatatgtgtgtatgcgtccatgagtatggaggggtgtaaagaatgaatttctagtcttatatagcagaaagtcgttaagttatatataagctttaaattttaaaaatactaatagaaacgtcttatagagaattacgaaagtaaatgcacttgacgtagccaaaacaattggaagagaatggagaggagtggagtggacactgctattttttaccataagccttgatggagtgtttgactttttaaatcatgcacatttactgtatgatagaaataaaaattgcattgaaaacaaaggaattccttggttttacaatccaaaatccatcccctgaccatagtttacatatccctgcctatctttgctacctcatattttctcattctttcttattttagctacaaaatagcccctttacccctgcttctcattttcagaaaatgccaagctcagttcttcttggtaggccttactgcccaaattccacatggctagcatcttcttgtcagagctcagttcacataccatccttctcaggatggcttccctaaacagccactctctgccatttttccgtcttgttttcttcataacactagtcctatctgatgctgcccttcttgaggatgggacaatgcaagggatccaggccttggttgtgtcccaatgcacagaatgacactttgataaaatagagcagacattttcaagagagtgtgtctttaaatttctcagggttcatttatgagcatttacggattatcctctgtgttttcagcattagagctgcatgatggataatttcaggaatccaaaacagttattggcgtaggcagtcttgtttacaggttggtcagaaaatgatagccaagagctgggaagccaacaaaattcatctttaaaagttgcagggatttgactactgagttatcttttgctgcataaaagattatgccaaggcttgctgactttaaaaacagcaaagattattatcttacagtttctatgggtcagaaattcaggagtggcttagtgaggtggttctgttatagagactctcatgaggttgcaatcaagatgttagccaggactgcaggcatctggcatcttaactggagctaaaagactggcttccaggctcactcttgtggctgctggcaggaagcctcagttccttgcaatgtagaccacatagggctgcttgagtgccctcatagcatggcaggtggcttccaccagagtgagtgatccaaagagagagagaaccgaatggaagttacaatgccttttgtgacttaccctcagaaatcatactccatcatctcttccacattctgttcagtagaagaacaaagaacagcccaccttcaggaggagaattaagcttcatctcttaaaaggaggagtatcaaagaatttgtgggcatatttttaaattatcacaactactgtatatcttattaatttattgttttggtactaaaatattctctagtacatgcacatcacaagcagtcaaaaagatataaattaaagggcagtctttttgttccctctgggagataactaatatttttgaaaaatctactggatgtcactatcctggatttttaatatttgttacctgatttaatcgcctcaccattttggagtcttggtattttgtttatttaatataaggacagttactctcattgatgttagtaaccttttcaaaaacatgtttaattagagggctaggctgaaccgaatgatatacagtgttttctttgctgtggtgtcatcacactagtggcccttggtccaatatggttgcagataggtttggctgaacacacaaaatgctttgtaaattttaaaaattagtttataacattaaaaaattgagagatttcaactgaaatgtggaaatcatgttttgaagttctttgaagcaacaaagcgtctctagatcaaaacaagtgctgaagttgaggctgccttttttaggtaggtgtatactttctggccatcatctagatttgccacagtcctgattaataaatttagcctatttatgttctcattctgatccttgtagacatttaaatttgccatttctggttggtagaaaatcaatatagaaaataaagaagaaatcaagtactgacaattgccagtgtataattttcaaaacgttaaaaacatgacttatgtaaatatatagagagcatatgtcaagcagacatttagctcattaacaagagaaccagcaggatggcaaaactgtttcaaagtagaatggaagaggttgaaatatttacagtcgatgaaagaaaaagtactgatataagattgcaaaattacagataaaactagtcaatattgtactggacaatgaaagtgtaaactttgcagttatcttttctacctgatggaaatcatttgcatctctattggagaaaaagtatttttaatgcatcaatctaaacatggatttaaacaaattaaatccatagagaaggggacctaagcaatatttgcttgaaattataagtcaaacaaaggtatattccccaggagaatgaagtaatccttggatggccttgttagacaatggttcagaatgacataaaaaagacaaacaacaattccttttatttttatttttttttttaagcaagatttgactttctcaattttgtgggtttttttttctaacttttattttaggttcggggtacaagggcaggtttgttacataggtaaacttgtgttatgggggtttgttgtacagattatttcattgccaagtccccaaaagttgtcttttctactcctctccctcctcccatcctccaccctcaagtagactccagtgtctattgttcccttctttgtgttcatgagttctcatcattcagctcctactaatacatgagaacatgaagtattttgatttctgtttctgtcttagtttgctaataacctccagctccattcatattcctgcaaacaacataatctcattcctttttattgctgcatagtattccatggtatatatatgcaccatgttttctttatccaatcagtcacgatgagcatttaggttgattccatgtctttgctattgtgaatggtgcttatagtgctgtgttaaacattcaagtgcttgtgtctttatcatagaatgatttatattcctctgggtatatacacagtaatgggattgctgggttaaatggtagttctgcttttagctctttgaggaattgccatactgctttctacaatggttgaactaatttacgatcccatcgacaatgtgtaagtgttcccttttctctgcaaccttgccagcatctgttattttttgactttaaaatgtttcagttctatgttcaccaattctggtaattcattacttgcctcataatataacaaaaaaattgatgtgtcattttatagccaattatgagttatcactacaactattcattttttaaactcttttctgaatgtttcattctcattaattattactcggtgcaaatttaagtttttaaatctaacaaataacaagttttaaaaacatagttgcttgtatttatatactactttacaagtttcaaaatatttttattctttttttcttctacttttgccaatgttgatatttagagttatcgatatttcagaagatgagtggtcagtactttcagatgatattgatatagagcagaaaatttctcactaacttttgacaattaaggaatgttaagtaatcaaaataagagccacttcaaaggaacaatgagagcaaaatccaggtgacttttggttgaaaaaaagaataagtagcaactaaaaaaatatggtaagaagaaaatatttaaaattttgttccagtaacagtaaagcaataagggacttacattttgagatattttagtaatgtcataaaatgattatggttattttcattcatctcctatgaactttgttatatttcagcaaaattaaggtaaaatactcaatactttaggaaattcacttcgctcctaaaaatgttcaaatcattttctgatttctgaagacaggtatataatttagacttttaaaaattctagtttccaggctggttgaaaaaagcttcctgtaatttggaaaacctttaaatgcttattaaatttggtcaaatttatccgttcatccatctaatgcatttatgtattggcttacttgcttgaactctttgtctaattgcctcaactctttaattctaatacaaattaaattaaaagcagacacttcaactataaaatgaggaacaaagccaattccccatagttactaagtgtttggcttattattaagttctgtagtgagatctcaatgcttcaaagttgcatgactggtaacagtatctattgtttcagtggcagaaaatctttctgaaatgataaagagttgagagaaggtatgaatgctgtcaaacagctcttttgtctgaaattacaattgtataaactaaagcaactgcatgcccagcttgagggatgggtcattgaatggactctggcacatactttatctgaacccaagatatttgaaacgacatttgtaacagtgagttctgagctctagctgatataataatacaaaaagactcaaaaacaaagcaaaccatacattccagatttctcaagacagataaataattcacacttttaaagccctggttaatggactggttgaaaaaaaaaaagcttatttttgtttgggaaaaatttaaatatttatgattttataaagactgtataatttaggaataaaactagtatcaatagcctgaaaatctctatccaattaattgcagtatcttctttctgcttatccttgtaggaggtgatagacattcccacaaagtttctgccttctctaccttgttttgacaatatacccttacaaatggtaatgctgacacatatgtctatgttagtcttactattaagagaacatcaatagaagcagcatgttactgaggaagtattttgaggcataggataggaggaaagtttaggctcagattgcagaaggaaactcttttaggggaggaaaaaatataattttgacctgttttaagttctccagctgggaccatgccaattagactaacaaaagattaacaagagaaaaatacacacatttatttaatataaattttatgtgacacagaagcattcataaggaaatgaagacccaaagagatggttgagcctgagtattttcatactaagtatgatgaagagtagaaagttatggagagaacatgatagggcatggttaagagctaagaatagtaaatggggcatttagcatcacctgttcagatttctctgtttcccaccatctttggaaataaggatgtttctttcctctggaggtagggaggtcacctctcacttgaggatcttatgacctactccaggggagaaggataaggttagagagtttttgcagtatttgctgtttctatgacctccttcagaggaaaggagaaagttagggagcccttcttcaacctgctatttctcaaattccttcaatatgccaaagtgccatattgtggagtagactgttcataagcttgtcactctgtttagtcagtgaatcatagattcattctaagttcgagaaaggaagtatcaaagtataattttcaaaagttaaaaatgtgactataataaaaatctagaatgaacatagatcagaaaattacttatggcattattgagggaaacagaccagtattgctggtctaacctcattagaggaattgggtatttataggtattttaatgaaaaataatgtttaaatgagattcataggttaggcatataaatgtttaatacctcacagggcaataaaaccataacctttgaatttatcatttttatcagagaagtatctacaaattaacatgcaatttcagtgtatggctgatcaaaaaatactcaagtcaagacagataagctcttctaaagctgcagcattgagaatagcgtaggggcaaaaagaactttgcttctaccctgtgaagattctgtaatttcagtctctggaataaacttgacagcagacatattaagaggagaaaagggatgccaatttattacatgcatactcactggggttccacagagtatacgactccaaaaaagaccagatggctgaagatagtatagtatcctgagctacagaaaacaataaaggtgtgggtttcaggtggtgacaggttataggaggttgaggggaggaaatgcatggagaacaaaggttgtcttgatatgcaggttctctcaggcagcagtcctcagcaaaagacgtggtgtgttgaccttcagcctcttttcttctgacttaatctttctggtctgatgagattataggtagtgggtttattacagatgctttctttctttcttttcttccttttctttctttctttcttctaaaggaacttcactttgtcagataagggaacttcagagaaaacccatccctgcattggctgctccccaggtactttgcagtctgaagttcaaagcggcatatattttgggatacctttttctaagccgcaacagtagtcactagctacctatgtcatttaaatttaaattccagttaattaaaattagatatgataaaaattcaattttccagtcatagtagtcacttgttaaatttggctagtggttactttatgggacagcataaatatggaatttttttattgttgacctaaaaggaagaagctgaggccaaattaatctaagtagagagtttattgggaccaagcttgaggattgcaacccagtagtacagattcagtttgctctgaatgtatactcctattagcagcagttacaagtaggtttttaaagggaaagaagagacccttcctaacttgtttactaagaatttacattaaagtaacataagttattgattggctatacattgttctttgtatcacaagttccaggaacatgaagataatgagtgagacagctagtcagaactgaaatgtctttaaacagctgcccctgggctcaggtgtggaaggtatagctgaaatcccatactcaagtctctctgagcctgattaattttgcatacctcacatagctcagactgctcttagctatttttcttttctcaccatcactgtagaaagtgctgttgggcagcactcttctagagaattaattaatcagtccttgagcaagccttttttacaattcctaagtatgccattgaaagaaattatcacccctccatttgctttatttccaagttttggatattttttcaaacaaaggaatcttatagatctccttttccatcttctccaccctttccttcttttaataaaagggaatctgaaaacaaggatttgccttacactcagaaaaggtatttattcctcactactacagagtttagctgtgctattgaatcagttctgttcattccatcgaatgaactattttggacaaatgcaaaaagtaagagattacattctaaatacctatattttaaaacgtggaaactctttatgcatgtatctaggtcgtcttcagtcttcagatagcaagaagaaaggcaccaagataattattttacataattattaagtcacattttggcatagcaagagactttgcagtttcttttcataaaaatgtctatacttttgaaatgtcctctatgatggtttggaaacacttatgttatttttggatcatgatgctagattgcacctgtgattcaatgattttgtgtatgtgtttttcagatgtgcaacaaatggcgattgactggctcactcgaaatctctattttgtggaccatgtcggtgaccggatctttgtttgtaattccaacggttctgtatgtgtcaccctgattgatctggagcttcacaatcctaaagcaatagcagtagatccaatagcagggtaagaaattctttatagtgtttggtctaaaaaagtttgcgtttaaaaagaaaagattgaagtatgacaagtgttgttgtggaaaataagactacagactcaaactttttagaaatgttgattttaacaactgtgtcgcaggaaggaaaaaaggctataactcaccaggcagaagctggtgagttattagtgtatgaatattgcaggtctaatgtaagacacaaataaccttccatcttcccttccaccttcccaagaattgcatcagggtcatcagagaaaagcctcagcatatttttaggttaaagagaggaaactttttaatgcttaacagtggactttttcgttagcaaacctccagaatgctacttgaaggatgtactgttgacatacttatatccagcataacgtttaggatttacaaaaggggcacaacatatgtttacccagatactagtaaaacattaaaaatatctttgttcagactcttacgttcgatgactgttgatatgtaaacccaaatattattatggtgttagtgaattcctcatcagaattcatcttcttttttttttaacttcccaattttgcaagctactttattggttaaatagagaccttctgacattctttagctaatagactcattaatctttttaccatatttcataatttataaaaatatagtcataaaatgtttaaattcccatcatctttgttcatatgattagaaaatcaatacaggaattatgcttttattttacaaatatggtggtattattagagggccaggaggaaaactcagttctttcagcagtcactactgggcaaggatactttcaaattaaccacatagtgtaccaccttatttgaaggagctgttattttttaagatgtaaattgtagcaaagatttgaaaactgaaattctatccttgttattgttttaatagtcctcaggcagttcaggctgaaatgtctgatggaacatatcctaaactgccataagcctccattcaataaatgggaaaatatttactgaagaaacagctgtcatccatatgtggactttcgtcactctttacttaaagtctgattgaatattaagacgcatcatcacaatggttctgattttgacaagaacagcttgcacgtaagaactttgctgggaaggctgtgtaatataattcttgaatgtagctctatttgtatttgcagcagatggttacttgactcaatctgactgcagtgatgcttcaaaagacattaggaaaagaagtcgtatttagactgatttgtttgggttgttggataagggcagtaagaaagaattggaaatttacaaacgcactaacaacattcttttggcatcctgttgagaaatatattgcttgcatgtttttccctggatgtgataactgaatttcagattagcctttagacagcagtgtctgtcaaatgttaagaggtgaaactataaaactattgtgtttttcccctttttctactgctcttatccttccccattcttaaaaacaaagatccagaggcccttttcaaataaaactgccaatctgaaatatatgggaacaccatctctctttctgaacaacaatatactttctgttctcaggtttcctgtttctccctgtcattgtatgaaagaaccatattttatcatttttgtcacaggaattaagagtagaaaacccccacatcatttgctcttattctctgctggattccttcaagcctcataactgtttaaatgtaattttgtcatgtatcatttatcagaataggttctttggaatttttgtttgagttagttctgtctctatagcactgtttttaatcatgaatcatagatatcagagaaggaaatgctcaactcttttataaatacaggcctggttgccacagaacactttaaaatacattctatttttctcttaatatcagaaatttagttaggattgatgtgattctatctaagaacggaacaggagatttttcctttatcttctacatttgggcctgctctagaataatttgaatagttttttggttagaaaaactgcacatgacctactaaaggggaaatgttctgcgcctaaaattcctcctaggttttcctaattttacaggatgatatgtatttggccttgactattataacttctgttcagaaaatatcagaatgtattaataatctgacctaactcctagagcttgaccttcatagattttaaaatggagaaaaatttgccttaccccccaaaaggatgcctggagaaagtacctgttacttaagcatactggtttttttttttttttttttttgagacagagtctcgttctatcgctcaagctggagtacagtggcacaatctcctctcactgcaacctctgcctccagggttcaagcgattctcctgcctcagcctcctgagtagctgggatgacagttgcctaccaccaagcctggctaatttttgtatttttagtagagatggggtttcaccacattggctaggttggtctcaaactgctgacctcttgtgatcctcccacctcggcctcccaaagtactgggattacaggtgtgagcctctgcacctggcacttaagcatatttgtaacttcatttttctcaacctcctattcttttgttgctaaggactattgaagaaatataattttttggttcttgtttttttttttgtttttttttgtttgtttgtttttcagttctccatggtttaaatatagattactaactttctctggactcccattatgacttgagccaagctccagtcccagtcttccaagaagagatttttaaatcaaccttgtttttaattttagatttttagatgtggacattgactcattaattcagactatttcccagagatgcttctagagattttcttcttcctttcaaaagtttttagcaacatttcctttcaatagttccttggaaaactttccgaaattatttctctatagtcattagagttggcaggtagcatagagatcatattccaaccaacatcaaaaacagcatttctgtcagatggttagtaggtctctgcttctttaatggttatgaacttgatgctggagtcagtcttactgagatcaaatcctggctccaccagttactagctgtgtgactttggatatttcttctgcctttgttttattgtcataaaaatgtgaattatgatagtgctgccctgcagggctgttgaaagaattaaataaggtcaaatacataaagaaccttaacattttctgagttgtggaatatgtgaagtttcttcttcatttcgcctcaatgataattgctaatattttcaacacttgtgataccattacgaatagaataatgagaccaatattctaccccatcaaagatgacctttttcttttcaaccttgttctctttctactacaaatccttctaaaaaggtctatttcatacagattaaatctattatataataaagtgttgagaaaaagaggagagaaaataagaaaaaaaatgaagtgtagcctagggaagaaataaagatgaagggtatgtaaggtgtaggaggagaaaagtatagggtacctctgagtatggctcggtgggcatggaggggaaccttttttcttacccatcgctgcactttggctgaggcacctataataaaagacatattgataagagaaaagcatacaaaggtacttacaagtttgacgtgacataggagctattagaaatgaacatctgaagtaatggaaaaccctgttttttttttttaatgtaacatttgatgaagtggatagctgtggagaagcacgattgaaaaaaaggggtataatctaatgataatcaactgggggaaacttagtgaggcctgtgcgttcagtttcttctctgtgtccccaagttttcagagatatggaagctcctttcctccgggtatagagtgggcacctctcacatgaggttcttatgatctacttcagagaaaggtcagatgatttttttgatggcctgcatcaggggagaagggacatctgcttctgctgttttctcaactgccaaggtgccagattttgggttagcatgtcctctgaggacaccataagggaagatgtaacagaggaacaaccttattctaacaattgctgttatgcaagatatatttggattactttcaaggtctttcaaaagacaagagtaaagaataaaattctattgtagttacttttgtctgtggaactgcatttttgaacatgacactgcttcaatatcaaactatttagtattggggtctaatgaggattgtaactgaggtcaggggtggagctagtctacaattttgttcctaagctgtggccctcagttttctattaaagtaaaatcatcacactatacttgagacagagtgcatttcactatgagtgtgaacttgttgcaaaagtattcaacaagaggagataattaattctaggtgtgataattattagaatattagagtaaaagtaaatagatattttagtcaaggtaccaaagttggagttaaaattttgagaaaatatattttggggaacttggggtaccattgataaaacccaggttcaaaagaattatgtgatttggctaaattgagggagggggaagatctcctatgttaagtaaaataacagaaattaaatattttccaaggacaacatatacccttatttctgtgtgggatgaatcttttgacttgcagacagtgaatagcagagtgatctgtaggatttatttgtgaacccatcacctcatgccaataataagggaaaagtgtgttgtctttgttctgtacaagagcaggccatctgccaggagacaggagagtgaagctcatctcaagttaaattcacacaagaatgattgacagtattgaagagtttaaaaaaccctttcccatcacccacctgttgaagctaataatgactgagaaattaaagattgaatcaaagttaacagctatcgggagcaggactgactaatgaaattctaatctgggttgttatgtgaagttgggaagatagcaaatgaagcgggtttgcctacacacgtaaaaggttttgtaatgagatctttggagtagttagcaggttttctacttctgttaggtggctccctgagcaggcacaggttccaagctgatactgtcactaactaatgcacttgcagtaggacataagtgaaaatgttacagacatttggctattaaatgcctcagactatgtttggacaaattaaatacagagattgctcccccacccccaaccactatgtatcactttgaggactgagacggttctaaagctgtagggggtttgaacatcataaaacatttaaacatacgaccctttgtacttttttctccccataaatatacccatcttggaaggtagggtcctcatctgtgattcatgactgccttaaacttttaaaatgcttatttacattttgacaggttgcaaattgtgagtcctagctttttaaggataaacagccccctacacatacctacaaccaactcccccccgtaacaaaagttgatttcctaacttcttaactacttccaaccagcaatgtgacttagctatccacaatcagatgcacatccccattgttcaaggaaagatatctttctataaacttagtttccctccaaattttcttgtgtatttcttttctttaggaggaaaatcagaaaaattaagatattccaatagctccaataatcattctcctgagtttatgtattgaaatgttgcagcttctctcccaggtatctgggacttaaagtttctttggaaaaaaaaaactaataaaatgaattggtaaaagtgtattttggtttatcagtgtatatttgaaacaacctaggttctcacacagaagcagtactcagattagctgacctcagcattcacctgtaggatggaaagtatcaaggggttatttgcccacttcttttaatcagtgggtattgatgcaacataatgacaacatcgctaggcttataaatttgtattaattattctaaaacctaccaatgcttttttatctatagcccacagattcagtgggtggtattatgtaacattttgtttctttcatctgtctagagcctattaaatatctaaatattttttatgtatcccaattccttatttgactctcctactatctttttttggatgagtaacacttctggtggtagttaagttcatggagaattaagtatgcagcagctatctgcctatcttagaccaatttactaagagccccaagaaagtaatcccttgtcacttcccaaattcaagttcctttcaggatttgctgatgtgaataggcaagaccacatgggtgagaaagtatgtgtttcctggtctgcactaattttgactgaacttagcggttcaaaggctcattcaaaggtataaattcatgtcagctgttttatataggactcacattcttctcattaattaaattttttgttaaggttcaacttctttccaaattcttctctggacctttcttcaagtggcagttcatgcatagtattacttttggttagtgtctcttttagttataaattatatctctattacaatgtgcttagcctgggaatacaacagggaaacttggagtggtttatatgcagtgaatactttagtggaaatggaaggcaaattgatttgactctcattgcgctctttgactcatattattcataaagtcaacacaatgcaaaaacgttccacatttctacttgctccctttgccatttttttgtttctttcttttttactctataaattttcaaagtctgttaaacctccctctcaattactgagtgcacaactctgtttctagtattcaatgtctttcccatcttctagtcactacctataaggatttcttctctgaattaccactagttaatgctgtccactcaaataggtaaagtaacagaaaaacaactacatatagttcggttactttggtagattaacaatatcattgaggacatgggttcctttttttctatttctttgctctgtaatgtgatctttagtgtattctttccaggataattcctctacggtcataaggtatctattgaagttccagggatcctgtgtggaaacatgatattcagttgaaaaacagtactgtttgttaagtgtacaagagctcccaaatcagacattctctcatatcttcttggtcagaactggagtacatgcccacctaaataagacaaccacatggaattagacaatttttaccattaacaaatgaaaaacagagagacatgagcatgaagttggggccaggctaatgttaagaaagaaaaatcagttatggtctaacaacatccattaccaccactgtcccatggcagtcctttgttatctgctacgccttatcttttctttgttcttcccaggcagtgaagggtctcttttcacttagatgagcctgctcaaaatgtgaacaaatattatttgttccaaatctcgttccctcttctaagaaatctcctccatttccttttagccaaggttgtttgaacttctgaggaatatttttcttatctcttttcaagaaaaatgatagggtttttgttttgttttttgggttttttaatttttggcaacattttataaaatactgataagaggctggggtgggagcatcctggataacacactcatatccctgtttttatttgtaaagacatagtttaggaaactgatagcaggttttattctgttatattctccagcacttttggaagctatatgaacatttccaaaccacttgggtaatattcagtaagttattgtttcacttataaagtgagtctcaagtgaccttgaaagctttcttactttctgccagagaatagcttacatatttgaagtgtttgtgcaaatagcataaaagaataattttatattttcaagtagtttaaaattatttctagttgtttttttttttatggagttctatgaaaacaagcagatatgagccagtagtcctgtatttgaaaggactgtacatggacaacattcttgtatcactcaggttgtgatcagggcatcaagggtaaataacatgaactcttggagttatgtaagaaatattaaatattgcaatgagaagatatggttattctagtttacaaagaacccagaacattccaaacaacaaacaaaatgctaagcagtgatttattcaaaattctgagttaaataatggatcaggcacaaaatgttattttcaaaaactggaagaatcttggtttgcaaacaccacaaagaacaaaaattaaaaacaataaaaatacttgacattgttctgcttatacattaccactctgtaatatataacataaatttgagattttactgtaggctatataatcgcattcaaccaaaaaaaaaaaaaaaaaaggaaaaaccaacattcagcttttgtgttgttatgattcattctgcttgactgctgagccttgcaggatattgaaccaaaattgatatttttcccttgagccccagactcttagtggtttgacttgcaagaatttggcctgactttaggattaaggggatgttttctgatgtaagttggtttcttctccagatgataatggtggtcgtggtgttggtggtggtggttgttttgtcatagaaaaggaaaaggcaaatgttgaaggtatttggtcttcttttgactttagtgatataattgtctttgtaagaatggaggtaaaaattgtgcagaggtaaacccattaactacagataaaatgtaccccagtggaatgttaaaataatgcagtgccttttggtaaaaacaaaactatttttgccattgcgattgatcttcataatgattgaatatagccatggtaatgttgtccacaaccaaactaggaaatctttatacttcctaaatctggcttagtgaggaataaaatgagattaaaaagaaacatacaaagaaaatattcctgccttctgaaagttttcaagctagttttccaaatgtagcattgggaatctaatttcaacacatacctaaataattagtctcataaattcaatctgggacctgtctaaagtgtttggagctctacaatgatcaaaaagcctccaaattgataaggtttctgattcattttctgcaaaaacaaaaattttctgtttttttaattattgtattatttaatttgataaaagtttcaaatatatccatataaatttattaattgcataaaacaattataatttatacagtctacacactaagctttgcctgaatatcaatagaacaatcttcttataacaacggtatttagtaggctaatgatagttgcttttataaagtctagaattttgacttaatacaattaaattatatttaacattcatacatgagtccagcaagagtgttatatgctgatgggcagcttttctcctgcctatcaaggagttattcaagaatcaaggttcctttcattttatagctgtagaatctcatagggccttggaatactctgctcccaactagcagaaggagaaaaatactgaagatatattgacataactggatgcaagtcaatgaggaaaatttgtcatctggttaggcagttccttgcccatgacagcatcatactatggaagtggaagcatgcatttccaaggaacagttgttcatctctgcaaaatcttctcttctggctaccaaatatttaaatatcttttccctcatacataggatatgctacatttaggtcaaaatacaggatctccagctgacttgcagtcctctccatcatatcattttatagttccttttgtacagcaacctaagaaccaaaaggctcaaagatatctgaatccactgtcctgtgtatctaaactatcaaaagactctcatttagaaagtggaagactgggaaactcacagtggccattggtccagagccaggcaatgaaggtgaagacctactgctctggcgatcgagaagtcacttgttagccttatttttttctctgtgagattccccgttgtctttgttctccttaagctgtgcttccaataggaggctctttctagtctgttgtgctccacactacacctgaagttggcaatggggaatatcctgcccctggggctctgtgtatttcataaactgtttattgccttttccggttttaagatatgaagagacaaagattctgtaagctacactcctggttttgtttgcaaattagtagaattttgatttgtttcccattacttctacataccaataaccatatttaaagttatattctagaaataatgatcaagctcaatttgtttctttgcacttcactcccttggctttctctttctacttatttataggtggctgctttgaggtcatctaaaacaatgtttcagagtaaaacaaatacctttgtctgaaggctaactctatttaattgagaagtcctaattgaacttttcttgcttaaaccattttcaatattttctcttactgttcaggtattagaagtattagaaagtagaagtttctaatattagaagttctaatattggaactattagaaaagtctgaacctgggagtccccagttttggacttgttcttttcactttcattttttgctttaaccagccaattcttcccttcactcatttcttttgtaatatcttgcccaagcaatcacatagtaactaatacaactattaatattgtgcttttaaacttatttctttaaatctgcaggttcaatacacatttctttttccttccaagatattgcaaatgatattatttaaccaaagattttttaaccaaatattttaatgttgatgaatatttccattttccatttatagttacccaattgcttgccaccttactattaatggaatgttagatggtttagttttttattaaagcggtattgtacttgtggtagcaactacagcattagttaaggtaacactagcttccagaaattctagtggattgaaatatttatttttttctacctaaaattagagcccaatgcacatattcctcattatcaggcagcttttctccaggtagtcattgagagatggagcctccttccttcttgtgactcctatgtgtttgatttaagaattctctgattttgaccagaggtaaaaagatgcctgattaaaacaaataataataattcagctcagtggtgccatacatcagttctgctacatttcagtagttatatctagtcactgagtcatatattgagccaagagactagaaaatgtggtctctgtcttacaaatagccaaccaatacacattttggaaaaagcagaaggaggacattagtttctgattgacagatgtctgtctctgtaactgaaaccactatgtaattttattttatttttttgtaataacattaaatgaagaacaggttaacatctcaaaggcctctattttaaaagatatctcaaattgggtggagtcatctttttcaaaatcctctttatagtcaaaattcagttttattattttacttagagtgagtcatttttattagattcattttttttttctcttgagatacttaggaatccaaatcatctattaaaagtttgttttgaaaacataatcagagaaacaagttgtattaatctgttctcacactactataaagaactatctgagtctgggtaatttatgaagaaaagaggtttaattgactcacagttctgcaggcttaacaggaagcttggcctcaggaaacttacaatcatggcagtaggcacaggggaaggtcatcatgtgaccttcttcacatggtggtgagagagagaccaaggggagaaaatgccacacacttttaaaccattagatctcatgagaacttactcactatcatgagaacagaaaaggggaaatcttccctcatgatccagtcacctctcaccagaaccctcctgtgcaatgtggggattacaatgggacatgagatttgggtggggacacagtcaaaccacctcattgcaccactgcccctcccaaatctcatgtcattctcacatttcaaaaccaataatgcttcccaccagtctcccaaagtcttaactcattccagcattgactcaaaagtccaagtccaaagtcttatctgagacaaggaaagtcccttctgcttataagcctataaaataaaaacaaattcgttatatccaagatacaatggaggtacaggcattgggtaaatgccaccactccaaaagagagaaattggccaaaaacaatggggttacaggccccatacgagttagaaaccccacagggcagtcacttaatcctaaaattctgaaatgatttcctttgactccatgtcttgcatctagggcatgctgatacaaggggtgggctcctacagccttgggcagctctgcccttgtggctcttcatggtacagccccacagttgctttcatgggttgttgttgaatgcctatgccttttccaggtgcatggtgcaagctgttggtagatcttccattctggcgtctggaggatggtggtaatcttctcatagctccactagggagtgccccagtggggactctgtgtgggagctccaaccccacattctcccactgccctgacctagtagaggttctccatgagggctccagtcctgcagcagacttctgcctggacatccaaacgttttcatacatccactgaaatctaagtggaggatcccaaactcttgccttctgtgaatgcaggttcaacacaacctggaagccactgaagcttggggcttgtaccctctgatgcaatgatgtgaactttacctttgccccttttagccacagctggagctggagcagctgctatgcaggtcatcaagtcccaaggctgcatagagcagcagggctctgggtggaaccacttttctctcataggcctcaaggcctgtggtgggttttcttcattgtcttggttattaatattcagctcctctttacttatgcaaagttttgtagctgccttgcatttctccccagaaaatggatttttcttttctatcacatgcccaggctgtaaatttttcaaacttctatgttctgtttcccttttaaatataagttccattttcagatcatctcattgttcacacatacaaactcacacttttagaaacagccaggtcacatcttgaatgctttgctgcttagaaatttcttccaccagatatcctaaatcatctccctcaagtttaaagttccacaaatctccagggcagggccaaaatgctgccagtctctttgctaaagaatagcaagagtgatctttactctagttcccagtaagttcctaatctcaatctaaaaccacctctgcctggggttcattgtccattttgttataagcatttttctttcaaaaccattcaataagtctctaggaagttccagtctttcccacatcttcctgtattcctctgagccctctaaactgtttcaacctctgactgttacccagtttcaaagttgctttcacattttcatatatctttgtagcagtgcccctgtaccaatatcctaatgttagtccactctcacactgctatgaggaactacctaagcctggataattgataaagcaaagaggtttaattgactcatagttcctccgacttaacagaagtcatgtctgagaggcctcaggaaacttacaatcatagtagaaggtgaagagaaagcaagaaccttcttcacatggtggcaagagagaaaaacggggaaagtgtcatcagatctcatgaaaacttactttcatgagaataacaaaggagaaatctgcccacatgatccaatcaccttccaccaggcccctcccctgacatgtagggattgcaattccatgtgagatttgggtggagacacagagccaaaccatatcacaagtaaattatatgctgtccaaagagtggaataataggcaactctaccttggggcaatttctgcaaataatttttagaacataagccctctcttctctggatggactagaaacaccatgaggaagttcattttcaaatgattattcttttgtttatgcttcataagatcttactaccacctcattccgtagaatatcttgttttccagatttggagtcttggactttaaatacacattagcttatcatttatctttttttttcttttggagcatactctgaataaatgtagtgcttgcataatataaatctgagagtggaggacagagaagagaaagaaaagtattctatctctagatagaatgctatctaaaataaaaagaaggagaagtcagttgaaatagtgtaaacatagtataatatagtatattttagaatactttggacactaacatgaatctcatctttaactggcttaagaggtaagtaaatttgtctcacatagcaggaagaacagagaagagcaaacttaattgcagtcaagattgattgagttggtgcttcagtgacatcatcagagagccacattttttttctgtttttctgttctatcctcagctacatcctaattatcttacccaaccttatgacccttttaattcatggtcataagattcctacccacaccaagtgaagacaattgtttccttattgacatgcaggaggaacaagtgagaaacttagccccacaatatagactattaatctatatcacttaagtctgaaagagctaaataagtttgctttgtcatccctagagcactgatagttgctgagggaatgccatgtgtagcatgggttggattaatcagagttcatcccacaatctggaggtgggttccatttctcctgagtcatgtatgcttttgttgtggagggaaataatggctatctgaacatagtcaagtttatgttaggaaaaatagttggaaaaagcaaaactgagatggtttatgtgaggatggaagagaaatgtatggaattaatgtcatgaaaatgtttgctgtgggatgtgcactgcttgagaacaaaattacattcttcctaatggatattttgaggttttttatcaaagccctgcaaatgctagataagaatggtaatggcagtgatgatgatgatgacaaagatggcagtgacaactacatcagtatcagtgaaggtgatgcttacctcaacaaagcagtaattgaagctatggatataaagtgtgtgggtttttttttttttaattttaaagcatactacatttaaagagaaatctgtaatttattccagagggaataatactttaggaatcattagtcacatcccaataaataagacataggcttggataattggaaataagggaaattttagttagaaaatagaactactggatgaaagttctgccttctttagatcctcttactttttggatctgtgtatatttctgttattcaaaggtaactactcacagaggataaggagcataatagataaattccaggttgcttagtagagaaaatctattttaagtcattcctggttttataatgtctatttttccacagacttatatatatatcagattctatttatcagccaattgaatattgcatgatttaaagaaagattttgtgtattttactacaattaattacattaagataaaaatagtgaataagctgttgatagtgaatatcaacagctcataaaacttgttcggtaatctatgggattgaaggctaaagtatgattgtgattaaaagcaaattctcttttttcccaaatgaaataagaatattcattttagtcagtaagattatgagtaaatataaaggatcacggttccttgcctcagatacctgtaattaatagcatttttcataacgtaactgagctgcagcattttctggaaagtggtcttattaaaggtttaaaatgggaagaacattgcattatgtctttgtcataaggattattctgacggttcatgttgtagaagtacacacaggccagctgagaccatgttataatgcaatactacatggagcatcctggcctgcctcctgccctggatgaactgatggtgaatacttcccatgaagtgcatgggaagctcatctgtgctttgtgaactatttcatgataaaagttatttcattgagcatcttctcatatgtgatatcaagtaacctagaacagcttttcacgctaccatcatttatctaaacacgaagtgttttgtgtttggagtagtagagtcaatgaaatagttttgcattacctatcttttttcttttcactttgtgctgcatcagaatgtgaatttatagttctgatggggtccattttctttaagagacagccagagagaaaggaggagaataatctgaagagcaatgttactgactgtttactttagaccaatcattatccagagaatttcttccacattgatccacgcaatcttcacagtgtttcttgtgaggtatggagtagtatcattcccttttaaagatgaggcttggagaggtgcaattacctacccatggtaaaaaagctagtaaatgtttcagtcaggattcagactcaagccatgtcactccacagcctacactcttacgctgctacaccacagccacgatgagtcggcttgaagctgggaggttttctgatgagatgtttggaagttttgcagtattccagcattcatccagaagactgtgtatcagcctgtggtaaatggcacttgacaatatgcaaagtgagaattttataacttaacatgagacagctctaagtttgtatcagctccatgaagatgaatagaaatgacacatagaatttggtgctgaaaaatttaaaggaactaaatatatgacattttgggacagggaaaactacagagaaagtaaaaacttagcagttaccagggactggggtggggaagagggaagggatgaataggtggagtactgagaatttttagggcactgaaactattctctgtgatactgcaatgatgtgtacatgtcctatgcatttatcaaaacccacagaactatacaacacaaagagtgaagcaatgtaatctatggactttagttaacaataatgcatcaacattggttcagtaattgtaacaagtgttaacacaccaaggcaagattttaatgataggagaaactgccagtgaggaagacaggaggtatatgggaattccctatatcatctactcaatttcccataaacataaaactgccataaaaaataaagcctactagttttatttatttattttttaaggaagggaaaaaagaaactgagggagcacacgactataattgtggatcaatcaggaaacagatgactaatttcagaataaaactatcttttctgctttatagtgacatccagaaattccacattctcactcagttacaatccaatttcacaaatacatttattctgctctctgtgtaatcactgagctatgaattctaggtgagcctgtttctttcttgcctcagccactccctaaatagaaaatgcaacacctttagaaagtaatcttaactctttaaggccacagggatataattcaagggtgtttgagtggtttccctgaatgcataccttaaaaggatagaagaaagaagtctccccatgcatttcttaccattgttgtaatgaagggtttctattttcccatgcctagtcagcccttgttaataaactggcatttgagaggcatactgactctcaatttttaatacaaaacagcttctaatggctaagtaaaaggaagtgggtaaatattgccatttctttcggagtgaaaagtggatttatttgcctgcactttttctcactactgaagtcacagtgtaagaaggaaatagttttagaaagtaccagtatccccataaccatgctttctccacagagctaaagttccgtgtgagaccttgctagcaacaagaccagaatgagagaaatcaaacaacgaggggattattagagaaagtagagccatgagagccacgttttagccaaaagtaaggactagctgactctctcgcacaatacaaaatgcttcttcagttttcatttctaggactggtggcttggttgccccaaaaaggacaggtgtctattaaaaagtgacttatgtgagtttgttatcatatctatcatttcctgtcacttcaggatcattgggttaacttagtcctcatgcctttttataagaacataggagattttcaaaagcacaattatggaagagaagatttaaccccacaccatgagattacattgctgtatacaatgtggcagctatgagaggatgtgggcatatttacaaactgtatattggtactttataattaagaatttgcataattggtaacaaaatcctcatgaataagctatcaataacatcatgagcaaaagtagcagattttaattctattctttttttttttttttttttttggttaaggtgtgggaggtgcactggagagagccatatcttttgctttgtatacccgttctcatatcttgtctccatttccatgtttaaatcttactgacattgggctggttgcttccagttgtccattttgatacattaagtgatgaagtctcaaacttttgttttaacaaaggacagattttcttccctactacacgggaactttaattctgtcgctattgccctcataatttctgtatctcatgtcactgtatcgtgcagtgcaggatccatgacagacagtgtaattctcctcacttcaattacctgtacctgtcatggaaaacattctgatataagtcattggtggaattttgggacacctctagtaattttacattagggggataacacaaaattccaaaacttgttgctaattggaagaagttttttcttattccttacatacgtcccatctcttctttatttatttatttatttatttatttatttatttatttatttatttatttttgagacagagtcttgctttgtcacccaggctggaatgcaatggtatgatctcggctcactgcaaccttcacctcccaggttccagtgattgtcctacctcagcctcccaagtagctgggactataggggcccaccactatacccagctaatttttgtattttttgtagagacagggtttcaccatgtcggttgggctggtctcaaactcctgacctcaggtgattcacccacattggcctcccaaaatgctgggattataggcctgagccaccgcgcctggccagtcccatctcttctaaccaactttgctcttaggaataaatgtttatgacaaaaaaaacacccttgagtaccacatttgtccttattgcttgcatttactccatctgctgtgttattttgtaagctctttgcttgtattattgatctaatcttcacaaaagcctatgagataggtatttattgtacccattttacagaacaggagactgaagtggggaagagtaaagtacttgctacatgtcacacatttcaccaagtaaatgaggtcagggtttgaacccagaaaacctctctctagggttcctgattagaattgtagatttctggacaggagcaatttaattaaaataaaaatatacaaatgtaagttgctattttggagcaaaacatccttgaaattattattactgttgttgtaattatttttctttcatggtcttttcttttttgacagactgaattgcaaaattttctctctaagtttgtggttcaggattttaaatttcggtagtgattgagtgtgattatttaatagtttactgtcttgcacagtgcaagtagtgactgagtgtgattatttaatagtttactgtcttgcacagtgcacttcactgctctaagtaacagactcattttctcccaaaacctagttataatagacaccactgcttcactttcaggcagatggagaacagtcctgtttaatgcacgtcatttacaatagatacaggctgtcagaaaacttctggtaaaataggatgctgaatcagacatttatttttaatggcaattgctgaaacatagactagcccacccagatgaaaatatgccatatcacttgactttatggataaaatgtgctgaagtagtctttgtcattttccatttgagatttctgttttagttttcttaatataccctgattcccatcgcttctgttttagcaacttgtttgttgtctgaaaactattatactatactttccattttaatagatacatcttcatttttatttctattatttgtcaagaatcatctagcacagagtagttgtatcaaagttataggcatgtactccaaagccagcagacctagatttgaatcccagcatagccacttattgactatattgtaaatatatattaatcactgaaaaccaagttttctcacttcataatagttctatcaatggtcactgtaaaaagtcaaatgaattaaagcttctgaaatgattatgattttaagtactattaattttacttctcgaatatgagacatcaaataaactatgatgaaaatccctgacataaatagatttttaaaaagtaaagatgaattaacacctagatgattatattgtatatattataatcacctgtaaatcacttttatgatatatatatcacctatatgattatacattggtcatatatagatagtacctgttaggttagttgatgactatcttatattgattaataagtactttaataccacgcctggaaagaagaaatgaagaacttttgttattatttattatgtgcaattaatgaatatcttctcaattcctctttgggttaatctatatagacacgattattggaaaatataatgggaactatatttgtataaaattaaaaatgttaattgccacttcagccacatatatactaaaactggaatgatacaaagaagattcttctgtctcctgcataaagatgatatttgtgaggcatcccatacattaaatatttttattaaaattgcattttatgtgtgtttgagcgtgaaatgataaaacaagtgtagtaaagagtggtaaaatgatatcaaatgaggattttgattgagaggtttatgggagctttttgtattatataacttatatttaagactgtaataaaagtttaaaagttaatcaactgttagaaaataaaaaaataaaaaataagtaacaaccagtttcctaagtaaacgtgtttcaactagatttcagtgtgtacctacagaattagtgtttctgaagtatagaggttccatgttctatgaatatattatgttataattgaatttgctaatactctgcactgttagaaaaaatgtatttcagaaaaacaaaacatttttctaaaattgttttccagttattaaatcaaaagagtttaattgagacatcttatacaaattattaaaagaatgctatttatcctttactctgttgcaaccagtaaatattttcatagatgaagacaactgcacatacaaattatgacaatgctctgtgaatataaacaatatgttatcgtcaagaatgatagagtggggagggggaagtggggatggttaatgggtataaaaatatagtttaatagaatgcataggatctagtatttgatagcacaccagggtgattacagtcaacaatgacttattgtatattttaaaataactaagagtataaatggaatgtttgtaacataaagaaatgataaatgcttgaagtgatggataccccatttactctgatatgattgttatgcattatatgcctatatcaaaatatctcaagtaccccattaaatatatacacctattatgctcctgtaaatattaaaatgtaaaaaaaaaaaaaaaaagaatgagagagaagatgttagtcagaaaaagcctcactgagaagaggacatttaagatgttatctaaaggaaaagacaataaaacgatgggaaggaaagtgagaacgtagagagcagaagcatggagagggagcaagtctgtcaccttaaggaaagagagggcatatctgagaagctggaagaacattggtatggttgggttaaacagaggagtttttcaggtagatttacagtttcgaaagatagaaaggggtgttatggtaaaacatagcgtatgtggggtaaggaagcaaaagtaggaatggaaatggggagattagtggggagcctctttcaatagtgtaggatgggtagaggttgcttgcactagggtattacctgtgtaaatggaagggacatcattataaggagcttgtgaacataaaaggtatagaagagatttactttattggaaatagctatggcttaagacttgaactggaaacattctaatagctacaatagcgcatttcacatttaagaaaatattgcaaccttgttatagctagcattgagttaaccaggatttccaactaaaataattgtatatttttcattgagtatgaatttaatcatacatattcatacactaaaaattacacagaacttttaattgcttgttttcctctttgctattgttattccaatttccttaatggttcaattatactttaactgattagtaacacaatttcatattatatggttgagaatgatgataaggatgaggatgatgatgcattccctaaatgagcagaataataagtgaataattcacttgtaaattattgatatcatgagcttttaagagacaaatataaatctaataaatgatgtaaaattattagctaatttagcttgcaatcctgatatgccatggggattggtaaccttattgtatttgtaatacatatggttatttaatgattgctattaatatttcacctctaaagagtttacagatatatccaataaataaataaacaaaaataagacagttggtaaactagaagtgcaacctagtatattgggaagggcctggactgtgtcaaaaaatttggctttcagttctgtggttgagtaactttggttaattcttggctgatgatttctgaagtttctttcaactccccgattttgtgattatttttgaaacatactggcaactagagctctctggctacttttaatctaggtgtttatgttcatttcacagtctctctgcctaatgacatttgttttaaacgagagctatctatcaatgaagatatttcattgcctattactgtttttaggctttattgagaagctggattcttaagatggaaaagtcaaaggcagtttggcaagctagagagaggaataagatgattaaaaacctggccattaagacagttggtgaaacataaattaaaaaataagggttagtaactttagtagttaggtaggaaaacatagaagaaattttcaatcagcagaggaattctggaccagctgctactatatttctgattgccttaccccttcttagaatgactctgtatcttctaaattttagagtttattttctgtccaatggaactatgggggatttaaaactgcttccccacatttggatttcagcaggatctgtttgttactatcacagatagaaatatcaccccaaaacagacatcatcataaagactacagagaaaaagaatggaatttgtgttagagtactttgggttgaatctaatttgataccctgctagttgttttatgaaactgtaagaaaaatcacttctctaacattcaaaagcagcatttgtaaaatgtaagcaattttatctattcatttattctccttatgaagtcatgagaattatagacagtaacatatgaaattgctttgttatttaaggaatgttatgcatatgtttgctagttttttattcatcagtttaggctatttagtgtgaccattgatggacattgatgaaaattggggaattcctttaccaatgttagtcaactttttattaccgtagagtcaaataatgattaagttgtatccctatacctgacactaattaagaaaaaaaaattccacagaacgcttagttcttacggctcttcaatagattatttattatgggatcattaatttctttgaaagattttgacttgcttctctctaactttcatttccacctctgcttctttgtagagcaataattatcttacccatatttaaattctctgtcatccaatttatgtaacaaccagaattgaattcaatattttattaatacaatgtaagttaatgcttttcaaagtcttattttgtttattaggtctaatgtaatttacccacagaaatagtaatataatgtcaaattttgaaggtcttaaagaatatatccaaatatttaacattaaataggtccgaggtatagtttacccatgcaggatataaattttggattgatacctgtattagttcattttcatgctgcagataaaaatatacctgagactgggtgatttataaagaaaaagaggcttagtggactcacagttcacatggctggggaggcctcacaactatggcagaaggcacatcttacatggcagcagacgagagaatgcgagccaaataaaaggggaaaccctttataaaatcagatctcatgagatatattcactaccataagaacagtatgggagaaccacccccatgattcagtatctcccaccaagtccctcccacaacacatgggaattatgggagctacaattcaagatgagatttgggtgaggacacagccaaaccctatcagtaccagaccaagattgtaatcctgactttttccgggcatcttccttatgcaatccagtgtaaattcccaaattatcatatgtctaaatgatcatcagtcagtagaatcatcttgtactgtaaaatgacgttattgccattaactcaaattatatcttatagtgtaaaccctttatttagttcttggaaatatatgcaattgtttgacagaaaaaaagtttataaatatataccccaagcatatttgttgtgaatgagctgtttcctttgttttaaattaggtagtttccaaaagaagagcttgagaaaactacttgtgtttaggtagtctatttgtgtggtaataccagaaagcaggaatgagggatgaagaggagcaaaggaagaaggaaaagtagtattactgaggcaactgtactaaacttaggcttgattctccctggaactttctgagcataaaggatgcttgtcacagtgatgtatctgtggattgacgatgacaaacctctttcctccattggttgagaagtgccttgatagattaatgtcttggcttcttctgcatgtctgatgaacaagatttagtttgctcaaagtgagatactataagcatctggaaaatcaaaacccatatttaactgtccaccacagattctacatgaattaagtgccaagaggatgcatggagggatattatatacattgttaatatattttgtgaacttcactgataaactatctatgaaagcactgtttacaaaacatctagatgccaatattattgtttttattcctatattttcaatttccaatttggaaagccagaatataattaaactgaagtctctttagttattttgtgtttatatcaaacactgggaaaacttggagattttatcctatttgcaagctaacttccttgcctgccagagtttcctagatcttggaagaagatatgatacacttgggtcaaagatagagtactttatgactcatagtaccgcaggcagtatgagatgcaggctcacattggttcccttgttttcagacatcattgaaaagataaacagcagcaccaggttgtttgcattctggaggaagactccagggactgttctaaaagacaaaagatcgtgaatactcctttcgtccccataccttccagggtaatgttacccctccttcaaattctggatttttgctttcgttccacctccacaaaatctggggtagctataactttattcctgctctgcaatgacacatccagaccttttgtctgaaagagtcagatataagagagacaaaagcatatttataaaatatttcataaacattttaagttgtaatcctctcatcctcattctggaccagtggcaacctggggattagactggcctgaggttactgttataagggagagacataatatgcctaggaacagaaaggaatcttgaaatttcaaagtaagtctatataattccatataatcttcacacccctttcatctgagatttcatcctatttttaagccaagttgtcagggttttgtagtctgttaggacagagacaaatggcttctttcatcgaagcatacagctcccagcaagaacttatcatatatgcaaatcacttccccctgctctcatatcccaagggacaacgtaggggtagacacaggtgggtgctgtgcatatagtgagcttgtgtcatagctgagcatcctgagtttaagaatcacccatctcctaatgccacagttagcaacaagcacaactttgccctaaagggaagcattatctttattattctggttggacaataaatctgccttctgctctgaagggagaaattatctctatcttcccaagctatttgctatacaacaatccttgaaaagatagtacaaaacgcaagttgccaatgcctttgctttacaaaggtgtggaagtgtgagacccaatagagaattgtctcacaatatttcatttattttggtgatagaattctagtcttttcgtcaaaaatgacttcattatttctgatattatctatcccttcctgtcagctcttttaaaataatgtagcctcagattaacctacaaataaagtattaattgtgcaagaaattgaagatggatatttgacaaatttactttttgctcatcgttttttgtttgtgtgtcatgtcttcccagaaagactgttcactgctgtagtaactaggaaaatgagccttctgtatactatgagcagtactgaaaggatcccatgtttgtttcatgaggtatatgtaaaaacggttaacagttaaattggaaaataaaagtaatggagaaaactttttaaaaaattttgcactaattttcttctattttagatgatggatagaagaaagaaaatctcctattttattgtacttaatccgtttatttggaaatatttaggatttctcaaaagttgcaaaattaatagaaagttcctcttgtaccactcattctgctttccctaatgataacattttacaaagccatagtaaattattaaaacgaggaaatttttattggctcaatactcttaattgtaaccactattcagattcacatgcacccttttttggtatatagccctttggaaccttattttatatatatatatatagattaattttgccatcaccaaaataaagatattgaacatgtccattaccacaaaaaaattctcatatttcccgttagagtcatactttcccaagactctaacttctggcaactgctgatctgttctttttcactgtatttttttactttaagagtatttaataagtatagttttatggttaaaaactttttgaaattggctttttttttccaagtcagcataaggcccgtgagatccattcacatttttgtgtacatcagtggtgtattcctttttattgctgagtagtatcccactgtggggctgtaccagatgatatttattccttcacctctagaagaaaatttcgatcatttttagttggggctgttacaaacctgctatgaaaatctgtctataggtttttgtgtgtgagcataaattttaatttttctaggataaatacctaggagtgtgattgttgtaactatggtaaattcatgtttaactttattttaaaatgaccaactttatgagtgaggctgtacagtttcaccagcaatatatgagagatctagttgttcagacatattctccagcacttgacattgtcagtaatttttactttagcaattcaaataggcacatagtagaatgttattatagttttaattttcatgtcccaatggctaacaatgttaaacctcatgtgcttatattgccatgtatttttaaaattctttatttcttctaaaaaaaaataagaaatgggatacatgtgcagaacatgcaggtttgttacacaggtatactgatggtggtttgctgcacctattgacctgccctctaagttctctcccctcacctcccacccctcaacaggccctggtgtgtgttgttaccctctctgtgtccatgtgttctcaatgttcagttcccacttataagtgagaacatgcagtgtttggttttctgttcctgtgttagtttgctgaggatgatggcttccaggttcatccatgtccctgcgaaggacatgatctcattcctttttattattgccatatatttttaactaaatttgttttgttctagcaaaatgctaaaatgttgaacaatacatcttttgccttcttgatttcctgtcattttcagaggctatgtttagttttgtcattttatgaagaacttgtactttttaagcatgttaatagccccaaaaagtgatgataacaaaaggcaacacttaatttttccaattgtctttcgattaattacctttgctttttaagaattaccctcggatctctcatgtgtctcatcaactacggccctgagctgggtgcagttgtgtgcacctgtagtcccagatactcaggaggctaaggcaggaagattgcttgagcccagggcttcacgtccagcctgggcaacatagtgagaccccatctctaaaaacaaacaaacaaaaaaacaaaaataaaaacttattaatgactttcctgatttaaattgctttagtatcaattaatgagcatatactgccctaattaaattattttccttccaattctttcctcctccaggctaatcaactgtaaaattatgttagacatttacaaaaagtaaatgaagaagatcactctgagtttactaacatgagattttgctaaggtgatatgtgagaaatatgttgttttataacgactaatctaaatgtgatacatatttaggcaccttctgtggaagagagataacttcatacattttgtcttttattcatttccttttctttccttcacttagtgaagactactaagcactgattttattataaagcactgtgaagaataccaatatgtagaatagttgtatacttctagaatcttatgacgaacatggagtgaaaactggctataagaagtaatttaaaataaacagcaaccactctggactataaaaactccagattgatgcttccagctgagttacagttcaccaatttaggtcttgattttgttgttgttgttattttataatctctaaatgaggagctggcactcaaaattatctgtattcaatgctacttgtaatgttctccgagactggaaatcagaggaatattcttacagtttgcagacagaaggattccgactgtgcaaagaggcctaaagggaaatgtatactgtagctgcttagtactacatctaagaaaaaagaaaagagatataacttacaccacgacattggattacctttgtatatacttaaaagaggctcagaataagtgatatcttagtgtctcaagatgggccacagagagaacaaaattgaaaagacaagtatcttggagtgaggtgagcatagactcaggagagacctggttggtgccagtagtgctgctttctatcacaagctttctctgcttcactgatttgtctataaaagaacaaatttcaccttttctatgcacttaaaaaatgagacataaggacactgaataattgctaaatggcataatttatatattttgctttttattatatgatttgagttcagctgctcttgacttcaaattacacagtgctgcactgaaattccataattatttaagagataaaaggattgccttgtttaatagcagcggggtaaagaaacatacatgataaaagaggcttaattcaactggttaaaaagagaaaaaaatatattaatgtgatttatgtgatttcagtcatttaatgattatattcaaactgcaatccttcctatattcagtgagaagatctgatttccagtatttcaaacacttgacagaactagccataaataaacacattaaaaaaccttttaatagataaactgattgattagttatgacaactggtgtatttgtagatacactaaacaagcaaaatacatgcacatattagagcaacattttttgtgcagacttcaataactattatggttgctgaactctgcctaaccaatcacaatcacaaattacaccaatgagggttttaaaggtaaaatagcttagtgatttttgttaactcattcttaagttcatggaaaaagttcctacataagcttttacctatattcttttctcagcgatgttaaacaaatgataactagactgtctattgaatagtaaacttttttacagcacaatttttgtgtaattaatgacgagaatatgcacaaagatttgtcagctccctgttgactaagatcctatccatgataggatattactatttgaatgaatcgaactgtaggaaaatctacatgtttatgtcatttaaattttttatattgtacgaaacaatataaaaatgatagatgggccattgtttcatttctgactctgcagatactatgcatgtgactttggttcttctttctgccatctgttttgttttctcaaccctgaagaagaaagcaagactgttcttctccaaagtgccttttagcttaaatattcatgttttctatatatactatgtaaatatcacaatttggaaaatacgtatattttatatatatgaagtaataatgaaactttattttatcatccagaaaaacctgttcatatgttattaatatctatcacatggatttatatggaagcatttataaagtcacataaacttttatattcctatgttttataaaacttgagagcaaataaaaattgatatcctgttacacatactttttatatccatattttttataaatttaaaagcaaatgataggtgacataaaacatcttcgtttttttaatagatacataatacaataacctatccaatgaagtttgataatataactatctttccatttgcagatatctctgaagggtagaagttgagatctagaacaagagtcctctgggctaaaggaatggtgttctgctgagtattctgaaatttttaccaccccaaaattataactaatgttggggtttttctagcaaacattaattcattgtgactctgctttaagattttgccattactttactttgtttccagactttgactttttaaacaggaaataaaaattaccctcaagattcaaattcctacattgcacatatgccattgggtttcctatgctcattcttgcttttatatatatctatgagagaactctctctcagcatgtaacatgccatttctacactcctatttcctgctcagagttgaagtttgtgaattgattttttttttttttctgagatagccctgtcgcccgggatggagtgcaatgatgtgatctcggctcacggcaacccccacctcccaggttcaagcagttctcctgcctcagcctcccaagtagctgggattacaggcacccaccaccatgcctgtctaagtttttgaattttttgtagagatgggttttcaccgtgttggccaggctggtcttgaactcctgacttcaggtgatccacctgtctcagcctccctgtgttgagattacaggcaagagctaatgcgcctggccagtgaattgatttgggagggaatgtattgacagaacagggaggactgacacttgagagggatcggcacactaagtgcttcaaaatccagctcctataccttgaagagcctacttcttggttttctgttggcatagaccctgggttactgagccaggaggcagttaggtagagagagagaatatgtgtttaccctttttctatggttagtgcttttgttttagttctggtgagatatgtaggttagtccattgtgtttctcactacagttttatcagctatggtaattttaatttcttcctggattctagaaagtagttgagtgtttgaatgtctgatggtgatggagttggagtccttttatgttcctgtaggaattatggaagaaaggagtcaaggaacattatcctgacatcatcttaaggtttgacatcaacttttaattactttacacaagttgattttgaaaaaatatcttcagctacacataaaatgaatattaatttaatattgttaaattatttgttagctttggaaatactagtaaatgtaatttttaaaattgtatcacataatgttaacttagtaaaattagaagacttcagtaaaattctgtcagcaaggtggcatacaattttaatacataaggggtaactcagtaataaatttgtctttgcagctgcaaatccaatttttccttagggtttcagaaaatgtgagttattgatgtataaaaaatcaaaagtatagaaggatatgtgttttggttgataggtgcagcaaaccaccatggcacatatatacctatgtaacaaacctgcacgttctgtacatgtatcccagaacttaaaataaaaaaaaataataataaaaagaaaaaaataaaataaaaatggaaattagaagtgtacccccttgttcagccatttccagaaaaatagtatatttcatgtacttaccaataaagctattttgatgatcacataagaaaatgtaagtatgcaaaaccatatataaatataaagcattattgtgtgaattatttaaaaagggtaaacttccagtaaaaattaaaactttctgaacattaaatttatttttattactaatgtatatattttccaaagaaggttattaagtaagatatttgtttctcagagacttagggggaaaaattttgtctttaattagaggccaaaaattatgtttccactctaacaagtggtcagattatattatttcctgtatgtctaagaatctggcaatgaatttcattttcctatgaatttttatactctttagtaatactctgtaaactacttttgttttatttttactgctacaggcaaagtaatgtacagaacatttattataataggataggaatattatttaattctgggagccctagaaaatatttttcactggctatactgaactctttccctgattattgaaaggagaaaacacagaaaactggaaaccagttagaaggcaactaaaataacacaagaaagattttatgcaatactgacctaaagcagtagctgtagggacaaagtgaaatgactttttagagacatgtagaagtagtaacagataagaattagtgaaaattcagaattagaggatgattctggcttggattatcagataataatggagtgttgaactttattgttgagcatccaaatgcataaatgaaaaaaaaatctagaaaacattctgataaaataagcttttaaaggtatataataagcagtacagccattattctccctaaagagtattctcaaatgtctttaatttctgattgcttgaagagaaaactaaggagaaattagcccatagagagatgaaaaatttgaagctgtgacatcgtgatttcttctctaagggaaaatataataaactgcattttaattttttaggatagtctcaataattacagggagaaattgtgaaaactattggatgaataaaataagaataagggatttaatcaaaagtaatatttaaaagtgtgttccacttcagtcttacataaacatttaccaatttcaaaagatgatttctggttcaaaattcaagatgtgagatgtttattgttgacttgcatgagaaattctagggtgtgtcagtaacagagttagaaacacattcaacttcattctttaaactatagtcttttcagtcgtattagcttgtaatctattgaactgaacaagtgaacaaaagagaaaataaataataccatcagtttatatgcccagggcatctcatatctaacatagcagacctctctcctcatttccattctagcttgtctctgcaacataattgtatttatttctacctttactgttttgctattctcagagaggaagactgatgggaccaacaaataacaatagttaatcattaaaatgagtggcagatctcctcctttccttgattatccaccctaaagaagtttctggttctttttacttccttattgtttcccatcctgtcttccctatatatttaaacaggaatccttatttcttctgtttaccaattagtctcaaatcctaggattaagacaatacaaacagcatcttgaagatatttcctagctcccacgtgttcaagattttactcatttaacaaaaatgtacagggtagtttactgcgctatgtgagaaatagatatgtaaagctatataaatatatatatatagctgatatataatatattatatataaatatatatagctaatatataatatattattatatataaatatatatagctaatatataatatattatatataaatatatagcttatatatattattatatataaatatatatagctaatatatatattatttattatatataaatatatagctaatatataatatattatatataaatatatatagctaatatataatatatataaatatatagcttatatatattattatatataaatatatatagctaatatataatatattattatataaatatatatagctaatatatataatatattatatataaatatatatagcttatatatattattataaatatatataaattatatatacaaattatatatataatatatatatgtgccttctaaaaatttacatcctggtaggaaacaaatatacaaagaaatcactgaaatgtttggtagtataagttaaatggaagaaatctacaaatttaaataagtgtggatcttttgccaccatttaaattgtagtcagtttcatgataatatttaaggtggttcttaaagaatggttaagatttcatatgatcatcttttgtagatcaaaaatcttaagatttgggtaaaaactagaaaagtactgtctaagagtaaactaagtgtaccttcgcttcctgagttttagattctacaaagaatatattaaattttaatatgacaaggacaatactaaaaataataataaaattttggaaagtgtaggtgttggtattagtatacaaaagacatgtaaaaatgtactttgcccatacacaacaaagaatttaaccgattcattcattaaagataatgtgataataaaatatttgagaaggaaactattggaatagtaatatctattggtattatataataatatatgctattattatgtgtaataccatatattattctttagcaaagaaattgataaaacctcagactggctcatctgcgaaatccctggtgtttatatttcctgtctgagccagggtgtatacattctcatggacagttattgggagtctagcaagatgtctttcattctgttcctgttttctatttactggcatgtttacattcctcacccagaatatttgtcatttgttagggaagaaggtggagttgttcatttggaataattttttcctgagtgtattttttttctatttccagatacattacttattagctgtcctcaaaacttcatagttagttcggtttagagaaaatgaaagaataagaattttggaaacctagttattgtcccgaaatgctgtgcaaagtgttttacaaacattctcactacaattctatgagttacctattattatttgtactctaaagacgaggaaacttgaatctcaaatagtttgcatggctagtaattggtgtgtctatttcattaatccaggcttctcctcctatactgtgctgcttcttaaaaaaaagagaagaaataatttacagaagtgagcaaacggcttcattatgacccagttagatcctttcttactgtgttatacattcagacagatcaacatttattcttatctttctccagtgcataattatgaactgaaaaagcaagatattaaatattattaaatattaaattactatttttcttatatttgtgtcagtattaaagtgacatcttgccatagttataaacttccacaaacagccaaaatgatttttctccatgtttagtttggcttaatgattgtttgagcaagaacactatctggattttgccctgatggcaaaagttagaaatggaaacaacttagttgtctacagaaatgctgagtctagacatcaagcttggttgtattaccaggaaaaaggataaaaaagatattgatctaatactagctcgagactgggatccccagcatatatgcaggattataatttgttgttattgagtgattgaatcacagaactgaaaaagagagaacaaaattgtgtgaactgggcaatgtatagctccaaaaaagtaaagaaaataaaataagcaattgtgtcttagccatcttcataatctatgaacaagacatttaaatagactactatattatagatgtagtatcagctgatgttttgatagtatgatataggtggtcaaaaatctgatattgatgaatataatgttgtattcctatgttcattaggaagtcctgctttcttgggtattagatatgcctgcatggctttttttggccaatgaagtatgagaagtagtaacctgtatcacttgtaggcagaggattctagagccagtgtatgatttactgcattcctttttcctatctaaatgatcatgaaagcatgcattgaaacagaacatccatctccataagatcctaaattactacaatgagatcttcgggtcctccacatagcattggctagaaataaaccattattttaaggcatggataatttgaagttctttgttactgcaacataaatctgcctattctgtctgatacgcatgttgtaaattccttgatagtgtgaattgtactttaccactatatctctactactaaaatagtacctaaatatcaaatctgtgaatgacttaatgactgatgacatataaatatttgttaccctctttgattataaaagttaaaatagcatggcaaacacacacacacacacacacacacacacacacacacacacacacaaaccagcatgacaatatgaaggccatctgcaaatgaagagaagttatttacataatgtgtggaccagaaataaatgtatttcactgttggaaggcaaaggataacactaattgagctaaggagcaggaagaagcgccttgagacttccattagtgaagtcacttaaggcttttggcaatcacaagactagcaacagggattttggacgtgaaataattcattactttttttcacatgaaaaatgctgcattaggaatttagttgtacttcatgtgattcaagctgtgtaactttctcgtagcaaagaaatatgaattggacttataaattgctgagtactttctccaatccaaaaatccagacaattctgacatgcatagatggacaaagttgattaatgaccaaatagagtgaagggaaacactttgagtattagaaatagaaatgggaaaaagaaacaaaatatagagaaagttttgtgatctgaggaaatacagcagaaacctgctcagatttctttttcctgctgaaatatagttattctctcaacaaatactaagggagcagatcagaataaacaatgtatctttgaacttactagtaaactttgatactggttaagagcactgacaagtgtgtctgtaatttgacaattcattgttttgtttgttctcatccacgtattggtgtcactgtctgtgtcccttaggaaaacagttcagtagatccttaagctcctgcctgatgcctgttcagtggacctgggtgacatggcccacttcataaccaccactgctcctccctcccaccctcacaacctcacacccattcagtcctcaagttcctggtgcccattctattctttgcaagcatcttccaactattcaaaaaacctctctaaatagatttgtgagagacactagtctaccaatttatttcagttggcctccagggatttatttgcagaaggaaaggagaaattctgtgttggagaatcttgtctatacatagcacagatactactttgtttgactgattgcttttaaatcccaactctttttttaagagggtcactttcctttgttctttcctggaggttgcaggcctgctgcgaacctgttctttcctgaagtatagaattctcatcatgttgtaactaattctgaattgtcttgggaagcaaagactgaagccgacgcagtgcctcaggcctccttcttccttggtagtttggggaacatcaagagtagtcccttgggcaggggtttgccattttcaaggaggacataagcagtctcaagtggatcaaggtagtgctataaaggagttgtagaatagaaatacaagagaaagctgtttatgctataagatgtcccttacactctaccgtcttctctcacttgaaataaaggtaaaccattgagaagattaagttctgctttatgcaggtgggtgcaaaggttattaggctagcaaaatgttaattacaactattcacgtaatattcttaatgtcaactggctaccagagtctagagaaatttagatctcataggtaatggtggtttctcaggccatagtggtcagaggaaggaaaactagtagtatgaataccatagcctaacaatagtaaaacaaaacaccaccaccaccaaaaaaacaaaacaaaacaaaacaaaaaaaaccctttttattctgagacctagcaacaaaaaatgctgtattccaagcaagttacatttctcttgaacattctttccacccctcaggaattcctcacttttttttttgagagatcgcaccactgcactccacctgggggacagagatctcggctcactgcaacctctgcttcccagggttaagtgatcttcctgcctcagcctcccgagtagctgggagtacaggcatgtgccaccaccatgcccagctaacttttttgtatttttagtagagactgggtttcactatgttggccaggctggtcttaaactcccaacctcaagtgatccgcctgcctcggcctcccacagtgttgggattacaggcgtgaaccaccatgcccggcctccttgtattatttctataagagtcactctacttttcttctctgctttggaacttatgtatagtcatttctattattgttccactgagaacatccatcacttgaatctaagataatggtatttcatgcacagggatacttttcctcttgttggcgttatagatacctctttatcgtcatgaataccagactttccaaagatgacagattccttcaactggtatgtggaatggattgcctcaggctacctttcagttcaatactgggagccaagtggattaccagcatgctgccactcccagccccagaacagaagaaacagtatatattctctccacgtggcttctcctaaggccagggctgctttccaccaacaaaacgtctttcctcctgtagattaattccccaggattctttggagattcatctgcacaaattgattattgcctatctacacagctactttggattttcaagttatttttgattattaaaggtgacaagtttaggaacctcaggcataaagatcagcatgtatctgaattagactgacctcattggacaccagattatatcctagtacatagacagatgttactctggagtatatctctgaaaccacaaggcccaattcacaactgttactagaattgagactattcctgaatggatattgccaagaaagcaactacagtcacgcatgcttaatgacagggatacattctaagaaactcattgttagatgagtttgtccttctgtgagcatcatagagtgtacttacactaacttagtggtgtagcctatttcatagctaggctatatgacataacttactgcttttaggatataaacttgcacagcatgttactgtattgaatgctgtagacagttataacacaacgagaagcatttgtgtatctaaacatagaaaaggtaaaagaaaaggaaaaatacggtattataaacttatgggaccactgttgtgtatgcagtttatcattggctaaaatgttattatgtggtatgtgaccgtacttcaaaatattatctccatttgctcatttgacattatttgacatagcaaggcaaatgccttttctaatagcaggctataaaaatgtgcctcaaatcaaaatctcaataaaatgtacttgcaactatggatagacacataattgattttttaaagtaaatggaaaacactgggctagaaatcccctaagtcagctgaaattagcaggagtgcctgacattaagttcctgagacttttttatttattaaaaaaaatgctctctgttaatacatattttacttttgcataattttaatacgtaaaactgtgaacatgaatataaacaaattatgtaacacagggtttcctacaactctattgttggactataaaggacaagaaaataacaatttttatccctctaaaatcagctcttgtatcagggtcctcataggaacctcacatggtttaagaatttgatagactgctttcaaaggggtgagagaatttagaggagccagtaaaggatgttgaggcactgaagagcctagaaaccacaggaagcccttgccactcctaagcctaaagggcaagaggagaaaatttctctaccagagcccagtgagacatggaacaacctaaaaagtgctataatcctgggggaatgcagcatgttccagaaaatatgacccagagcagaaaaggaggggagaagaaaaacctaagtctctttctttcagtcctctgatcactcttgatcttcactggctgaatttaaccagaagctagtaggaggatgctcaggtgtgtaatccacagggatcagcttcctggggcaaagaacagaacagaacaaaggatctttcttgtaacagtggtggtggtgggagtagaggctggaaaatagagagaaaccagcacagctcgtctttttacttgttactgttttcatcttcaagtggatcatagtaatcccagtcctcttaaagtaaaaaatagcaggaaaacggagaagaacagccatctatagttgatgggaaaagtatcttctatgcgttaatatcatattgctgccaagagagtggaggacaaaaatggcctgaaatcaagcacatgtacgtgtcatatgtatagacaaccatatatgtgtgtgtttatattctcttatctatagttatcacttaccctttaataaagcagggatattctacatgtgcctaatcactcccttgatacatttgtgaagtaagaaatagagaatctcatttatagcttgctaacttttaacatttttgtggagaactgaaaaattgccagttaatctttgtaaatagagcacacgacatggtaatataggtttgtattaaaaactgctttccactaattatttcaatataatgtgctttcactgtatttaagaaaacagatttccctccaaacatattagaaagaaaggtgaaataatgtgaatgtaaataaaatctttgaatactgccaaggaaggagagtgaacccggcatgggaggaaacatgaagactaataggtggtaagagtgaactaagaagatgaaataacatggcttatgcctgtaatcccagcactttgggagctgagatgagcagatcacttgaggtcaggagttcaagaccagcctggccaatatggcaaaatcctgtctctactaacaatacaaaaattagccgggcatggtggcatacacctgtaagcccagctactctggaggctgaggcaggagaatcgcttgaacttaggaggtgaaggttgcggtgagctgagattgcaccactacactccagcctgggcaacagagcaagactccatctcaaaaaaaaaaaaaaaaaaaagaaagaaagaaagaaaagaaaaacgtgaaataacactaaaaccttgtaaaagacatattttgaatatcatagaacctaagaaccaattccatctgggcgcagtggctcatgcctgtagtcccagcactttgggaggcagaggtgtgcggatcacccgaggtcaggagtatgagaccagcctgaccaacacgatgaaacccggtctctactaaaaatacaaaattagccaggcgtggtggtgcgtgcctataatcccagctacttgggaagccgaggcaggagaatcacttgaacccgggaggcagaggttgcagtgagctgagattgcaccattgtactccagcctgggcaacaagagcaaaactctgtctctaaaaaaaaaaaaaagtttaattaaaaaataaaacttagaaaaacagtattttatgacaggtatgctagcacaccaacactgttaaatttactccacagagctttatgtgtctttaaaagtagtttattacatagtatatgcaatgtaatctatacgaatgaaatataagaatatcatttctgtgataaacttttcagagaagtgtacagtgtacacttatatacagtataactcaagttctgtgatataattagcacacgtagaactaagctaaatttaaaagcgatatattttcagttattaaatattatttgcttataagtaattataattttaatagcaaaactttttagactaaactaatagtgattgacaggcattattaacattcattagtttatgcgaatctaatattgtccacattaaaatagagaaaaattctgaaagcaaaaaaagtttcttaaatttttaactgttaaagaaatcacttgtataagttagaaaagagcttgggttctctttcgagatagagccaatttgtctgtttgctcagcacttaatgattttggagatattagtcaacaaaaagagtactaatagcttttggaaacattagcctgagaaccattttccatttagtctgtagttagttaatcgagtgcatgttcatttatccatacaagctataaaatcctacaatgaagatgtaattataattgacattactgaccagttaaaaggcataaacagtagtatgcccatcaatatgcacttcctatttgctgacatttccagttatgccagatggtgactttaatgatggtgccttgcggtgcttctaataatttttgtgcctgatggtacttttatagggcctgttccatcatagaaagctgaagggtgacttaataatgatcttctagcgtatgaagggtcatgaagtgtatggttataaagtgaccagctgttactcattcatatgagaagtagtagatttttaactgtaactagagagatttaacttagatataacttagaacttcctgataataaaaggtattgaatgaaaggaacaatgagagatgctaaaatttttcttaaggatagaaagtgctcatctgcatgaaatgatcaagtttactcttattttgtggatatgtcagtttcatttcacatctaagagttatatttttcatatttcaacactaacttggttcaaattctggtgacaacttattggctatgtgatgtaggataagttagttacttaaatacattgcatcttgatttacttatctgtaaaattgaaatgaaatctttcatctaaatatctagagacaagtctaaaatactattaactctaaggtaaggttgaatttctttctttcttttctccttcataaaaatgagagtagacaggtcaaaaatttccttttagctggatctgaatatcttacttaggagtgtcagaataatgaagacctgtgtgatagcagagagcaatataaaaccctcaatttttagaggtttatatcctacccaaacactcactaggaatgcttttccctcatggcattaagtcagtgtaatctgttagaaagagaaggcaaaagacctggttctgtttagactcctgcaattactaactgtgtaaccccaaaccaagtcatttaacttctgagttttattttgatcccctggaaaaaaaaaaaaagattaggaaagctcttgacagataaattctgatgtcacctctgtcatggggaaatgagacaatgtgggaagactggggggagatagagctcaagaggttgagagttgaattttctgctctagtggtttatttgaccctgtgtatcaagtgagaaaaggcagttctgatgaatgagaaggcaatgggatggcaccaaacctcaggacacttgcttagaaactatttgtttgaaaaataggatgttccaggcgctgctcaagatactaggaatttatcagtatacaactccaataagatcctaggaatttagcagtatacaactccaataacatctctgtcttcatggggtattaagagaaaaagccaataaataattaaataaattaaccagattatttcagagaatgatgtactaggcaaagagaaatcaaactgggtaggggataataagattacacctacagggaggaggtaaatctatggtccagagaggcctctttaaagtcatgacacttaatgctatccctacataaacaggacgaactcagtcatgcaaagatatagagaaaaggcccacttaagggctagagataaagaatcagatgatctctgggtgcggtggctcacgcctgtaatcccaacactttgggaggccgagtggggtggatcacgaggtcaggagattgagaccatcctggctaacgcggtgaaaccccgtctttactaaaaatacaaaaaaattagccaggcgtggtagcacgcgcctgtaatcccagttactcgggaggctgaggcaggagaatcgtttgaacctggaaggcggaggttgcagtgagccgagatcgcgccattgaactccagcctgggcgacgacagaacaagactctgtctcaaaaaaaaaaaaaaaaaaaaaagtaatcagacaatttgttaatctgttgccagttcactcattcaaacttggggagcctcgaggtgcaacattgatgaatgtattgattagttctgttcttggctttatcagtcactaatctccctctgttcaacagtttatttataagtaaaatgtaggagaagcaggaatgttatgagcacattcctattatgattattttcactttttcacttctaaatgctatgattaatccctgtcttgactatttcacaaggtagatttgaagatgagatagtagatgagaacaggttcattgaagcctcaactcattggaatattaatataaaaaaactattttttctaatcattgctttcaatcatgttctgttgtcatctactttatatcttaacaacatcataggcagataccataattttctggtattagtactataaaatgtaaagagtccttgttaaaggtggtaatatcaattaatgagttatttatgctgaagcttagggaagaaaggacctttcacaatggtagcaactaggaagtttttgtctgtaagtggctataggggctcaagaactaaaactgaagccgatgtttgcaaacaagttagaaattgaactgctagaataagcccaatcattagtgttttgtctaagagtctagaacagctgtcaacacggcaacctcttctcaacattcagaggcctgtaatgagacagcatctggtgagaaggtgtcaaggttctttcacgtctcaaatgtggaaatcaggacatggcagttaaaggagtttggaagataattagggtattttaaagaatagatttttttttttgttataccagattgttgatgcctttataaacaatgccttaggagaatcaataactgtaggtgtttctactacattttagaaaaaaaaaaaccctatcgttttgtattgtggcccacaatataacatttattagcctttttgttgatatattcttacatacattgaaacaagtatctaaccaatgcacaaaatagtgaattattgcattactgaaagataaagtggcttaaattatataaactattttttcacatacagattgccattttcttcttctcattattggaagactaaagcagcaaatatgtcttcattgacaaaaatgtgtaaataaaaactattcttggtgactgtttcattttctctctttacatgttttaatgtccttagaaattgtcttataagcaaagattacttcctaattagctaaatttaatattcatacaaggtccataagtttattaaggatgtggtaattaaatttaagttgacattacagagttacacaatcatcgttgatgataaaactttggcaaaaggaaagatttaaaaatttacctatcttgtcagtaaagtaagtgagtccaaagatttgtagcattatctaaagttcaaatgaataaatcctttaaaaagaagtaagttatcataattccgtttggttaaacctgtgtttgcattcttagtatcttaaatatattacggaaacaattgatttgacacataaaaccattttaggacaatcaaaataaatgcttcataaaaatgaataattttaaacagataaaatatagttgtgtaatctttcagtcttctctaagatcaagaaaaaaaagatggcattactttaaaaactattaatccgatctgatttgtccgacgattaaccataacaaagtttactatataaactgaggttcttataaatcttctgtattcgttaaccaaataacaaaatgtttcagacgttttaattaatgcatttttacaattatattttactaacttaatgcccatttctatttcttaatttcttatctagcaattagtcattgcccacacagctaaattggaagttactgtgagagagagattgattgctctccaccctctacctcgaaggaccagcacagttaaacattaaaaatacaatttcttcattcagaggaaatctttgaatcctgtattaaatttatataagtgcttatttataattatgtatattatatataattgtatatttacatgcttatctcagtaagtcaatcagattagcggttttttcgcatttttaaaaacacttgtattagtttgctagtctgctataacacaataccaaaggctggtggcttaaacaacagaaattaattttctcacagttctgaagggtggaagtccaaggtcaaggtgtcagcaggtttggtttcccctaagacgtctgtccttagcttgcagatggctgccatcttgctgtgtcctcacatagccttttctctgtgtgtatgcatttctggtatgttttctccttgttaggacaccagctctattgtattagagccctacccttaggacctcatttaaccctaattacttctatattaaaggacctatctccaaatacagtcttatttcagactagggcttcaatattcaaattttgggataacacaattcagtccataacagcacccaatgtatatcatttaatctttttaagaaccttattaatagatttcttttattctgatttaaaaaatttttattattatataattgacgttcaataagcgacacggttgaaagacgtgatgaaatatatatgtcagtggaaacattactacaatcaaaataatgatcctgtacatctctcctaaacgttcccttgtgctctatgtagtttttcctcccccttaagaaagaagtgatctgctttctgttactacagattaatttggattttctacagttttatataaatggaattatacagcacacactctttcgcctggcttctttcacccagcatagttattttgagattcatcatgttgcatttatcaataattaatctctttttttttgctgagtagtatttcattttacatatataccacagtttgtttattcatacacctgttgatggacatttagcttcaagtttttttctattataataaagatgctataatcatttgtgtacaagtattagcatgaaaataaacttccttttttcttggtaaatgtgagtagaagggataggttatgtgatacacacacacacacacacacacacacacacacacacacatttttccaatgtggctgtactttttttacatttctaccagtaatatataagaatttcagtttccctacatctttgccaacacttggtctagtcggtcttttttaaattctagctattctaatagatatgtaattgtattgcattatcattttactttatatttgtctgcagttactaatgatattgaattttttttcatgtccttatttgccattcatatattccctttgccctttttggcctttgccctttttgtgtaggataatttttttttcttattggagggttttgagtgttctttatatatagtatacaccaatattttatcagataaaagccttataaagatttttttcccaatctgtgacttatctttttattctcctaacagtgtctttagaaaaatgaaagtttaatatttgatgaagtttatcattttttttatagactgtgatgttggtgttaaatttaatctttgcttaaccaaatgttataaagattttgttttatgttttcttctaggagttttatagttcaggactttacatttcattttatgattcatctttttttagaggattcatatcgagttaattgttgtgtatggtataaggcatgaatctaagaatattttgcatatagatgtctaatttttccagcaccatttgttgaaaaaactattgtttctctactatagtgccttcatatctttgccacaaataagctattcatttagctatagatttatttctaaaatatttattctgtcctattgatttatctatttcataaatatcacactattttgactttatctcaattcttaaaattaggcactcttatctatccaattttgttgtttatccaaagctgttattggctattctaggtctttcaaatttctatgtgaatttttaaatcattttcccaatatttacagaaagtgtgaccgactttagaggatatttcattgaactgataagtttggagagaacagacatcttgacaatattatgccttctaccccataaacaaggcctatctttcattatttaatgtctgtcacaatgtttattgttgttatgtccatatgtccaggtctttcatatatttcaaacaataaattcatatttcaatgctatgttcaatggtactttaaaaaaattttagtttccaattgttatttgccagtaaaaaaaaaaatgacatttatattgcattcttaaatcttgctaaatttactaattctagtatctttttagtagattccattcaattttctatatagacaatcatggcatctgaaaatcacttcttttctaaacatggttgtcttttaattctttttcttgcctgagggcactaaccagagtttcaagtactgtattgaatagaagtgataagagcagatccctgtcttgtcttgttcctgttcttagtgggaaagctttcagtctttcaccagtaagtatactacccgtaagtttcttttataaaatcccgttatctatttgaagaagttcacttctaatcctagtttgttgagaatttttgtcagtaatggatgttagattttgtcaaacgatttttttgtctattgagatgatttaatttgtaaatatgattaattacattgatattctaatacaaaacaaccctgcatgattggaataaacaccaccgcttattaatgacatagtatccttttaatatatcataggatttaattcgttaaattttagttcgaaatcttggatctaaattttgtgggaggtagatctgtggttgtccatttttataacacttttgtctgattttggagtcgtggtagtgatgacctcggagaataagttggaagtactttccttggtactacacctttcaaattaaaaaaaaaaaatccataacatggcaaaggaactattacaagtgaaacagtgttgtaacaatatctacctaataaaatatcccattgaatgttttccaggtgtattgggtaaaaacctaggctcttaacttgaaacttgggttcaaataccaacattgcccctatttatttgttgatgaataaaatatcattattgcatgtgtgacatatatttttaaatgctggaggaccaagacatttagccttttccctcagctttattgcaatattattcacaatacaattgtatatatttatcaaaatataataagtacgtgagataatgcatatgttaactagctcaggttaggcatttcacagtgtatacatgcttcaaaacatcattttgtagccttttctttcctttaacttcaatctttcaatattaaggcaagcagttcctggaaacctttacatctcgcctgcaagaagcacagctttgaatcttatcaagagatcagaaattctggtaaactgtttgggtctttaaagtccaggaagtgccggtctctggctagtgttccaggaatgatgacatatatgcagcagttctgagaacctacagatatgtgggcacttttctcccctctgtaactaacatataacctaatttcctaatgctaagtctattaggccgatgttccttagaccctttgcttgagtctttaaaactgaatttgacaaagcatttaaaaattataacaatggaaaaatattccataccagaaattagagtattacctacaaaatctttttcaattctcatttcatgtgatttaaaaactggccttatgtgatattcataatagactttttttcgaataatgaaagactgcacattttgttagaatcattattttgacagtgtatggatttcataatttaatctctgctttcagctggagggaaaatagtatctatagaactgaataccagatataaatgcattttctactttcttttaactcataggtttatacaaactgtttcatcttcatgtcatgtacttctctcctgatatacctgtgatagaagttctgctacaccgaaaatctaagtcaaattcacgcttcaacccatatatctttctcctccctaattggcagtttcagggcattaatagcaatttatgtagctaattacttggtagatacttacaaatataataggtacctttttcctaattaatttaccatcagatcagagtattttttttttttttttgctcatcactttatatcctgtgttccactatgtatattgcctggtacatagtagaaacttattaaattgtttcgaataatgaattatactagatagatattaaagcaggaaaggaaataaaatttaaagtcccttgcctttagataaataaaactgtcttttaaaaatgtgggaattgagaatagaaaagtttgtttgtatagattaatttataatttgttgacattcatattactgtgcaacttaggaatctgattttcatatgcaaactttgcaattcatattatgaaagtgaacagtgaagattcagaatcagtataatcaagaggtgctaagttccttcagggtgactttttacctatgatctattttgttctattttccagttaaccctctgtgaaactctcagcagcacactctgcacacagacactctataagtgcacagaatgtctattcatacgcatgcagctttgtacaaacttaaatatatagcctatgtccttttatatttaaaaaaatgctttaatatgttctaattgaatttgttggtatacttcatagtttcatctggtcttaactttctatttatcagtaacaattaatatagtccactctccattatctgcacaaattgtatgcagtaaaattgaatcatgcaaacataattcagaaatcatttctatttgtatgtgagaagtagtatgtgatgttttcagagtaagtttcttgccttaattatattttgcttggggtaattagtttgcattccctgagcacacatcaactgacagtgggggaaagtacagccctgaagtattctgggaaaatgatttaaaatattgtaactgaaccacatgtatatactcagtacttgtaaatgacctgggaaaattcaaaggggtccaatattgtctggattattattgagacttggtgatcaaatcatgtctttcaaaaataactgcatatatttctagtttaactcagtctggtcccacagtaccagttttataaaggaaattcattaaactagatcgctcaatgaggaaacttgagagcaaatggaagttcagtttatttgtagttctatcatgggcatgtgtgcacgcgtgtgcatgtgttgcttcaaacgttaatttgtttgtccctatgacaatatgtgttggttttgttgatttcttttgcttcattgttttcagttgtagctaagaacacattatttcctaggaattatatataaaatgccacctgcagcactcaactctcattgttctttagatttcagatgccagaaggaaatagattctaaggacattgtgctacgcagataaaatgtaattgtgttctacagaaaagatttccattctgtgtgctgacaagtacatatttccattacattttttaaaaggagacagttttgatcatacgaatgaatattaataagaattttttactaaaagtatttaattatttgtatattattctttcactattctctcttagaaatctctctcacacagatacccacactcacacaggcacacactttcctatattagaagagtatttgaaatccaatcttcactcacttcgatttgaagcatcacatgcatattgaatgcatgtagtgacaatacttgtattttaatgttaaaattcctaatcttacccctgaaaccactacaggggcaaatatatatatatataaataccttgaatttatgaagtatggtttatttaacttcactttgcatcagtggtaataacctatgtagccaagaaataattagaaaatgaaaaataataatataaaatgtgactatgaaatcatgtaccacagaagcttatccatgatatatttacaataattatttctcccacccttgtttcattttttttttttggtagttattgatataatgactcctattttcctaaaggtaagtaatgatctgtactttacttttttctgttggcaatgtactatgtactttatttagaaactttttttttccatttaatgaattcaggctgggcttggtaaacccattaagggacagataaggctccaaagagaaggttatatttaatctgagctacaaagaactgtcttaagtaaattacacataagacagttggaagaggagtgtacccataggggatgttaaatgcaaatgcacagaaatgagagaaaagcggctggttaacaacacgtaggctcaaaagggtgttttataccaagtaggagattgggttttatcttgtgggagatgtaatcaaagacttttagatgggaaaatacataactagatttcattttaaaatatgactataatggaatgtggagaatggaatggaggagcaaaggcctgaaggagggagaccttactagaatccgtggctatattgcaaaatagatacgatacagaggtcatggtagatgaggagccaagcagaggatcactgaaatatattaaggcagtgcatgagtagagcaagatgactggatatatgttggagggtgggcggtggcgggtaggggaatttcttgtgtgagtgactgagtgcatggtggtactagtcactgagaaaggaaataaaagagtaagagatcaagtccctctctctgggtatgcatgtattgttctatgtgtgtttgggaggatactatgcattctattataaaccatagatcttgagatacctgagacatctaggtggagttgatcagtagggaattaggaataggatctggaccttcggagagatagctggacttaagatttaaaaatcaggggcaatcatgagtagttgaagccatgggatctggtgaaattattcatctatccattctttaaccactaatgcaacatacatataaaaatgttgcattagttgcaacatacatataaaaatgcttgcctgtcattgggctaaggggagtacagaataagttattaatggctttgtaagcatttacagagaagcaaaagctattccttcctttaaaaaaataataacagtgaatatttacagggtgcttatgctgtgccaggcagagttctgcctgctttatagctattgttcctttaatcttcacaataaacttatgaagtaggtcctattctcattttacagaaatggaaactgaggaaaagagcagttgaggaatttacttaatgttatccatccaataagtctccgaatcttaatgtccgttgcaagttaggatcttattattagaatattcccttaacagagttttgtagaggagggaaaattaaaagaaaatgctaatatatcaaatggcatacagtattgtggaaaaaaaaaaaaaagagacgttacaggtagctatgataattgctactatcattaaaaatatttaatttggaaataagatgtaggagattctgaatagaataatttgaaaaaataggtttttctgtctcgagctttttgcattttttcctgtggtgctaactgactttcaagcatcaatttgttctggctagacattctcagtcgggttcaaagttggtgatacataaagcaacaatagcaaaaacaagtaacttaagtcatagatgcatgctgttgaaaaatgttagtggaataaaatcacatcagggtgtacttttcatctcttaaaacatatggagtgacttttattattcaatatggaatcatttttgattgtgcaagagaaataataccttatatttgaatagtacatttaaattttcaaagttctgtaagatatgttctttatttttctaggaggtttaaaaaatataaaaagctatacttttttatatttgtgtatcacacacatgctcccaaatatatatatacacagcatgtccatgtccaacttgatcaatacatatatagagttaagacttttttttaagttggatagtattctccctatgtaaatactaaaatagaaaaatcagttagttttagttgtttaactattatatactggcgattttgttctgtagtttatatagcttggagtgagattatattagattttaatagtattgatgtcctagtctgttttgttgccataaaagaatatctgagactgggtattttataaagagaagagggttttttttagatctcagttttgtaggctgagaagttcaagagcatgcagttagggcttttgtgctgtgtcacaacatggcagagaaagtcaaaggggaagtaaatacatttaaagaggaaaatctaaggggcatcctggctttataaaaactcactgtcagaggaactaatccattcccctgagaaccaagtcagtcttgtgagagcaataacacaactatggcaagaacaagaccaagccattcatgagggttccgcccccataatccaaatacctcacatcaggccccatccctcaacactgccacactggggattaaatttcatcatgagttttgatggaggcaaacaaactctacccaaaccatagaaactgtattattatgaatattatttacagaagttaaaaatgttatgtttgggcatcatatgttctcaatcataagtgggagttaagccatgaggatacaaaggcatgagaatgatccaatgaactctggaggctctggggcaagagtgggaagggggtgaaggataaaaggctacaaattgggttcaacgtatactgctcgggtgatgggtacaccaaaatctcataaatcaccactaaagaacttactcatgtaaccaaataacaactatttcccaaaaatctatggaaattaaaaaaaaatgctgtttggggacaacagtatgagagaattcataatattcatgttaccatagtacactatcaaagactttttaaactgatttgatgacagctcatgatgatttaatttgcatttccctctgtcagtgaggagacatatatgtaaatctgtctctttttttttatggattcccagaatagcagcccacctcagagatagttaaattctttccataattaatttcttttgttcagatctttaattcatttggaatattttttgtatagaatgtaaaataatggtttgaatttattttcttcccattggaaaaaagagagtatcatttattaaacccattttcaattcaaattgaaatgaaatgtcaacattatcaaaggagacaaaaacagggaattctaagagcaaatatatatatatatatatatataactttatgcattataattttgtaaccatatttaatagcatagtatttgtattctcaaaccttacttttttaaattgttgtgtagaatgtatcttaaagatcagtccgttttgtatgtacaaagattttacattttaatagcagcataaaatttttattgaatagatataccaatgtttttgacttacaatggagttatgtcctgaaatggaaaaataggttacaccactgtaagtggagactatctgtactattattattatttaattgtattttaagttctgggatacaagtgcagaacatgtttgttacacaggtatacttgtgccatggtggtttgctgcacctatgaacccgtcatctaggttttaagttccacatgtgttaggtatatgccctgtgtgatgttcccctccctgtgtccatgtgttctcattattcaactcccacttatgaatgagaacatgtggtgtttggttttctgttcctgtgttagtttgctgagaatgatggcttccagcttcatccatgtccctgcaaaagacatgaactcattcttttttatggctgcatagtatcccatggtgtatatgtgccacattttcttgatccagtctttcactgatagatatttcagttggttccaagtctttgctattgtaaaaaggtgggagtgtaaattagttcaaccattgtgtactactatttattaatcttctactgatgaatttttaaattatatcttttctttttctattataatcagtgctccacaaatacctttttacaaacattatctcacacgggtacaactctgtcatgtacatttttagatgtggaaataatggggtaaaatttacacatcttttaaattttaatatatatttccaaatagtgctctataaaagatggaacaattagcacattacaaaaattacatggtatgtaacacattacaaacattatctatactcatgtcaaatgtctgtgttaactttttaatctttatggatttactaaataaatagtatgaaatataattttaatttgtctttttcctgttttgaatgagggtaagcaacatttcataaggttagcagtaacttgtatttgcctgtttttctattttattttttaacatttaccctgtcagtgtgtgttaaatgaattagctatttgttatatgtgttatgaatgtttgtcagtttttcttttggctatgtttattgtaatttttcttttccctgaagatttatttttaaagtagataaatttaaatattttttaatggccactctaccttgttttaaaataaaaataaaacctctcccatgccaacattattttttacattttttgaagtactttaatggcttttttgtatggttaaattctgtatccatttgctttgtcactattcctttaaaataaatattaaaattattacgtctagtccatgataactttgtcttcttttccaaaaactgtttataaaatttctctgttgattacagcttatttttccatgtgaacagtacaatcagtttttttacctttaaatgaagaacacttttaaaaatcattttcatatttacatatagtaaattttctaactctatttgtttattaaatggatattgctgttagtatatgaattttgttcctattttattcaattatcttcctgcttataaaatatttttgttgaatctcttgggttttttagatataaaatgaaaccaatgaatatagtaattttacagatttatatccaatttatgcctgctattttctctttgtgaattgatttgactttcaccccccgcccctccccccacacacactactgttaaataacagtaatgatggtagccagcttttatcttagtttaatatgaatgcttgcagtataatggattgctcctactctgcacttttgtgtatagtcttcatagtaaatgttaatatctgactggacaagttcttcctcagtaaacttttcaaaagatttttataatttttttacatatctgtttatctttctgagcttgaaagggtcattcggttcccaatcaaatctcccttttaagtctcaagaggctagtgcattaaatacgtatattaatttgtaaaatatttataccttacgattttaagatattaagtcgtcttttccatgattgtttctccatttgttcagaaattattttaagttattcaaaactgtaggatttgtatgtgtgtgtttttgattgtggctaattttgtttttcatgcaagtaaatctttattaaagttgccttatttcattttttaaaatttccatttctggttactttaatggtatattaggaaaaatattaacttagtacatttatcatattcttggacaccttaccaaatcgtttatttcaaatatctttttataatctcatataaaagtatttttcttttgtttcaatatttgcaatatctttaggcacttaggtaattagaattagtaggatgatataacttatgtggtgataacaggcatttctgttgaatttctaatattaataggaatacattttgttcttcaaatgtaatgtttacaattttgttaaacaatcttcattatattagctgagcatggtggcgcatgcctgtaatcccagctactcgggaggctgaggtaggagaactgcttgaacccaggaggtggaggttgtggtgagccaagatcacgccatcgcactccagcctgggcaacaaggcaaaacgctgtcttacaaaaactaaaaaagaaacttcattatgttaaggtagtttctttctagtcctgctttactttacttgttttttattattctcaaagagctgctggaagaaacttggtgcgttggaagaacagtaagggagaacagcatgactagagtggagtaagtgagggagtgaacagaagatcagagaaataaatctagggaacagattatgtaggacctgactggggtgacatcagtacaggatgaatcagaggagagaaattgttaaccataaattgaaatacttgatctaaaacagtgtgtctcgaactatctgtagtgaagatccaaaaccttttgttgttgttgttttgttctgttacttggtttccaactagtgaaggattgaaacttccgtaaattaattattcaaaaaataaaaatctaaaaagacatacataatacaaatccaaacataaattactctgttatgttgctataaaattattcaaatgaaggccaggcattgtggctcatggctggaatcttaacatcctttgggagcctgaggcaggaggatctcttgagctcaggtgtttgaggttacaatgagctgtgattgcttctagcctaggcaatatagcaaaaacatgtctctaaaaaataataaataatttaaaaatttcaaatgatttctcataatttcaccacatatcttattgtatctggtagctcacagttcgtggactcatgtaagtcaagggacatgctttgaataggactatctcagagagctagagagagtaaaccaggaaaatagagtgtaattgatgtgactactaagatagtgatcataaaagtaaaatgagactcttagcgtgattttttttaaaccagtttacctttgtaggtaaatttacagagccaggtaattgaaccataaagagagagagaagttgaggatgtatttaatatagtaaccaaatgattggacatgaaacttaaactccattgaagagaattaagtgtgcagaggaggagatgtaggacagctgaaaatgaattaatccatgtccctgcaaagacatgaactcatccttttttatggctgcatagtattccatggtgtatatgtgccacatttcccttatccagtctattactgatgggcatttgggttggttccaagtctttactattgtgaatagtgctgcaataaacatacgtgtgcatctgtctttatagtagaatgatttctaatcctttgggtatatacacagtaatgagattgctgggtcaaatggtatttctggttctagatccttgaggagtcactacactgtcttccataatggttggactaatttacactcccaccaacaatgtaaaagcgttcctatctgtccacatcctctccagcatctattgtttcccgactttttaattatcaccattctaactggtgtaagatggtatctcattgtggttttaatttgcatttctctaatgactggccatcattctcagcaagctaacacaggcatagaaaaccaaacaccgcgtgttctcactcataagtgagagctgaacaatgagaacacatggacacagggaggggaacatcacacactggggcctattgtggggtgaggggtgggggagggatagcattaggagaaatacctaatgtagatggcaggttgatgggtgcagcaaaccaccatggcacatgtatacctatgtaacctgtatgttctgcatgtgtatcctagaacttaaagtataatttaaaagaaaagaagaaaaatgaattaatcatcatattaggggttggaggcttgttggattgaggtactagggaacctgagctagtaaaaagggaagctgtgttcatagaatgggattctttaaatttaatgtttggagagagcacatattttggtaatgacagaattttgattgtaaccataagagtggctgattggatatgatcttgggtgaagaaaaggtaaaggaccaagaggctattgtgttgaaaaagtgtcttcagatgcagtaacatcatgaagaatgaagcagaaaaagttttggggactgagtaaggaagaaaaaaaacttcaatgaagttccaggcttgagagtcaagaaatgactgcaacaaggagggataatagatgtccttagaggacctgaaatagaagagcagggaattttccagacaagggaaggaaaataatctggaagttgcaatgagtttctactgagtgccctcctctagaatcgaatggcgaggaagaagagtagcggtatggttggaaaatagctattaaagggcaggagcgatggctcatgcctgtaataccagcactttgggagtccgaggcgggtgcatcacctgaggtgaggagtttgagaccagcctggccaatatggcaaaaccccgtctctactaaaaatacaaaaaaattagtcaggcgtggtgacaggcacctgtaatcccagctactcaggaggctgaggcaagagaatcacttgaatctgggaggcagaggttgcagtgagctgagatcttgccattgcactccagcctggcgacagagccagactctgcctcaaaaaaaaaaaaataaaaggaagaaagtagctatcaattgagagggctcagccaagcccatgtcctcaagggtgagccaggtttaagggaaagcagaagagctgaaaagcatgttaagaagaggttaacaatcacagaattttgctgatgacagaaattaattttaaaaggcttagtggaggttttttgtttttttttttttttttgcatttgaaaggagttacagacaagattaaaaaatgggatgggtaaaaccttataggtatagagcctgagcccatgattcttaaacttctcctaaatgcctgacctaaataaggataaagtacacagagagaagatatttatgtgctgggagccgtttctcccattgtgagacacagtactactggattgctacactgcagctagttcttagctagagcatatcagcaaagatagtgtgtgccttcactgtgcaagggcgtgtcagtggagaagtaaatagaacctctaaaggattgttctggctacctggtaaaagaaagtcaaaaaattagaaataaactaagagaatgctagcatcatcagccatgattattaaaatgcacttcctatcttctttctctgcattctttctgtctcaaaatttttccaacattctagaatatcttgtgcatgcatgggctcactgctgtaactgtccctgcattctatcttctatccatgacattttcaaaaaatgggaaagaagaaatgagccatggatcttttaaactctgaacagatgtcgctagcaacctgctggtttgaaggggtcaacatagcaagtttgcataaaatataaattgcagaaggtttttaatcctgtttcttcaaaatgattccctttattttttccaaagaagatacttgtcttgggtatccaaatgttatatatggttccttattctctagatatttttggtttaagttctattgttttaagccagttaattctttaaatgatagttttcccttttcatttccatatcttttgttttattattttctaaagcacctaggtattgattgtgacaaacagggtttgattttctggttcactagactgacacaccacaaagggaaaggtggaaggttagtggtccagaaaacagacacggctgactctgtaatctttctgtatatatgcatacaatccatctcttccagctctctcaagatatgcatatacatcaataaaaatagaaaaaagaactgagtcttttccctatctattaatttaacaaagctgcttttaaatgtttttcaaaatatgaaaaattggctgaatttgagattcaatgagattgttttgtaccttttaatgggctctttaaagtatttttttcttttttttttttttttcatttgtcactccatctcttcaatgatgtacacagaatttctttatcccagtttaaacattgtaaaaggtaagctggaaaagttaggttagttcaaaagggtaaaattaggtaagtgagatcatggaattaaggtcttagcacaatgaaaaaggagaactttggaaccataaaacagtagaaaaatgacaagaagtagaatgtcatggaattgctttgcaagcgaaattaatatggctatgtaccaaaaatgaaagagcaagaacatattctatattttttgagcttcttaaaagcattctaactatcatagctcttgtgagcgatgcaacaatacaaaagaggaaggaaggtaaaggaggagaaaagaaataagaaagtcatttttaaactctgttcagtggccttgggagtcaaacacataaactatgcaaacaatttcctaaatttggtgagatcacctactttatttcactatcaattctgggcctctcttggccaccacttttatgcttttgtttcatattttatgaaagttttattttgttatctaagtagtcagactttaaatggaaaaataaattagcaaataaagaaatgtgttttatttacttttcttttctcacttctctcatattctctctccctcttattcactcttcctaaaaaattagacatattcatttcttcttccaaaaaataactaacaatttactctatcacttatagaactaatcccagctgagatgtgccacagtaagtttgccaaatttttaggaaatgcatttattttatactttaaatttttatactttatgatttcaaatagcaaagtgcttaagagactagggaaagagcaaaggacagtttaatgaattgaaactaggaaatcgtgagtaaagagaagtagttggctatgtcaaaaacgtgagaattttaattatgaaaatgaactgttggattggaatatttaactggctaatgagccatttttgtgaagaaggtagttttaagttatgttatttaggcagatgtgtgcaaattcaatagctcccaaacaaaatataactcttaatcattatatgttataattctgcataatagtagagagcatatttacagaatagtagctagtttaaaatttgtgtagaatatcagttttcaaaacatagatgcttttaaaatatttattaattatctaactaaaattaaccagataccagattaataaatcatttgaaatagtgaagaaaagacactatcaattaaatatgcatatttaacattttacttcttaaaagaggccaaatctagtattgtaaaagttactaaaaaagacacaatcaccatctggtgccaaagcaaagaaactgttgttttaaggatttactttcttttttttatttatttatttatttttttttattatactttaagttctagggtacatgtgtacaatgtgcagatttgttacatatgtatacgtatgccatgttggtgtgctgcacccattaacttgtcatttacattaggtatatctcctaatgctatccctctccccaccccatgacaggccctggtgtgtgatgttccccttcctgtgtccaagtgttctcactgttcaattcccacctatgagtgagaacatgcggtgtttggttttctgtccttgcaatagtttactgagaatgatggtttccagcttcatccatgtccctacaaaggacatgaacttatcctttttatggctgcatagtattccatggtgtatatgtgccacattttcttaatccagtctatcattgttggacatttgggttggttccaagtctttgctattgtgaatagtgccgctataaacatacatgtgcatgtgtctttatagcagcatgatttataaacctttaggtatatgcccagtaatgggatggctgggtcaaatggtatttctagttctagatccttgaggaatcgccacactgtcttccacaatggttgaactagtttacagtcccaccaacagtataaaagtgttcctatttctccacatcctccccagcacctgttgtttcctgactttttaatgatcgccattctaactggtgtgagatggtatctcattgtggttttgatttgcatttctctgatggccagtgatgatgagcattttttcatgtgtctgttggctgcataaatgtcttcttttgagaagtgtctgttcatatcctttgcccactttttgatgtttttttttttttttcttgtaagtttgtttgagttatttgtagattctggatattagccctttgtcagatgagtagattgcaaaaattttctcccattctgtaggttgcctgttcactctgatggtagtttcttttgctgtgcagaagctctttagtttaattagatcccacttgtcaattttggcttttgttgccattgctttttgtgttttagacatgaagtccttgcccatgcctatgtcctgaatgctattgcctaggttttcgtctagggtttttatggttttaggtctaacatttaagtctttaatccatcttgaattaatttttgtataaggtgtaaggaagggatccagtttcagctttctacatacggctagccagtcttcccagaccatttattaaatagggaatcctttccccatttcttgtttttgtcaggtttgtcaaagatcagatggttatagatgtgtggtattatttctgagggctctgctctgttccattggcctatatctctgttttagtaccagtaccatgctgttttggttactgtagccttgtagtatagcatgaagtcaggtagcgtgatgtctccagctttgttcttttgctgtaggattgtcttggcaatgagggctcttttttggttccatatgaactttaaagtagtttttttcccaattctgtgaagaaggtcattgatagcttgatggggatggcattgaatctataaattaccttgggcagtatggccattttcacgatattgattcttcctacccatgagcatggaatgttcttccatttgtttgtatcctcttttatttccttgagcagtggtttgtagttctccttgaagaggtccttcacatcccttgtaagttggattcctaggtattttattctctttgaagcagttgtgaatgggagttcactcatgatttggctctctgtttgtctgttattggtgtataagaatggccctatagctcaggggttagagcattggtcttgtaagatatttactttctatgtctgtgccctaaccataagtgattaaatgatatactcctttctgagatgaaggttggatgggatgatgttataaaatcctcatacatagtctactgtgttatttctgaaatatcagattcatgataggatttatagacgcttctaaacaggcggagtttaacactcacatggattattgcatttaaatctgacaataactccatgaggctttactcttaattttttcatttcatggatgaggaaactgagatttacacagattaattacttgccagtgtcgcataggtggtaaatgcaccgcttagatttgaatccaaaccaacttcctcttttaagggcctgtgcattctaaaatatataaattgcttagcccagaagctaaccaaccctcaaattgttcccaataaagtaattaatgttattttttttatcattgtcagaagctattagggcagagttgcagtgtgcaatgcatggtggactctgcaatgtgcagttgaattgagaagcatcttacttaatacctcatattttctgactgtaaccacttgtttcaaattcctatcaggagtctcacaataacttggcctatatagctaaatgagtaaagtaaaacaaacagctctctgaagaatggattgccttggtttcacatattcttcttttagagcaaaatgttagacctactttagaaaaataaaattataaaactttaaagttaaaagtaaaactaccagaaacttcagattcattataaatctgaaaatgaatttgtcaatgttcgatcttattaccttatttatatcagatagctatttagagtttacaaaacactttcacaaaagattttctatttgatataatcataatatatctgagatagaatttttgcattgaaattgccttatgtgtaggttaaaatagtcaaatattgtcaattttgtattcttcaacataatgatacccattttagagaggagtaaacccaggcataaaaaataattttaaaaaacccttattactaatatatggccaccaaattcatttgcaaaattaatagacaaaagtcacatcatcaaagccttttctattaaattctcaacaacaaaaaataaactagaaatgaatatccttcattgagggtttgagtacattacaaagagcaagtatttcatataaagtaaattgcttttgtccatgccttgatttgtttaaaaagataatttcaaatctgaaattccttgcctgtcagtgggttaaatgtctgctcttcctcctagaacctctgtcactcaatgaagagttgtaataagtggaaggtacccatactgcagcttatttctaaattattgagcatttcctaccagcttttatttaaaaataaaacaaaataaaactttttttcctctaaatcctgaaaagtatttttgataatcatttgctagaatacaacatatgattattatggatcttcagggtgatagatgactcatttgcttgttgaaaatcacatgaaagacccttcttaggccaagtctgtgccttacacatctctttatcccctgctctgtgagcacagttctttatacataacagatacttaatggattttctgagttgagttgaattaacacacacacacagacacacacacacacacacacaacctcttgggtttaacatcgaaggatgtttttgtctttaaaatgttatcaagacatgcattagttatttttgatttagtgctttggatttcttcaggacaatgtgcttttcctttgtcactaaagtactttgatccagtaatcttgagaccatgatagagtacatgcatgacaatggcatacgtgattcaatcctttgggaagaagatgtagtcatatcccaagtgagtgtgaaattgtattcctccctctctcactttagtatgagacaaatatgcttgctgcctcatttttaattgaaaacttttagaatatctagcaaatgttttgaaagagaatgcatagagacccctaaataaaatttggagagtctgtagagggaaaatgttatacagtacaacgttgtggggatttggaaaagccctaagacctttcttttcttattccttttcagtttagaaggctttattctctcttttaggacaattgagtgaaaaaaacttacggatgattttaacaggtcacaaatatgtttcctggttttgaacaagggcgtctatattatctcaaaattgtgttaaagatggagcatttagcaaccaggaagacaatgagtgtaaaacacaaaattaactcatcaagttactgtaattttctctcttcttgtctccagctgattagtgcaaattaaccgcctgagcagttagcctgcaatatggaaatcttagctatctgctgagaaggcagacttttttctttgttttaactatatctatgtagaattccagaattcttgaatgacattgctgtatttcttaacgctgctttgaacttaaaggacatgtttgtatgtctgttttgagctttgagaatttattaaccttaatattattatgattataatctttataaattcctttataggaattcaaaagaaaaaaagggaaataaaatgcttagatacctcatctcttaattgaagataataactatctcactagattattgtgacagttaaaaactaaataatgtgtggaataaatgtttagaatacagtgtggtccagagtgtgcatttgatatccttttaaaattgttcttattaggccattgaatttgattcagtgaaatgtactacttatttcaatctcttcgctctcagaaaatgagatatgtaggcaatttctatccattacatttcatatggtccatagagagcttgaaaaacaagaactagtttacaaaaaagtcagctcttgaccaattattagaaatagaatgatgtgttttgttaaaaagaaagttgaaaagttaactaatctcagaaaggaaacaagtggtatacctggtaggaaataaactataatttttttggaggtgcatctacaagggataatcaaagttttgtaataagatgtgataaatataactgcctgaaacaaaaatcaagaagagtttttgtttctgctgtttttttcctttatctataaaataattggcagccatttctaggtttaaaaaaattagtgcaaactgaacattgaatatttttgaagcatcaaaactttaccttttatctctgaatgcattaaaatattccatcctatacacagtttccatgtatagtaattaatgcatttgtttggtacaaagttttaatcaagaataatgtaccaggctttttccttgatgttgggagttaagcactgaacaaagacagtttagttcctgcactcaagtaacttattggagcaaggaagacatatatgatgatgagttatatgaaagagacatccaagggaagtctaaatgtatttttgtaaggacaaaccaaatgcttatttttaagatttagtgagttttaacagacttagaaacaaataatatatcttaagagcatactcatgccagggaatgacccattgcctcgatatttttcaaacttgcatgatttgaaggatttggttaaaaatgctgctaactccattgcttacttggaaccacactaaagcattgctcttcaattttacctcttgaaattatttgtctacaaatactcagattttaaaatgttgtattatttaccccaattatcagctcaacattccttaaccacgaagttaaaaatcactgtgtaattggagacagaaagtggtgaggtagtctaataaatttaaactattgtgatagggtctatctgtgatttttttaaaccttctaatttttgtgtaattgctttcttatttttcattttctccactttctattaaatcattctgattaaaactacttgccatctgtcccttgatatctgattcaacctgatttaaaagcatgtttaaagactacagtactagtgttttaaaagaaactccactaaaagtgacacaaaacaccaagaattatctctaagaacagtagtatttaaactcaaccacacttaaaatgattcttttgaattgttaaaaaaaaaaaaaaaaaatgaagtagccaaacatgtaattcttatcctacagaggcaatattatctttctatttataaaatagaagaaatcacttcagttatattgatatggagatagaaaagtgttagtgacaaaagtcaatgataaatgaaaagatacttggggcattcctgaatttgcttgtaatcgttattaatacatctagaaaaaatgattaaggaagattttaataaaatatcttataaaactgagagatgtaaactgaatggacagataatgttacccacgaactaacaaagttatacaagtggtcagggtgttgcaaaatgagctgcaatactgaaaacacactatcacataaaatatgcaatccaaggaaaatccaatatacaatcaatgtgtggtaagactatggaaagtcatctcgtagaaataagagtaaaatatactttccagtctttgttggacaaaatggtttttgtcaaggtgagattagaaaaggcagagtttatagaaaaaaaaaaatcattcagatctgttcctgcctgtattacttcaaggaaatcaaatacatacttcagacgtcaattttttctattataaaaataaagatgatactggtttccatactaccttctaaggagcccctgggatttggtaaaggtttttgggcactatcatggggatggcgagcctactaagttagtaattaaaactgggaaacttaaaacatgtagcacatgactggataagcctcattaaaatttaagttaaagatgattatatggctattagaaggggaataagaacaattatctggattacttgacttccatattggatttacctaaattgcctaggaatattatcagaaacgatttttaaaagaacaaaaaacaacactgagtatttgctttacttctttgtgaacatacagttacaaattttaattcattttccatcatttaataagttatgcacttagtatctttattttaaaatgaaaacgtttcctctcataattgttacagattttaatataataacaaatcactgtaataggctagagtatatgaatgtattatacagtttttttactttaggaatctaaaatgactgtcacatttaatttcacattgtcaaaataaacatactgctatttaaagaactcattctttaaataagtttcacaggaaaaaagaaaactctccattatttttatttataatgaaattgctttttggtgtcatgatcagaattagtaccctaatgcaggcaatacatggggaatacatatacattctatttaatcattctcttacgatgctttcatgttgttttaggatgtaagaagactgtgaatcaacccatttaattagggtgtgtgaaagcaaaatgaaaattctttagtttttttctggctcataagccttccaaccacaccccatctctgcctttaaaaatgctagtcaggtggggcgcggtggctcacgcctgtaattccagcactttgggagtccgagaggggcggatcatgaggtcaggagatcgagaccgtcctggctaacacggcaaaaacccgtctctactaaaaaacacacacacacacacacacacacacacacacaaattagccgggcatggtggcgggagcctgtagtcccagctactcggtaggctgaggcaggagaatggcgtgaactcgggaggcggagcttgcaatgagccaagatcacgacattgcactccagtctgggtgacagagccagaatccatctcaaaaaaaaaaaaaaaacaaaaacaaaaacctattcattttgcaaagtcctatttaagtgaattggaatgttcttggaatgggatgagcctgcaacctcagaaaattagtagcagtagtgtccagggtattatctgggtttattgaatccttgtctattcctatcacatgttgtgtgtgtgctgatctttagcctactcttggactatgtagtaagaacagtctggaatgatgaaggagaggagtcaaatcacaaggccatgtttaagatatggcttcgagtaactataatccttgaaagtccacatgcttttttttttctttcagaaaaagaatataaagaccaaagaacattatccactatgaccatactataattttgtttcaaaatatgtgcaagttctagaaaatggacactcctacattgtatttttgcttcattggttttactttccgtcatgtttgttttgtttccttcggaaaggagtgtacgttactacaagtgtgttagagagataactaccctcaagggtgcggttttaatagaatcaaggagagctttggcatgcccctgatttaaaaataaatttttttttttgcattagtatgcctgttttcatgacatgtatgtgtgtatgtgcacatatggacgcacccacacacttaattacgaattttcctctgacaatttatacaaacaggaggcagggaaatgctgggtagaagagggcagttccccaggaaaggccccaccttcaagcctggaaacccatggccctaaatgggaagaggcattcctgttttcacactctaatattgccttttccaagactactctgacccaccacacccctatcctttgttcatataaaccccaacttccactggcagatcggcagattggtatgacagaggagagaagagaaggggcatctgaatatcaagaggagttttgctacagacagtcaggagatcagccatgaaaggccaaattccaggggaagatcgtcttcacactccatcccctttccagcttcccttccaccccactgacagccacctccatcactcagtaaaatccctgaattcatcatctaagtctgagtgacctgattcttcctggccaccagacaaggacctgggtaccaagagagcagggtgtaaaagactgtcaccctgacttttcgctaagctgatttaacacttagctgtccacggaggcaactgttaaaagagcattaattgtagcacacccttagacgctaccatggggccagagcccaaaagaggttgccctggctcctgcacctgcctgcctgtgtgccccctctcccataaggggtttgagcacatggcagccgagcaaacgagccacacccctgtggcaagtcctgtgagggggtcagtgaattctcctgcttcaccataattcgtgacattttaaaattgaattgtttttcatatttcatgatagctccatacatagaatgacctgttaaataaatgctatttagaatttcggggaatagataatgttgctttaaaattgcatgagttttctaacagctgaacttagactagtttcatttatattactgtatctttgtatctgagtgtcctaatagtgactgctaccaataagtagtataagtatgtgaggaaagagaaatgacaatataattatcatgacttctttcaagttggggaaatattaatagctttttgcatttaaaattaatataaattaacattaaaataatttttctgccatgaatttaagagtaaaatatttacatttttaaacaccatctttccatacattttagcatctatttccagaggtgaggtaccagtgttggttctgcataataataaaaccctttcaaagaactagaacttaaaaaaaaatgaattgcaaacctcatacagtatagaattaaaatgctagaccattaaaactaagcagttgtacaaactttaagaaaagattttaaaattgtttttaaagggaccaaatgaatcaattgttatttaaaagaacctttattcagcattgtgttggctaaatacttcatgtgagttcttgttttaaggcaagtcaccctcattttttttattgcttatttaagaaagctttttagtggatctttatttaagaaacacccatagtctttttgttggtttgttttaactgagctttttagttgctctgaaagcagtaaatctctttggttcactgtgtgctttgatagagatttttttcttgccagcaatttcttgcttcctatttttgaaaagaccagtgttctgccttcacttaaatgtgaaatggagaaaattaaaagttagttttatgtgtttgtttcttttaggaataaaagtataattaacaactttatagagagaaggtttgtccacagagctagtgatttccatagtattagtacaaatttgtaaagaattttgtaatatgcatattatcaatttgccttttcaaaagtctgtatcagcctataattttatcacaggcttaatttaacaattctctccttaacactgatgaacttttttaaaaaaatatttttccaaatctgataggtttaaaaaaatgcagcttaatgttgttggatttagatttctgggattattaatcaatttgcctttttcaaatacagttgattttcattatttgcagtagttccattcagtaaagttacctagacaattgaattagtgaatactaaatcattactcctaggggatgtacaaggttaggttcttgcaggcttctggtcacaacattttattttcatcaaccgatccataatataatcttttacatgtgcctctgttgaaggacattgtatttattataaattgtttaaatattgacattgaactcacaaatagcattattttgtttcaaaatatgtacagatagcattataactcgtgcttgaacaaagcttattttaacgtatttttttccctgtaaggcacatcacactggtcttacgtttaggaacattagacagcacctcagcactacacttgggggccattttaaatagcaaaattaccaaccaaaagcaaagaattagaaaaatgtggtattaaaagactgtgaaaaggaaacattcacagtatgaaagctgaagcaaagaaggcagaacattgtcctgcttgacctcagcagggaaaatgggcagcaggcaactcaaatttttgatttctgagcatgttcatgaatgaccacaaaagacactgctatttgatgcagaatttctttttttcttcttagctcagctaggtctgggttcttgtctcatgaccaggaaaaattaggcacacagacactcagagagtgagtggagtagaatttatttatttatttatttatttattatttatttatttatttatttatttttgaggcagggtctcactctgttgcccaggctggagtgcagtggctcgttcttgtctcactacaagctctgcctcccgagttcacgccattctcctgcctcagcacccccagcagctgggactacaggtgcataccaccatactgggctaatttttttatatttttggtagagacggggtttcaccatgttagccaggatggtctcgatctccttgtgatccgcctgcttcggcctcccaaagtgctgggattacaggcgtgagccaccactaccggctggagtagaatttgttaagtgaaaggggaaggctctcagcaaagagaggggtcttgagagcaggttcctagttgctgccttcacagttgaatccaagggcttttacatacaagctgatagggctggattttatatttgtataaggtgtgaattactggtggctccaccgtattcccctagtatgcatgtgggtccttagtccactgtggccatgtttaggcaagccccgtagtacaaggtcccttaagtgcacaaaacacaggagggaggttctctggggactctttccttactgtccacctaaagcaagctggctaactcctttcatattgactgttgattaaaggtgaaaaattttaaaataaatataagcaagtaaacaaatttgcaaatatgaaatctgaataatgaggattaactgtacttgtttgctatttgcattttttttcagctttcctctgtcttggtttttctattgggattttagaatttttatttgtacaggcacagtatacattaagtatataaactctgtcatgtttgttacatgcttttattccagtttatttgcttttaatttttttctgacatttttgatatttttattttatttttattgcattatggtcaaacaatacagtctcttaaatacggaggtgttttgactgtggtatcttatcccacgatcacaaggactgatttagcttatttcatggggtgactggctggctcttcgccttgccatttcattcacttctttccaaagtagactgttgaatggaagaggctattttccccaggtggctattttgttttgatatgtaaacttttaaaatgtggctatatatttagtgtggggacccacttaaagcctagagttggtataatgattgttttaagttgaaaattttaagattcaacagacatcaaaataagccttctcagaatttcccttatttgactaaaggcagaaaattctgggaatgttctgctataaatcccctcttaggtgtggtttgactcccagaaaggaaatcaaaagtgaaactatcgtacattccctctctagggtagttttagggccatgaacaagatggaaaagaccacttgcacctgtgttaaaaaaaaaaatcatgattacaaactttcttgtctttgttttcccacaaagccatttgtctttcctatggaaactctcctgttcttcccataaaggtttttctccaccttcgcttttccctattaaattagatatataagctcctaacattagcccttgaatggaccacttcctttgtagacctcatacgcatatgagcaaacttttccttctcttgttaatctgtcctttggcagtttaattcacaagctcctaggtactaaacctaaataggaagaggaaaagttttcccttcccagtattagtttgtgataatatattatgcatttttttggcttaatataaatctatttttgtgaatattctatggatattaacattaattagaaagatataaaattaaatttatatcctttggctttatgtgtagacccacccacatgaaatgcctatgtccctataccctaaattatttggaatgtgcattgtgttaaggcctgagaggtttttgtaattttacttatttagctactttcttgttttttttaagttttagctgtcttaggtaactatgctattttgttcagaaagtttgaagaatgttttattttcatgtaagtagttttccccactctctgactcctgtatggagttttccctttcatatcatcattgcagcccctggctcagtttgggcttaagtgggctattgagctgtccacacagggcacctttactcatcctaccagataagccttgagcaatatgcaatcagctgttgattgaaggccctcagccactatcaaagctgacagggtttatttgcatttttaatgtgattctgagtgctccctctaaaggtaacagaaggataggcttcccttagccttctgcttagcttcctgctttggccatgacagtcttcactttcctttttttctgatcttttgatcttatcctccaaagtatttttttttttttttgcaaggttgtagtccctttctcctccctacacttaggcaagtaactctcatctcagggttgcaggatcttccttctttcctactagtctttccatactttgttatactatgtttgagtcctccttttgaggcttctctaggaatttttgcttaattcctattttgaagtgaaagaactaaaaatgaatctttttggcttttgtctcctggtataacaatctaatttttgcttgatttcttagatgttttttaaaagactggggaagtgtaactgccagtgggttcatcttgcttacttcccagatggagcctatttattaagaaaggggaattgcaataaagagtttaattcacacagtgtagctaatgagagaccaaagttttattattaatcaaattggcctcccccaaaatttggaggcttgaattttgcaaacatagcttggtgggcaggggcatagggtataggtgctgctgatttgttggggatgcagtcacagaagtgtggaaaatggtccttgttttctgagtccacttctgggtggggccatcaggtggccagaaacacagaagtctagaaagacatcttacaagaccaatcttaggttctacaatagtggtgttatttacaggaattattgtggaagttgcaaatcttgcaacctcagaataatggctgacaatcatataactccacctataccttagcacaattcaggttcccatcatactcctaacctggtggtatttcattagttttacaaaagggggttagttcagagaagggctattatcatttaaactatcaactaaatatatcccaaaggaagcttggcccacatacctttccacataaaggacatcttgtcaggtcatggaattttagggttacaaaacatctatcttcatactgaagacttttttagtatttttctaacatttattcattcaatggtattagactgacctaggtttgtcacttatgtctaaatatgtttagattataaacacatttttggccgggcacggtggctcatacctgcaatcccagcactttgggaggctgaggtgggtggatgacctgaggtcaggagttcaagaccagcctggccaacatggtgaaactgtgtctctactaaaaatacaaaaaattagctgggcatggtggcaggcacctgtaatcccagctactcgggaagctgaagcaggagaatcgcttgaacctgggaggaggaggttgcagtgagccgagattgtgccattgcactccagcctgggcaacaagagtgaaactctgtctcaaaaaaaaaaaaaaaaaaaaaaaaaaaaaaagaaacagattataaacatatttttgtctgaatgattaaaatatctttgctattaaacttgtaccttgtaccattacttgtttaaagagttttcctggttattggagattctggattgttgttgttatttccagttttgtagttctgatataagaagttctaaaggaaacacatttaatgacacggacttcttgggaggaatgcagattacaattcctcctttagtgttgacttaaatatcaatgctagctttctgaggcatagtcagtaaaatccagtgccccctagtattattttaattgactatttttctgtttaaacaaaataaaatgaacatttgtcacttttcaagctgatataatgagtacttggtagcaccatactttttttccaactgtgtattaaaaatgtgtgatttaccaattttaaatagcaaacttcacttagttacatacacgttgagaaataatagtgttttgctattctaatgataagaattgttaaataaaactgtgatcatatcataatcagttacagccacaagcagaagttgttcaattcccaccaatctttcaagaaatacttttaataaaatcacataaaatgtatattttcttataaaatcttgcagctttagtgctctttaatcaaatggaatttaaatatagtctttctttcttgttttttctttgacacggagtcttgctctgttgccaggctggagtgcagtggcgcgatctcagctcactgcaacctccaccttctgggttcaagcaattctcctgcttcagcctcccaagtagctgggactacaggtacacaccaccatgtccagctaatttttgtatttttagtagaaaaagggtttcaccatgttggccaggatggtcttgatctcttgaccttgtgatccacccgcctcagcctcccaaagcgctgggattacaggcatgagctaccgtgcccagcctaaatatagtcttccaagttttttttaatttatctttcaaagatggatactaaaatttttctgttttgaaaattatatagtgcataaatcaccctataaatataactgcagtttatttttatctccataatttaaaacaccacataaaaaatttaatgatatgctattatttactaagtcttccaaagtctgaatagaaccctttacttttttgcctattctttattttttttataaatcacataaggaagactattagggaattatttccaaagtccagtgaaaagtgattgaatacaatttaaaagaaaaagtagaatcactgaatatatatattggttcagtagaggatagcataataccaatgcaaagaaaaaaaaaacaattagtttatcttgcatatatcacaattcacaaaacaactctcattcttgaaaatgataaaattatttttaggaatattctttctcatgtaataaatatcactgagcaacttgtcagagccctggcatcgaaagtggttgactcgtggattggtaagaatttaccaacgacagtatatgtttgaaaaagaaagttttattggaaagagagaacgctacagaatagttcagcggggctccttagtaagagaggagtgagtgccctgtggtggatttttccttaggggtatttacagaccctaaagtcagagcttatgagtagtttggacctattagctgcacaggtcatgataaactattacatttgtagacattttgatgtcttaatgtaagcaaggtttgcataattgagtttggatatgcatgcattccagacatgtctatttacttctgaattcttcagataaggagttttgtctctggatggcctgcttgatggtcaccaggtgatcttcactctgctgaaatttgttataacttttatttatttatttttaaatctgtacatgaatgcttacatgatcaaaagttagaaaatgatttaaaaatatctggttttaagcacctaggtgttttccttacttagctcagtgttttttggggggcattttaggagccaaaaaacgaaagtgaaatattttctatcattgcttttgttctattccctaaactatttagaatacaaaatgaagtgtcgatgacataaatatttaatttcagaaaaattggttagaagataaggccttggatttttgtcagctttacacatatgagactgagcctttaaattatattgtttctaagtaaagtgagatgaagtaccaaatcatgagttttatttttttaaaagtggtgaaatacccatttagaaacttacttggtgttcaagcaactttctattctggacaggaagagagcagctggcagagtttggccccctgtggattcccatttcctcccaacttttaactttcactgctctcaaggtgaccagctttttttttaagaggatgattgtggtccctctggagatctccttgctagctgttgtagttctgaatacttatatacaaatgccagtaaaacaatagctatcatatgaccaaaaaaatacattttgaaaatcactttaattccaatgtaagttttataaatttcttattcaaaacaggtatacattttttgaaaagccaggtccatcaatttatgttatttaatagcattctctaaacaattgtttcagagaataaagaatccaatgacttttccaaagagtttgacaggtggtcaataaaattctgtttactattattgaaaccagagcaagatactctgcattttcttcctcagcttttttgaacatgttgacatagctcaggttaagctttctccgtcttataacagaaacgcaactcaagttctgcagaccaagtctgaaagctgcagtattattttgaactatagggcctagaaaaattagttctttaaaaagtcagtcaataactcacaaatggtaagagtaaacacagcacacaggtttaaagtgtctggatttctagaaaaaagtataaaactaaaaaaaaaattacattgaagtaatacatgttttctccaaagcaccaaaaattcatgtatctaagttgattgaaatcagacattaactggatatataaaatccatataatttgaagaggtctgtcagtttttccccacattttgaagagggccatagagacatgagatatctacaaaaactgattgtcttcatcccagctatatgaaatacaattccaaaatgataaatgcagactttgatggttagcaattattatgtagtacttattggatattactataatacagtcatcatgctaagccaattttatttatttattatttatttattataagagccttatgaatcaagtgctattactataccaccactttataaatgagtaaactgaggtttagagtggttcgagtccatgatcttattccatgaattgatctcttaataatacattttgctgccagtagaaaagatcatagactcaataatcatattaacgacaggcaggtgtttttaatgagtgagataaattagctgtagaaaatccagaaaggggagaatatatcaaatctggagtaccattctcattcagaagggtggagcagcaacttaatttcagctgattattgttttgggaataattcagacccttgctttctagaaattttaaagataaagtatgaatctggatttttacattgctgttcaatttttaaatttcagcaaccaattaagaataactatagaccaaataaaacctgaactatagactgaatctagcggagaagaggaaacacaataagagagactattccattcatttcatgttcaaataagtcaacaggcattaagtcatttttaaaactattgctgttttagcagtaaaatgacagagctaggtcatcttctttattgcactgatagttccaccagtcacgattcttagtgttgtctggttgacatactccaaagtctttctaagaaatttacatacaattttgtgagttttttttagttgtattgtcttatctcaaacaagtccccctacccaactttttgctatgttactattattttaaattcaaattttattttagatacaggggatacatatgccataatcctaaataaattaacacaggaataggaaaccaaataccacatgttctcacatagaagtgggagctaaacatttagcacacatggatatcagcatgctatgttattttttaagaaaagtttgacccagttaaaaagcagctatttttaacattccaggacaaaagagtgttgacgtataagctcaaacaatatattaaaacattataatccttaaactaccgcaagaaactaaacaaaaaataaaaattatgtcgaacgtgaaaaacatggagaaatggctctcaatagaattgacgcctttgtgtcaatgccaaatgtggttggtacaaaataatttgctcctcagaatacctctttgaaaaaagactttgctaaaaccaaaaccaccagaaaccaacagcatttttgtgcactttaaaaacagtgtttataatatatctattatatattgcttatataggccttttgtattggtaaatatttttattaaaaaagggggtttcttctaaaaaaaaaaaacttcagccttaattttctttttttttcacagttgtattggcaagaattgaattagcttggtgattcaaaaatgttgtctattggcaaagaaaacatagctactggtaaataggtgcacatttctttatggaaaaattttacctcttgttttcaatcaccagctgaactttttaagagagagagagaatgtgtgtgctatggcccagcttctgcaaatgtacttatatcccaatttaattagtcaatctgtaaatgaagccaagattgaattctgttgctgccacaagtgagacaagccaatataatgaaccacactgagtgagcagccaagcagtgacactgcgtaaaacaagtcttttaaataattccccttttattgacaaccaattatgtttattgcctttattgtaaagaaaaagaggctttatttatttatttttaagaatgctactgcactctggatgatgttcacaaatcctaagttgttttgaaattttccagtcatataagtgaatcatataatccttaaaaagatatttagagttaccttttttttttggcatcaaatggatgaagcaggctctcaaatacagccactgttgacatgtacttcagcatagatcataaaataccaaggtaagaaatatttcaaaaatttgatttcaataaatactgaaataaaatgataaaaatagaattgcctctggtttgctttattataggataaggatgaaaagattatcttgttattaacagaaatggatcagaatatagctggcattcacaattggtgctgatgtttaagaagtaaacatttcacttgggtttcactactaattcataaataaagaatttttattatcatattttcaatgtaatcctcaagaaaaactgaactgggtaactgtaaccatttaaatggttcaagtatataaaatagtaattttagatcatcttggtagaactcacttatggcctatcaacataaaagcattcttggattaactgatgtttatgttatagttgtaccttttttttctatcttcctatattattgagacctgagttggtgtgcctttttaaatatttttctcaacaaatgagtaccagccatgtataatttctttcatttggccgtatttgcaccagttgtggacaacagggagaatctgataagatttctgagctcattctatcatggttatggtggcaagaaacccgatataggtggatagatatgagcacggttatgtttgtcgctgcaataatccctttcctccctaatttgctctgttcccagtgacagaagtgatgtacaatgagggttaacctcgaaaaaacttttcaggattaggctcatagtatgacctgtacaatataaacagaggagtctaaatacaagtttatgttagaggtatatcgcctgtgttgctctatggtcatgattatcattatatgagatttacaaagtaactaatgatatatatcctatttggctaattctaattcataaggttctactaccactaagggtgaagaatacaggcacacttgggagtggagaggcttggatccctgatccagctctgtataagcaaccataaactttggcatttctaccgttaaaatgtagctttgatttctatatacattctttccccataaattgtataatactggataaccaaataagttcatagctttgtgattctgaacttaatctccgttatatctgttgtgtgtcatctcatctaattcagtgaaatgcatttaaagtcatgactacagaaacttttaaccttgtgaaactgatatgctgtaccattttcactatgtgaaagcatgcttctccctattgaagagataccaaggcaaatggggaatctgggataaattaaattcagtctggtttagataacagaacagcatttattaatgccgtgggtttacagaaaagtaataactaacattattgctccctagcaacttctaaaatgaagatcctgaaaaaggctaatataagaaaaaaatctttctttcatgttgccatttacttaccaacatatctgtgcactcatatttcactcattcattcaaatacacaatttattaagcagtatcacctgagtaagatataaatataaatcggttttattattttttgattcctaaattcaaccatgtgatgtcaaatatgcccttttattctcttattaatgtattaggaagatcctatgcttttctcagttaccctatgttattaaactaaaactacagtttcatgttatatttaaacttctttcttttccctttattcagtataatagactcatgtggctttagagtggtgagatagagatgggcatagtccacaaattcacttcttttcctacactagtaccttgtaaaggaagtattatgtggggagacaaggaaagcatggttcttacagagctagtcatcccttgatggcatggagtcttccctggtcctgctctgtcttgatctggtttcacattgggtagttgtctccgacaatgtcatgatctctgcaaaggtgctttattttcttctggtgatttttgagtcttcctggcatcttccaagtcagtgagcattcctctagagaggaataacatcattgcttcgtctcatgggggtttgacactcacggccttgcatggtatgtccaaggcttttgtctaccccctcttacctccaattctctttgtaaggaatctcacaactttaagaaaccctttctgtactcttggaaaaaatttttatgaacaactttactaggggattttagatggggggttctccatgttgtttttccaggcatactatatcatggaagccttagcaggccttctgtcttagctatcttagtggagacacaagtacaaatctgttttcatgtctactcccaagcatcaggggcaacacttccagctccgtaagaatctttcaccatgctccacactattccaacagcaaaccctcagtggacctacaggtttccagttcaacaaacattcatccaaggaataaaaggccaggtttcctttcttctaggtaccccacatcttataagtgattctgttgagatatctctacctcacttgtctttaaaaggaaagggacatactccctgttcttgccagtgggtaagaaagaataacttcttccatcaacatggtgatcccagtgatttctactgaccccttcttaacactttctagccctctttatgatggagacagggaaaaggtgtttgagggaaataaggcttatttgcaatccttgtaggatgtcctcagttagaggtctgccccaaccgtttcttgctctttttagaatttgctgtgagctccattttctaatttcaaggtcaaagaaaagctccattcaacattctgttacctgagattattgagtatttattatacaatgtgctaggcactgtgcttgccatggcagagtttactctgaactcagaagtgttagtactaaggatttctttgtatttccccctgtgagctattaaagtctggtatattaggtttcacatcttgtcatttggcttcattttggggagttcagcaataagagatataaaatccaggataagagatcttgaaacagactcccagagtagatgcttcccactaggatagaaaggaaaaatagaggtcattattcagacaatgtcatttaagtgggagttaatatattttgttggtaaaatagaataatagtattacccattcagggttcagaatgtgataattagataatcaatgtaatattcaggtttcaaaaaagtgtcaactaatactattaaaaactatagaaaatacaaatgggcctgaaagaaaactcaaaaatatgggtggaactcaaaacatatcaatacaccagatttcctatatttagttgacagccctcttttactacacatgtggaatagtttccagggttctatctggttgtaaagatcttagttttcatttgttgttgggtttttactagcaacagtttaggtaagctaatcctaggaagaagagttgtgtgaatgtgtatatgtgcatgtagatgtctatgtgtgcagacatgtgtgcaagtgtgcagagatgtgcatgtccaaacacacgtgtgcacatttgtgtgtgtatgcactcatacatgctttggcaaaaagttgtaaaatctatcctcattgccctatgagaactgaaagattgacgtccatctagtctctgtgctttgggagttgagatattagaggaagtcctgtccacttcttgtcatatccacaattaaattactgtttatcacttttaaaccaaagatttaaaaatatttcactagaaagaaattaacgtggtggtctaaattgcttgatctattcataagctttacttgcattttagagttactcctgtaaggaaaaaaggctattttaagagtttttttcaggcagagaaaaatttacaaatatttactgaaagccaattatgggtgagacactgtgtttagtgctgtatttagacaagtcctttggcattaaatctttaaaagtgggttttagaatattaatatttttacaattgtggcatgtttggagattataattttccatgtcccctagacttatgcttttacctgcagtcaaataatccttaattttttctgtggcctttgaatgttttggaactaaggaagctaaaaagccttaatgagacattttaatggctattaaaaatattaattgtaatccgagcactttgagaggctgaggcgggcggattacctgagatcgggagttcaagaccagcctgaccaacatggagaaactccatatctactaaaaatacaaaatcagctgggtgtggtggcacatgcctgtaatcccagctacttcggaggctgaggcaggagaatcacttgaacctgggaggcagaggtttcagtgagccaagatcgtgccatcgcaccccagcctgggcaacaagagtgaaactccgtctccaaatcaatcagtcaatctacagataaagagaacatgatactaaatatatgaatttttccccctttaatcatcatagaccactgaactctgaggtcctcatgtaagctaagatgccagactgggagttcacagcctgaagaaaaacaattgagaggtctgagggtcagttatagggaaacagtggtgctaagggtattcttgaatatctttaatgttctactaccattacttacttttacataataaaaacagtgacatttcacattatacaataattatccaaatagaaattcacattagctgatttcaaagaagcactttagtatttacaaagatgattgcagggtataattgaatatgctgtagatatttgaataataaccatttttttctgttcaaattcatatatgatattttattttcctgttataccagtatttttacaaccaatttaaaagataccatatagtttgaatcaggaccatagaaagtagagacacattttagtttctgatgtcctgctacattttaatatagatttataattctcaaaaggctttcatatttatctcacttgattttcacaagaatcatatgaagtgtgaagcactttttattatgatcatttcaaggttggagaaaggaaggcttaacaaagctgtattgtctgcttgaggccatgaagtgaattattaccattgttcaccatagatttttaaaataaaaatatttagcagatggcaactaccattcattgacaattattttacaaacatagttctaggctcacttaatttgttaacctaattaacaatcacaacattcctcatataatacattttatctttttcatttatgaattagaaaagagtttgagaactgtaataatttgtatgatataagccaatctatttgtaatgaagaaacatgaaaacatatccattttatgttctgtagttttcaagaaaattgacatttcacactattatgtgaatggaggaaaaatctctaatttttaacaatgttaaaattttattttaaaaaggcaagttgcttccactattttaaatttaagtttgtagaaggtagacaagataaatgaaaatggctataaaacatttctaaaattaacattccaattcagtaaatttagttttgttttcttttttccattttctttaccccaactttgttctttgtcttcccgtttttcctgtttctactcctttttctctttttcttactccccctctttgaagtggcatccgttcacagatacttgcttaatagaagcttttggtaattggtagagaaaatgataggtattagagaaacttcaaaagtttcagcatttgaaaattattattttgtcagtgcacagagatttttgtttgttttaaaaatttcatgaaagaacatagtcttctgagtgagcataaattaccatagattctccatttgttgttaaaatgtcaactttgagcagaattcaatgattaactctgtaatcatgtaaaattaaaaaatcaagaaacatgtattatatacagaaacaaatagctcttaattactctacagacatttattaagagccacagtgtgtcagctgctatgctaggagattcaggattttaatactttaccaatgtgcctatcctcaaaaagcgactagcaaggaacggctcgcctctttaaggaatatgtgtttaatctacagaaattttctgttggactgttggcaatgcaggaccaactttaatctctttctgaccttacttcatgtgacctgtcattaactacacactttctacaggcctccggaagtgtatttctttttacaggtcttatttcataagacaaagtacatattgatctaaagatatggtagtatgttatcaaaaacaaagcctaattttttttacatttaaaatgttacttgaccatacaactaatcttgttcctgaagatgtatttatttattttctctctctctctctctctctctctctctctctctctctctctctctctctctctctctctccccctctccccgtctttgtcattcaggctagggtgcagtggcatgttctcggctcactgcaacctccgcctcccaggtgtgatgcataatcacagataggtgtgttacataatttagcaattcaagcgattctcctgcctcagcctccccagtagctgggattacaggcatgcatcatcatcccgggataatttttgtattttttgtagagacggggtttcaccatgttggccaggctggtcttgaactcctgaccgccagtgatcctcctgcttcagcctcccgaagtgctgggattacaggagtgagccactgcgcctggccgaggatttacagttaataaaaggtttttgaaagggaaaaagaagaagcacactcttttgtgtaaatacactctctgatttggtgtttgtaatgcctttgttcttatacaaagtttaataacctttatcctaacctaatttattataacatatttggcatggggaagtataataggaaagaaatatttagcgttcaagatccaagtctaaattgaattctcatcttcaaatagcacagaaaatgatcagtaaataaatgtctagcagttactgacatttatgatatatatgaatatatattaatatataaatcatgaaaaaaatgagaatacggtatagtagaatagtttggggaatgtaaaagatacaattgtttgatatctcttattgaccaaatagtcctcctccatctgggaagaatgtactgatgtttgcaggccttctcatgagcagtgcacatgaatatcagatggaggagggaaccaatacgcagacacctgcctagccagcaacacctgctgaaacaagcaagaccaaagggcagctggatggcacaggcaaatcacattcatgttgagaacaggtgctcttgttgccacttgaaaacctgtcaaagagagttcttaattgtaccatagtacaactaggatatatataaaaaaataataataataactctatgtactttaggttaagaattgaaattgaacagaactaaatataatcaagagagtaaagataagatagaaatgaaagacactagtgaaagcataccacaagcagaattccttgagtttcctctagaaaaaaaaaaattaaattctaggggaacttaatgtatgttgtatattttttctatcatgtccaaatatgacaatatcttcattataaacttcattacgattactaccctttgcaaaaagcttgctttttggtaactcacattgtttctctaaagagaacctatcacatggcttacttttagggctgacatcttataagatctgctcaaagcttttcctccaaaaaactgcctctttctcttatggtgggagtctgtgcattttgtgctgctataacagataacctgggactgggtaatttttaataaatagaaatttacttctcacagctctggaggctgaaaaatccaagattgaagggccatcgtctagtgaggtgcttcttgctgtgtcatcatgagataaaaagcacagagagagcaattgtaaaagggggctaaattctgcctttcacaatcaattcacttttgcaataatggcattcattcattcactttaccctcttggcctagtcacctctcactaggccccactctctcaacactgttgcactggggatcaaactttcaacacatgtttttggggggacacattcaaaccgtaacaggggttgtcagtcattcttcaccatagttgttttgcaattgtttccgatttcattgaatggcttgaatctgagcttaactttatccttagcgaatgcttctatccttttaaacttaaaattcttccttgagtttctagacaacagctgtatggcctgagaggctgaccctattgtaatgaagttcttcctcagcttagatcagaacaacagagagagaggtgtgatgcataatttagcaatgccacatcttagagaagaatattctttagcccagaaaggtcagtgggaaaggttgaatggttttaattacttattttgttattatgaacacaggtcagtaacatatgccgaagatctagctgctggtctcctgctcgtgtagctttaagtatgtcacttaaaatcctttgtgccctacctcatttcaaaaatttggaagccggatgggaatacagttttgctctaagacccccttaaacactaaaattagatggtttaaagctgaaagtttaaacattttatttaataaacatatttttaaataatatagttataaggtttgggtaagaaaattgttttcaaattttaaggttaaaatactatgtttatatttagtgccatttaatattttagatttttagaataaacaaaatgtcaatttaaaacttgtttaaagaatatttagtacttagaagtctcctgatccatcacataggtatgagaatgtgtgtaaatagccatagacctttataatgcaccttattgccttctctttattactttttcctttgaggatcttgttaagttcaattcttactatctgtatctttttctctagaaatatatcgtaatgaaacttttgaaatattaataataaattggctgggcatggtggctcatatctgtaatcccagcattttgggaggctaaggcgggcggatcacttgaggtcaggcattggaaaccagcctggctaatgtggtgaaacgctgtctctactaaaaatacaaaaaaattagccaggcatggtggtgggcaactgtaatcccagctacttgggaggctgagacaggagaattgattgaacccggggggtggaggttgcagtgagcagagattgcgtcactgcactccagcctggacgacaaagcaactctgtcaaaaaaaaattgttgttttttttttcagtcacagatttatctattttactcacaccctcagctctcttactcatctttttctttattctattctgttcagacaacaacaaacttggttaaatctaactctccacagctctgtgtttgcacagcaggcagttaatttccaacagaggaaggaacacacaaacaaacagcaagcaaaacacaacagtgtttcactgttctcattttaaattgctaaactttattctccaagtggacaatattatagcccagaaattctactatatattttattccaatctgttattccttctacgctatactattttacaccattccttctcaatccttcacctccttgacacattttattctcctttgatgacctgcccctattatttcagtgagaaaatacgtgcaacagacgaggacttccatgtgcaaccacctcaattgaacataaaatattttgctttcattcctgttaccttgagtgcactctccaggctcctatctaaagccagtttcttcctttatccatgagtttccttctactctctctggctacttaaaaatataattatctttttttactgcattatttgttcctttctctatttatcattcccatagatgactatcgtgccataatttcccctaatgtgttaacaaaaaaaaaacaacaaaaaagtcttgactccatattcccttcctctccagcctctttgttttttccttctttgtgtcacagaaatattcattacacagactatctatactcaatgccaatttctcctatccagttctctcctaaaccactgaaatcattattttcctcccctgattctccaatgcaactactcttatcgaggttaacaataagctgagtatgtctaaatacaataatccattttcatttcacatctcgaacgcttgaactctcatgaacatttgtcacagttgatcactctctctcctccttgaaacacttccttcacttgacttcagggaccccacttgatcctggccctgtttctatctcattagctgtaccatcacagcttcctgtgtggttttattttcttttattacatccatcactggcaaactgtgaaatattttaggttcatccttcattaacactattctgtctactattcatctttaggtgaacccatctagtcttatggctttaaataacagctataggtgattacttcctacttttatcttatacctggacctcttccctgactttcagatgtgtacatccaaacatatagtcaacatttctatttggatatttaacaggcataacaaacttaataagtccaaattggaactcccctgctcagtaacagtaactcattgtcatgatgtcagccaaaacccttgattcctctctttcttacatccaataaatcagcaaattatgctcaccataacttcaaaatatacagtgtccaatgggctaccctcattacctataactctttggttgaagccatcattatctttttgccagcagtaaatcagcacttactattgtcaactggtttttggaaactaagactttaagccaaacagcaacatataacaaaacaaattttgtcataagctgattgatataaacaagagttagcatagcatatttctggttacaaaaatatcaacaaacttctaaataaagattccaaatacttctcatattaaacattgaaataaatgtgagctatacatacatttatgaaaagttaataaaaagatatttacccaatttttggtgattcagtgagtggcagcagtcatagtggtgatgggttaaatcaaagaataaatatttgcaaagtgaaaactgtaagaagtacctcctaccaccacagagcccaacaacagtcacaaatatggtggccttgctgtgtacttttgcttctcattgtttattgtctgacatttgtatgattatcatagacttttcagatgtttattttataataatttgtattccttcattcattttccaacttccttattccagctcagtgtttcaggtggctggagcctatcccagcagctcagggcccaaggcaggacccaaacctggacaggttgccatcccctcacaggatgcactcagacacacccacagtcactcagacttgggtaatttagacatgccaagtcacctcacgtgcacaactttggaatgtgggaggaaacgagtccctggagaaaatcactgtgcacgtggagaggatgtgaaaactccacacagtcagtggccccagccgggaagcaatgttttttgttgttgttgttgtttttgttttttatcattattttaacaaaatgacactgaataatattattaatattttgatagcctcttgtctccctaacaccacccttgatccttttgaaacgtaagtaaatcacttctgtttgtcacttctctactcaaaaccttccaatagctctctgttttcattcagagcaaaagccaaagtccttcaaatggcctacaaatccctccattactggctttgctctctctctctctctttatctgatctttttttatactcttctattccatcttcattgtgtgggaaacacaaacaaattgagattcctgatttgagaagaaaatgataattgaccaaacttcatgtatccagcaactctagttaactactgtcctccagacataattgacttgcctttttttactttaaaaattaatgttatcagaaactagaaataatacaattgaaaacactagaaatacaaccttttatcatttcttcctacatttcatctttgatatttgcagtcaaatcttcttatcagtacaagtagttcatatgtcaaatatgtgtcatgatggcatgaataattcagcctacactcactccacctcctacccctagatactaataaaaactgaatgaacctttaaaaaaagtgactgagaagcagcttcaaaacatttcatttaatgttttagtaaagtaagaacttcattaaagtagatgaagttccttctcatggacatgtagatcactttgcatttaatgagttctaacctgacataaaatagaagttgaatttcaacttactttcatgccaggaatcatcaaatctataaaatctgcataagagaaatgtagaatgttgaaactgttggataaagacttctgacatttctatgctaaagatatttttcaaaaagctagcatcttgtcacggttctagctctttggtaataataaactacaatttagagcaagaaaatagttcattgcctgtaggttttataagaagttcaattttatacctttacaaaacttattctgcttacagaagtttttcaatacaagaaaggacagaaatttccagatctgttcatgattttagctttcatccagtatttatagccacttagtcatagtaatctttttgcttttatttttactatttttctataatcattaaattgatagattattattcttgataaactaaccacatatgaatttaggagattttctgaaaaaggatgaaacgtatatgcaaatcaatcaacactaaccccctgttgggttcttggccaacattacaaatcaagtatgtcctgctggccctgaagaaggtcccaagagcctttccacacaggaccctaatggggaggagtgcactcccagttgattacacttgggcacctaatttgtatccctattctgaattcttccttaggatatcctgattagaagaatataacccttttcactatcatattcttggaggcactacaggtgtttcaaaaatgtccctttgctgttatcacttctttggtgaacattgacccaacttccaactgccagcacctattcttctttggcgaagcactgtctcttacagctgtagactcctttgctgccctgtggcagcccagatatggtagacaattaaccctaagagcttccctttactggttcgatgggaggtagtatataaatatcccaactccctcattctttaactgagataattctgaggtgtgttttttacccagattcctaaagtttccccagtgggatgcaccccagttatgcacagtggtagcatgctaaacctagatccaattcagaatataaaactaatataatacttacagaatgggaagcttataattttcctgttaaacacaattttcatttttctggattcagaatgatttacatgaacagctttatgttacattttctcagatactatccaaaatagtatattttcattgctaagtttttaattactctccgatacagatctagataacaaaagaatatatctgccaaatattggcattgggaaattcagaattggtcctaacaattacacaaattttgcctggtggaaaaggaatggaatttgatagtaaaatgaggtgaactcatgcactgagagagaagaattgaaatcataaaaaacaatacgaagactttagcctccagaaataagagcccgctgtgcctgaagggtggctgtgtatattgttgctgctattagtcttctattcaaactataatggatttgaggctacacatggctgcgtaacattctaaggatacccagatgttgaaagaatatttccaggtagtcacttaaaatgttggaagtcttttatgttactccattttctctgagactatctataaaagtcatgaaaaagctttataatactgataaagatataacatgtatgactttttgtttgtttttatttttttaaggtccagaaaaaccccttttatgttatctcagagggctatgcatcaagctgctcacagcccttgggtgttatcttctagcataagttgcaaaggcaaaacataatatcctgagccattttgacatcgatttaaaggaccaataagtttattttcccatttgaagcaccctagtgctgttttctctttctgacagtgcctgagacaaggtcagaaaccatggtttcgatttaccttgcagtttccagcagcacctattatagtgttttccacagagtaggcactcaataaatgttgccaactgacaaaggcaaatgatagtagtcatcctatggcatatgacctcttggaggaaatataagtgcctcacccgtatcataaatatctgcctgtggccccgaacacacaaaagatttttagctgccacagccacgtttcaggtgtgtttctctggtaaatctcctggtctcaagccgtcattttcaagcaggactttgaaaaaaatgtgacgttagaacagtacattttccttaagtttttatttcactttttagggtttgaaaaggttcaataaacctgcttctataaagaaagagactcattgagtagaagtgaaattgatgtaattaaagaaataggcaaatcacaagggaaagctcttctttaggaaataatgctttcaataaatttctaagaaatttagatgtaaaaaatcattacttcgtgcaataagagtcccttccaatacttcttactggattatattaggatttctattgtacataactaacaaaattcaaacactgctacctaaagccaaattcccatctatgtaaacatgttcaaaaaaaaagaatgtctttttgtacccttcttccccctaccaggaaagcagtttttggaatagaaaaataactggatttagaatagaaaaccacatttaagttgtgctctattccatattatttcattttggacaaatcacttaatttcttctagcttcacttttcttaagaattataatgtctaacttataaaaagcttgagacaacaaatgaggcatatgtgaaaaggcttcagcatctcatccacagtagtagctctgtaaactagtgtctgaagttctgcatggtcagtcattctctgcatttcgcagacacctctagctcattctaaattgatccggcaaactcctacttgcccttcaagtttccactcgagcatcatgctgtaaagttttccttgatttcctctagcagatgttaggaatctcccgtttagagccatgttcatcttgagtactaattgtttgtttgaatgaatgatctcttaatactgtctgacctccttgctggcagaactgtgtgttgttttcacctgtctagcttttgcttattgtacattgctgtctcctagtaggtgctgtgtgaatatttggaggttggattaacctgaagtaggtgaatatgcccccatctgcgtaaaaatgcttgtaaattttgcactaagatattgaaagtaaccattacataggtgggatacatctgttttaggggttctaacctgtatggagagatgttccctcctgacagaaagtcttggtaggaccgccatgtattcccttgctgctttctgctccaggtccgataggctgacttggagatgggaagaaagggagcacaagacggaccacaaatcagaaggaatgaacatcatcctagtacagtatgtcctgggtaccagcataatactcactagtatttctgaatgaatagacttcagtctactttatttacaaggaatgaaagtttggagacaatcaactggtttcatcaactctagtccacattctatttctctgaaactcagattgatgaatctacattgctgccgccacaggcctatatttaccatcagtgctatgtaagtgggatgcctactttctgcaaacactttttttctagcccatttcaacaaccaccaatatgttccttctcatttccacaagtattatgtattgttggcagcaatggaaccattggtgtgcagagcaataagcaatcttctggtgattggtatgtttgataccatcctgctttgtgctgaaggaacttccattggctggcttctgagggtgtctgtgcatgaagagatggattgaatcaaatgggctggttcatcgttggtttcccttgcaggaccactgagcaatgtggtgatcctcatatgacctatttgtgcagactttttctttgtattgcttttcttttgttcttgactgacacacacacacacacacacacacacacacacacacacacaaatattatactaacctccttaaaatatcctcattagttcaattcagttaaatgtttttatttttaccttttaaatatatgcttattgtattgggccttgtgttatgtaaccaaaacttaaaaggtccaggaactctaactgatccaattttgaacaatttacacatcaaaaaggataatgatagtaatgggttatgacacattaatagaaagagactcattgagtagaagtgaaattaatgtaattaaagaaataggcaaatcacaaggaaaagctcttctttaggaaataatgctttcaataaatttctaagaaatttagatgtagaaaatcattacttccaattgtcaatatatatgcttttgatccagtcaagaaacactaatacatgctgaaatcaatgggtgacatgttctaaaaaatagagaacgttcatatagtcgcaaaatatcactccacagatggcttattaactaatataagggaaagttacctttacagaggcaaatctggataatagtcagttaagcaagtgatcaaaattaacgtcaccaattagagaacaagcagacctgatgcttcctctggcatgcatgaaaactaccaatattgcctgtgtagtatcaccaaatatgtaacccaaatctaaccacgatgaaacaaaaagacaattctatatccttgggcattttatctagcctggaattcttcaaaggtcaatgtctgcaaggaatggtagggaaactattctagattaaaataggtgaaagagatgaaaaacaactgcgatgagtgattcttcattaaaacttgaattaaaaactacaataaaagacaaatttgagcatagactgtatattaggcaatgctattgtatccatattaagattattggttgtcataatggtaacacggttatgtattagtttgctaggtctgccataacagaataccacagacttggtggcttaaacaacagaaattcgttttgtcacggttctgaaggctgctggtctcagatcaagatgttagcaggtttggtttcttgaggcctctctctttctttggctggcagatgatcaccttctcgccatgtcctcacgtggtctttcctcggtgtgtgcattcctgatgcctgtctgtgggtcctcatttcctcttctcacaaggacatcagtctaattagattggtgtgcagactaatgtcctcattttaactatttcctctttaaagtcctattttcaaatacagtcacattctgaggtacaaacagttaaggtttcaacacacaaattttggagagacaaagttcagtctataagaggttacattataaaactcttctgttctttagcagacacatgaggtgaagtatgaagtttgcaatttattttaaaaggttcaacaggaaaaaaatgtttgtctatatatgtgtataataaacacaaacacagtttttctcccttcccccaccccatttctctttctctcctctttacctctccctaccttctctcttagggcaacattttaacaattggtgagtctagaaaaaaggtgttccttgaatttaaggtttgaaaactttcagtataataaattggggggaaaatgcaagaaacataaaacatggctctactccataacaagcttttatttaagaaagagaggccgggcgcggtggctcacgcctgtaatcccagcactttgggaggccgaggcgggcggatcacgaggtcaggagatcgagaccatcctggctaacacggtgaaaccccgtctctactaaaaatacaaaaaattagccgggcgtggtgatgggcacctgtagtcccagctactcaggaggctgaggcaggagaatggcgtgaacccgggaagcggagcttgcagtgagccgagatcgcaccactgcactccagtctgggggacagagcgagactccgtctgaaaaaaaaaaaaaaagaaacagaagtatctatggacaagactcacacaaaatgataaacgatgaaataaagataggtacattttacccccacaaaaggaatctttttatttactctccttctgaatctgagaccacaacaaagtataaattgtactataacatgcaacaacaaaatataattggtagaagtttgccatttctctatggtttattacttacactttcaatttaacatacattgtcagtgcaataaaaatgcttttaaataatgttccttaacatttttgcttgttctgaaattcatttggcatatctagactcctcataagataatgggaatgcgcacactgggtgaaacttctgtaccctctaaccaattctgtatcaaaaggtacaatcattttccataaaaacatgtttttaaagttagacaccaatttttcttgtgatatttatgaatcaggtatccatgaacagatctatttaattttccagcttttaataataataaaaacattttttcaatgctaagatttttattcaaatgccaggtactctactaagaactgcttatctatttacttgtttaatcctcacaccaaccgtataaaagtattgttattttctctattttgcagataaggtaatagaaccacagaaaggttaagtaacttattcccagctgatacatgttagaaccaggtttttaataaaaatagttatcttagttcattttctgttgcttttaatagaattcctgaaactggttataaagaaacaaaatgtatttcttacagttctgaatgaaaactgtgaagtccaaggtcggggggtgaatctggtgagggccctcttgccaatgaggactcgctgcagagtcctgaggtggcacagggcatcagatggtaagggggctgaacactaactctggtctctttttctcttctaataaagtcaccagtcccactcctgtgataacccattaatccattaacctattaatccgttaatccataaatggattaatccacttacgaaagcagagctcttatgacccaatcacctctcaaaggcatcaccttttaacatcgccacattggtaattaagtttttaacatgagtttcagaggggacaaatattcaaaccatgacagtagtttttgccttaagcccgtaaatttaaccattatgctatgctgcatctcttagggtaaagtaaaaactttatcttatttagtactgtgctattcactgagcaaagttctttttttttttttttaatcatccctgttccttcttcattttacctccattcattttaccacagtctgaatattaaatatgttaagttttagctaacatttttatgccttctccatgttttctttagacttgtttaattgctagaatactacttctcaaacaacagtaatacaaattttattatatttttagatataggaaatgtataaccaagagtttaaatagatgaaagattcatggagactaaagctattaatagaaatggtttttgctattcaaatatttttataagaatattcttccacctttctcccattttgaacaattggagacttcttgattcaaaatctccaaagaaataatttgattagcttggatcattagttaatgcatagggcatatatttgttactcttgggtcaggtgcatattcttgattggttgcttgtgatcaaaggtggtggttggggagaatcagaatgggatcacataacataaaatatggccactttggcccatgctcattacagggtgaagatggtcacaatgagttgtgcctggtagtgtctattaaaatgcaatggttttattgcttttattcatagccattttttaacctttgtccctacatgttcagaatcacaaacattggattgcatttctataagaaaaacacacctgtctaccccagtaataccctatattctacccttactgccacacctgatcatggattatggtaaagccttcagtgaggtttattacagctttctaaaagctctataactagaagtaaacatagcactccacttaacaaattctccacgataagagttacatgggtaagataatattttccattttgttctaatactcctgttaattattccctagctgttttggccactgcagcacattaggctgatgtcctcagagagtcatgtattctgatcatagtcttcacaaaccaggtagaataaagatagtaagatgagatcacctgtgtggaccaactgagtaagtaataagagaagagcccagcttttatccaaatcattggagttcgttccctaaatgcattaccttaaacttgctcatttgaacctcacatgacatttgtctgccaagctatggcctcttgagattttcctacagtttatgcacattgacttggcatttcactactcttttagtaaaagcttagtatctttgcataacttggagattctcagtgtgctatttcttttcaattatttattcaaaaattaaaataagaattgtcttggaatggagctatagagactttctctttttcatttcacacagagaactgttcctttatcttttttcctttgtcatgactagatcatatttttattgagacaaaaaggtaattttaatatagaatttcattaaaatctttataaaaaacattgacaatactgtatctattggtaaccttttatttggaaaatccgtttgtattttctcaaagagctctccacagattcagtttataggtattgtctggcaaatctgtgaaaaattctgagaatcttggtggcacagagttggacgtttctcagcttttatcatcagtacccagcaatgggcttgtgtgttactagagacagctcagttccattaaagttctactgtgcctcttagcagtatctcactttttcttctgtagcctaatttttctattaatagagtttattggctaatttaatatggaaatgatactcaccaagctatttttccctacctaccacccaccgtaggaatcaatctttttgaggcaagttcttattcctccagtaaactgacatttatcccttgaaacctgtatatataaaattacctttattgcctatcatcacccccaactgttacttagaaagtcttgcaagaaagagcaccctatgaaacacgaagtgcgtaagagaggaaggagggaaacatgttcacactgggtgtcttctacatgctaaacactgcatctcatttaattcattcaacctcattcttaggcattattcttttttaaattttatgaataaaaaatctggggctcagaagtgaagtgtagcagttactcctcatccacaggggatacagcccaggacccccagaggatgccttaaaatcacagatagtatcaaaccctgtatattcaaattgtgtatttctaatacaaaaatctgagacctgaactgttccagaatcccaaacattttaagcatcaacacgatattcaaagcaaatgctctgctgggtgcagtggttcatgcctatagtcccagcattttgggaggccaagacaggaggagtgcttgagctccagagttcacaactggcctgggaaacatggcaaaaccccatcactacaaaaattacaaaaatttgtctggcatgatggtgtgtgcctgtggttctagctacctgagaggactaaggggtgggcagcctatacaaggtgggtatgctggagaaagggaagcttcacatcccaggcaggtaagagcaggatggttatcacactgctaacaatggtctgcagtttaaaacttatgaagtttatttctataattttctgtttaatatctgtggactgcagttgaccataggtaactgaaatctccaaaagtgaaatcaaggatatgggcgtactactgtagcttcctcagaatgaaatagagacagagttgaaattaaaacgcaggtcaatctgacggtgtcttttgtatgcaccatcgtttaccaagcctgacatgtacagtgcctaacaaaatggatgctcaataagtatttgatgaatgaaaaaataaatagctgtctctgaagttttttacactacttttgcatatgctaccacgtttgttcaaggagttaagtcgtaatgtcaaggttaatcagaaataaaatattatttacttttaagacaggaaaagcaggttatgaaacaaaataatattaaggagctaaagataggctcacagggctggaaccaaaactatgaggatgcagaaaaaacagaaccagccactaagaagcaaaatcagtaagattttgctaactacataaagttaggaataccagacagcagaacttggaatttcagagaaaacaccaaagcatgagcaaacaaatcaaggcatgaacagcaaatgcctgccagagagggataaacctaggatccccaaaagtctgcttgccatatcctcccaccattaagggcttcttgatcaatttctatgtgcccaatctatttgctttccaatagggctttatatcctgaatgtgagctgatcatgattccaaaagagtgagctctatttagcatatagcttatattgaaataaacgatttttgtcaaactatttccttttgacactagacacgtattcgtggagcatattggcataaaaatttagacatactgatattgaacgagtcctttaaaaattggacatgatttatatctaggattattccacaaagattatagtccttgctctcaaattgcttagaatctaatgctggattcaaaacgatttactttcaatggcaaaaccacaattacttttgcaccaacctaatagtatacctcatgatcaatgagatcatctttgacgaagtttttacatagtcttcataaaattaattttcctgaatccagtgcactaacattatttattaatgattatgaaaatttgtatacagactagtgtaagttctaactgaaatagtgctgtctttgaaaatttgatcatatctgttgatgaaaagagagaaggaagggaaggaaggaaactaaagattaaggcttttcagagcattattgcttgcaggattattatagtgtgctcaaatataaaaggcttgtgagtctgttgtgctcactttcagttagcaattttgtagcactttacttgggtgtgctattatccttatttacatatgtaggaaaactgatgaataatgcacatgcatcaattaacctttcacagtctctcagcacattagagctctgcctacagttacttcagtggtcccagtacttcagtagaaactcaaaagtgcagtgttgttattgctgtcatttgtgtttattagatacagaaaatgttttgtgtgctatagagacaactgactccttttcccggagctcttaccttctaactggaaaagaaagacaggaagtctgaatactgtttttgtttgtttgtttgttttgttttgttttttatacttgcaaatgatggtcaaaattcagtgtaaagatagaactataagaaagtgtgggtttataagtacatgatactatacagaacagaaaaatattgggaggaaattgagtatagtacattttcatacattaagagacctggagttttaaaccaaaccctgtaattacttatcagcatgatcctgggcaaagcactttatctccctaggtctctattatactttaataatctcactatccaagatggagaaaagagaatttatcatggtaatatagagggcaacattaactcagagtttattttcatttgctacaattagcactacaatttgagttcttttttttaattgacagcattgtttgcagtctttgtttaccatttgtaaattctggttagtagacccactattgatataatacttaaaagcagccttaacacattgcctgggacaactcaaaggttatatatgagcaaggagaaggagaacacttctttcttcatgcttgcttcatttctctttctctttctctctccctcttggcaggctttttctgttgcacttacacatacctcagatacagtgaccgatgcccttgctttatatgtctgttcaagccatcaaccacttccagctttctgtgtcacagttttaaaaacctaagtcaaataagctgattgactcagtccaactaatgtattagatgccacagggcaagccattcaccactggtctaattagctaggagaaggaggcaggggtggaaggttctgccatgtcaacgaagctggactgcaggactgaaattctgtgggagaaagaagggcttttttcttaaggaaaaaaaaaatgaactggacagatattctaaactgaaatttcaaaccatagcattttccattttacaaataatgccaatgttagacactgcttactaggttcatgacagataatacaatttatttagaatggcctcaatacacttattgacagtagaacatttgacttctgtttttcttgtagtgatggtaggtgttccagttaccatttgcctcaaccatgaatatttataaaatgagtagtttttagttgtgttagaaaacttcacccaaataagctttaaaaaaaaggaaatttaatggctcaaatttcatttgggtccaatagttaaaaaaaaaaaaaaaattcctacctgaagctctcaagttctgagatagactcagattggagttttacccaaatcaagtagacagaaactggcagagaagtggtctccaaaagaattttggatactgtattagtcaaaattctatcagggaaacagagccagtaagatatataaatatagagagatttcttttaagaaattgccttaggcacttgtgagtctggctagttagattgaaatctgtagggcaggcaatccggaagggaaggctggaactctcaggcaagagctgatgcggtaatccacaggtggaacttcttcctcgggggaaatcacagttctgctcttaaattcttttaattgattaaatcaggtccaccaaagtattgaagataatcatctttacttaaaggcagccgactatagacacgaagtaccctcaaaacagcacctagattagtgtttgagtaactgtggaccacaccttgccaaattaacacataaactgaatatcatagaacctgatattagaaaaaataaagacatgaagactgagcagcaaacaataatctaagacctttacaggaagaattctaatccaagtgtgatcgaaacaatctgttttctttgaaaaactaattggcctatatgtaataaattgcaaaaattgggacaaaataccagtattgcatagcctactttttgtttgtttgtttgtttttgtttttgtttgttttttagttggagtctcactcagtggcccaggctggagtgcagtggcacaatctcagctcactgcaacctccacttcctgggttctagtgattcttctgcctcagcctcccgagtagctgcgactagaggcacacgctgccacgcctggctaatttttaaaatatttttagtaaagccggggtttcaccatattggccaggctggtctcgaactcctggcctcgtgatctgcccacctcggcctcccaaagtgctgggattacaggcttgagccaccacacccagcctagcctactattttaaattctttgattatgagactaacaagagcttgttaccagacattgcatccacctatcaatcaattaacaatatgcagagctactcatctcagtcatccctgagtattcataaattcaaaagcatctttatcctcaatgatcttgttttgtattttctctagaggtggaggccaggtgctttagaattccctgttgtagtctcagaacctagggtctagttttctggaaagaaattaataaacagccagggaagagagggctggttaaaaaatgtttctaatattttgctattattcataaggttacagtaaataacttagtgtatgtgctgtttcttatttgttaagatgcatcctcaggttgaattttagaaacaagaattgctggatcaaatagtaaatgaatattttatattgttagatactgccaaatttcccaccacagtgattataggaattggagatgtcagcaagctcccctggtgattattatacacaataaagtttaagaatcactattttagagcatggacatttaccttttcaagtattaatcctcttgccagaaaaatgcccgtgtaggaatatataattgctggcatacctgccaacacagccctacacaactggttgttgatggaacccctgaagctcatcctggtcaagaaaccctggcctagaagcatctgcaattatcaaaatgcatgttttgccagtggagtgaggacagttgtttcccttcaccagcttcatttggcctttttagtcttaaacacttaacttgaggttgatactgcattcctgcctaaaactaaaccaacaaatttagataaaaccatcataaagaaagtattgctttacagaacttttgccttacttttttctaagtacatctgcccctcacagcaaggacagtgagcactgaacaaagaaatcttgatctttctacaatggatttaatctgtataatcctatgattttatcatcactgcaatattattgcacaatgtgttccaacatcaaaatgagatgtgtacacaagtataaacaatgaatactgtaaaagaaagctgtgctgtagttaaagtttcatttttcaacactgttttcctccatttagtaggaatttgaaatagaaatggacagttcagctaactggtaattagcatagcagtgaaccaggtttgttcagcagtccacaacttcgtggatacttaccttagtcacttttgagacagccatctgtgttatttcagctcagaacaatgcccttacaagccaataggacttccttaagtgcagaatcaggttacccacctctgtatatctcaaagagcaacttttgaattctaatatattacatcaaatactttactgttccacatgaatcacgtatattgagcatgagcttttcagtactggtatcctgaaaactgattcctgaaggaatgctaaaatagcactgcccttggtcatgaaaatatgccaaaacataaactccattctttgtattaaatggaatgacaccttgagatcttataaaacaggtagacttattgggaaaaatatgaaagaacactaagttaaaatatagtatgtgaaaattaatattatattggaatgctgtttttactcaattgaactctttatctctattcagttttaattaggaagtcctactgactcagactccaaattattttttgaatctctcttctcttttccatttctactttctacattagtgcataactaccaaactggtatctccctatccgtcacccaacacttttaatccatcctcctcccaggggacagtattatattcttaaaattcaggttgcttacataaagtaaacaaaggagcaaaacttgtgctagatttgagagccaatctaacccttttcggaatacatccgagttctgttatagtctgatatcataggtaaaatcaagtgaatattgaagaaatgtcattaaagatgaaaattggctagatacaggaatactcaaatctaaccctgaactaatcactactccttacaagttctccaagggaactgtatgcaaaaaggacaatgaaaacgaactgaacaaagtaataatttatgattagtaatttaggcctgaaatataattccagtgagctatgctgtataatctggaaaatgtatttttctatgccagaatggccttatctttattttttaccctttaacctaacttcaagtctgagtcttatatcttatgattcccatatgaggaaatttataaagagcctgtcaaaggccagatgaaaaaaattatatatgtaatatatgtgttttatatatatataaaaaacatatatatatatatatagagagagagagagagagagacagagagacagaaagagaaagaacttagtatgtgcagacatatggctaagttctaagcatataacactgagtcaagcaaatatggcctcttggaggttgtagtctgcttcatagattttaaacaactttatatgtgtttgtatctattttatgcaagtaaaataagaaacagtgttatagaagtacagaatgccatgaaattatgtcaggtagatctaattgatattggaaaaacagaaaagatctttcacaggaactgacatctaagttgaaaactaaagccaaggttggaaaagcatagcagacattaacttcaaggctaagggaaagtgtatatgaagtgcagaaagggagaaaatacttggatttttttaaggaacagaaagacagccaaggtactagaaatagagaagagcatcactggatgtccaaggtgttaggagtgaggaaagatactgctaggtgaaactggagagagaggcagaaaccagctcatgttcgccattgttggtaatgttaggaatgtaagatttgattcctatttctctcagcagctataggaaggtttataacacataatctacttttcatgttaatgtgctgtctttggctacgataagaaaaatggcttaagaaactgagatacagtgtaaattgccaagtaacagatgactgttacttggtttaggaaagaggagcagagaaagagataaatatacagattcaagatatacattgaagatgtaactggcaggatgtggtgataagttggacatagaggatacagtagaaggtatgaaggatgaatgccttcgtttctggaataaaccattggatagaaggaagcgctttttgccaaagtggagaaaagtgaaagaacagatttggaaagaaagagcaggaatttaatactaggtatgttatatatgagatatccaaaagaatctcagcaaaagtatcaacaaaacaactgtgtttatgagttagaagtttggatgacaggctagaatattagtgagttattgtaacattaatgaaagtcatgggaacattcaagattgtctatgagagagttctaagattacaagactgaacctgaagtactccattagtagaattctggacctgatgtagagagaagaggtggagaaagtaactgaggaaaaacaagccaggtaggaagaaaaccaagagagtgctaagagaaaaaaaatgccaaaaaggagaaagtgatgaatttggcctgatgccacagagaggtcataaaaggagactgggaaaagtccattgttttaaccatatgaaaatacttggtaacttctgtaagaaaaaaaatttgaatggtaaatttggatgatgtatcattgtgtcaggaagtgtgcgtaaggggaagaataaagtgtatgaaaaattctgtagcaaagtttggatgtaaatgcagcatggagaaaaaggactataaatggaaggtggtttaaggttaagagaaaatttttattggttttagaatgataaatagtaaagcaaattcgtgtgctgaatatgacatttagtagaaaaggagaagttgaagatgcagaagaaagggaaatagttgctgaagtcaggtcttagagaaaaagacggactgagtgtatatttctcccctgcattggactaaacaaaaagagaggatgcttgcttctgtcttacaagaggagaggaaaaaataattgatctagaaatagatattttagctggggctataagaaaacaaaggatttgcctttctgtatgctctaatttctgcagacagaaagaggcaagactatccttctggagttgagagatgtgaggtgaagtgaatcaaagggttaggacaatggagaaggaatgagaaagaaaagttgaaggctggtgagaaagttgagagagtcaatggggacagagtctcaatgaagtccaaaagtgttgcagagggagtacctgagactgatagtaaacagacagtcaagtggaagagtgagattctgtgtgtggttgggaagacaggtaatttctggtgaagacaaagagcatactatttatcatcatgggaatctgtggtggtggcagtgtactggaaataaaaggtcataggcacagaggaggccaaggaaacaaagaataaagttttggattaattatcctgtagacatttcaatatctatgggatactgacttccttgatttagagtggtcaaaaagacagaaacctgggtaccgaaataaaaataatgacatacaagaatcagaagattgtagatgattcttcaaggatgggtgctgtcagtgatacaaccagtttgtgagaccctctcaaagcagtggattttaccatttgagcataatattctggaacattcaaagtataatcttatgatattatggagcttgatcatggagtgaaggtttcagaatgcagatcagaagggttggggtaggaagaggggaggttggtttgtatcagtggacaaaatgttagcctgtcttatgctttaagcagagacttgtgtaaagaagggtgagatgccatatgaactttaaagtagtttttccaattctgtgaagaaagtcattggtagcttgatgggaatggcattgaatctataaattaccttgggcagtatggccattttcacaatattgattcttcctacccatgagcatggaatgttcttccatttgtttgtatactcttttatttcatcgagcagtggtttgtagttctccttgaagaggtccttcgcgtcccttgtaggttagattcctaggtattttattctctttgaagcaattgtgaatgggagctcactcatgatttggctctctgtttgtctgttattggtgtataagaatgcttgtgctttttgtacattgattttgtatcctgagactttgctgaagtttcttgtcagcttaaggagattttgggctgaaacaatggggttttctagatacacagtcatgtcatctgcaaacagggacaatttgacttcctctttccctaattgaataccctttatttccttctcctgcctaattgccctggccagaacttccaacactgttgaataggagtggtgagagagggcatccctgtcttgtgcctgttttcaaagggaatgcttccagtttttgcccattcagtatgatattggctgtgggtttgtcatagatagctcttattattttgagatacgtcccatcaatacctaatttattgagagtttttagcatgaagcgttgttgaattttgtcaaaggccttttctgcatctattgagataatcatgtggtttttgtctttggttctgtttatatgctggattacatttattgatttgcgtatattgaaccagccttgcatcccagggatgaagcccacttgatcatggtggataagctttttgatgtgctgctggatttggtgtgccagtattttattgaggatttttgcatcaatgttcatcaaggatattggtctaaaattctcttttttggttgtgtctctgcccggctttggtatcaggacgatgctggcctcataaaatgagttagggaggattccctctttttctatggattggaatagtttcagaaggaatggtaccagtttctccttgtacctctggtagaattcggctgtgaatccatctggtcctggactctttttggttggtaagctattgattattgccacaatttcagagcctgttattggtctattcagagattcaactttttcctggtttagtcttgggagggtgtatgtgttgaggaatttatccatttcttctagattttctagtttatttgcgtagaggtgtttgtagtattctctgatggtagtttgtagttctgtgggatcggtggtgatatcccctttatcattttttattgcgtctatttgattcttctctcttttcttctttattgatcttgctagtggtctatcaattttgttgatcctttcaaaaaaccagctcctggattcattaattttttgaagggttgtttgtgtctctatttccttcagttctgttctgattttagttatttcttgccttctgctagcttttgaatgtgtttgctcttgcttttctagttcttttaatagtgatgttagggtgtcaattttggatctttcctgctttctcttgtgggcatttagtgctataaatttccctctacacactgctttgaatgtgtcccagagattctggtatgttgtgtctttgttctcgttggtttcaaagaatatctttatttctgccttcatttcgttatgtacccagtagtcattcaggagcaggttgttcagtttccatgtagttgagcggttttgagtgagtttctggattaagaaaatgtggcacatatacaccatggaatactatgcagccataaaaaatgatgagttcatgtcctttgtggggacatggatgaaattggaaatcatcattctcagtaaactatcgcaagaacaaaaaaccaaacaccgcatattctcactcataggtgggaattgaacaatgcgaacacatggacacaggaaggggaacatcacactctggggactgttgtggggtggggggaggggggaggtatagctttaggagatatacctaatgctaaatgacaagttaatgggtacagcacaccagcatggcacatgtatacatatgtaactaacctgcacattgtgcacatgtaccctaaaacttaaagtataataataataaaagaagggtgagaaagttgcaagatttagttctgatattatctaagacagaggtgggtttatagagtttcaattacagcctaagaatgagggatgcctcacagtcaaaatgttaggtcagtgtgtcgttaccttttaggcagttagatttggcagctgcagtaaagtgtagccacgggtgacagaaatgagcaagtgggcataaaccaagtggttcttttcttagagaatagggacgtggagtaaggaaggggaagtagtgatggatcataaacaaatcaagttgtaccagcctttctcttgctgatagggcctagactccacctcagacaatgacaatctagggagaggagatgattaagcatttttcccaccatgtttcaaactacattagacattgatgaaatatctgtgtgacatggataaaaagaaaaaataaatcaataataaaaatgtacaaatctttctatttctccacatttttagtgctccactttcacagtgtcaggtttcttacttgccgagttaactcctggctctcagattatggaaaatgaaaggcaagttgaaagaaaggcctaaaaagcgaatttgctttcataataaaaaggtgaatgagaggtagtactggggtgaagtggggataaggatggactgcatttgtacttgccagagttcagcaggcttgattagggaatgacgtttgaaaatccgtggtttgagtaatatattgaatttaaaagagataaaaataatttttctaaattgctgctcattattaatgttcttcttccttatattttctctagagactactgaaaagatttaagatgttttcaatttaggccaaaataatatttcttcataaatatcgttttgattcagtgccaaaatgggttatgagatttacttgtgaaaattacaaaatgagtccttaatttagagttaaaattttaatatgaaatattccctaaagtagaatgatatataggaatgaaaaagaaattatttaggcagatagtgagggtaaggaagtcctcggtaaggttttttccctttaatgaaaagcagccccaaatcattttcttttctaacaatgagcagcctgtaaaatcaagctgcagacacagacaagcaaactgtaaacttgcatgggtgaatgctggcaactgtgccaataggaaaaactacctggcactaggcatgttcaaaatggcaacaccatctttccttttttttttttttttttttgccaaccacatgtgcagtcaggaggagacaacatggccctggccaggcaaagacccaatttgcataataagattagggtgaggtggccggctttctcttgcactatgcaaacatcacacctggtccgaccaatctttgggccctatgtaaatcagacaccgcctcctcaagcctgtctataaaatgctgtgcactctgttgtgggccagaagtcccatacgagcacccctctttctcacaggagagagaactattttcctttctctttctttgcctagtaaacctccactcctaaacccacttgtatgtctgcgtcctctattcccttggtgtgagactatgaaccccgggtatttaccctagacaaggacaccgcttcaatgtttgcttgttcaaaatctttagaacacaatttttctgaatcttaaaatagaacgttaaataatatgggcggttagtcatggcatttgggcttccaagtatagaaacctaccaaagttagctcaaataaatagagatttcttttctgagaggaatcaaataatctcctgtattcacagacctaaggacaggaagcaaagatggacttcctggggcctggagaatccctcactcaagggagacatgtcttctttcatcttgtctctcatagcccctttactttgatatgcaggctccagtatttcttctctcacaccctcccatgctaccagatcaccttacctattttacagcagctgtgcaccaggtggaccgcatactttgcagttgagattattgagagaaagggtcctagtgactcctctcagtctatgatttggtttcacttgaatcccatattccttcttggtctaattatctgtgaagagagaggagataaatggtattatgctactgcgcatagggctgcctctctcagaaacactaaatggggcaggtttaggtaaataaggacgttcaacgagtcagccacattgcctgacatatccaatacacgtacacttttggaggaatcactagtgggaatgtttccagaatatagaatagccagccgacagtgggagtccatatgtcaagtttaatttctgtgtgtttatgtataaactgaaaaccaagtacaagagagatttttcaaacaacaaaagtgaaatccccaaacaagtaaagatcaataaataactgtcttgaatagtcttggccagacagacaaaatagcttaattgtttattatccacatgctttaagtggcagaaactaatagaatttgaatttaaaccttttatttcaaagactcattactttttcagatttgtaattgcattttagaattacaatgctaaatatttaatattcctactttatttctaaatatacctcaattactctatataatgtggaaaattactttcttgttcaagttttgtacaaggtacaatggcataaaaaatgaggttatgttactattgatgctatttggataacactaagttactataaaaacaagaaaaaaataaagttcctaatgcaaacctttctgaggaaaatacgtatcattttcctgaaataaaaaggaaagcagttgtcttcattaagataaattaataaacatggagggtttgccagaccctaaacatagcaatgatttttgaaatctggcaatatatggctccctactcttatgtcttactcccctcttagctagtccccattttgtatcttgttacgtaaaataccttgtttttttaacttcacttcaaaaaaatcttgtcgtgtaacctaactttctaaaaagttaaaatgaatgataagtcatttcattttcagaaccttttgaaaatttctaaattccgtcagtaagttataactaacatttaagagttaaggacggggactgaccatgcagttaaaggacatggacagaactttgatgtatttaaattcccttatgtttttttgagttaaagtacagaagcattatttaaaatggatatcactggcaaaagcaattcttatttttatcagctaaaaaaaatgcatgctttaagatgtcagtatgtataacaattgctttcctttaaagtatagaaatgattggtgccataactctgtaagcacagtgctctgtcactgtccatgagcgctccctttgtgacttatgatttatgttaggcaagtttaccaataatactcgaagtttcttactatcctcaactgtataaaacttatatgactgtagtgaaacggggctgctcatataatcacaaagatgtcagacaaaaacagtttcccatatctgacgggataatgatgtcaaaacaataaaaccctgtttactagagaagctgcattatgaaaataaagaacaggatgaataattaaaaatttgaaagaaatgttttcttttgtgagctaatagttaaacatcttagaaatagagacagttgttggatttgggtgtcttttaatattaatttttgttagtggaaactagaatgacatttaaaaataaatgtagaacaagagaacagcaatgcccctttttgctgcataacaaaaaatagttgataacacaggtgagaacaaagaaagatttttaaaaagtattagtattgcaatcctaagggaatggggcatagggctgaattgggactggtctccacaatctaccatgagttttccagggagagtgctaacctgggggcccttggttcctggtgcggggagatgctgaaaaagagactaggaccctggaagttaagagagttaagtgttcagaaaacatcaaatatggtggaatgaatgggattccaaaccaccattgaaattcctttttgtgtaattttgggggtagatcataggctttcccactgtttctaagccctaggggtggtaacaataaagtgcaaaatcattgcatttcagttcaaaaggcataacataatctaattataacattatgacaaaaatcagacagatctcaagttggaacattcttcaaaacaacccttatctactctttggaaatattaacatcatgaacaacaaaggaaagctgaagaactgctcaagattaaaggagttgagcaagaaaagacgattaaacacaatgtatcatgttcaattagattctgaatcagaaattttttctataaagaacattatctgtcaaaaggcaaattttgaatgactatacattgcacacattgttaaaggaattgattatgagagatatactgtggttatgcaagagaatgtccttgtctttcctaaccttcttaagagatggatgctgaagtgtttaggaatagagtgatgatgtcagcagtttactctgaagtggctcaatgagtatataaaatagccaacggaacgaaatgtaaacaactggtgaatctaggtgacgggtataggcatccattctactattcttaaaaattaaaaattttgtgtgagtttgaaattccaaataacaagtttttcaaaaagctgtgacatttatggctccggcaaagactaaggataagggctttgaaactatttcatctgtaaaatacaaattatctggtacttttgtctctcagggaaatcataaggatccacaggatcgtggagtttgcagagcaccatttacttgtttatgatttggaaaaatatgttatagaaaagaagagagtgatttttaacccaacaacatttatattacaaatgacatagttgaattttaaatatttaaaaatgttagcttgtgtttaccaattgtaatacagctatgcctccactaaagaatgccctaggaatgaaacttttctctgtaacaggaaattttagggtaaaattaaacaccactaaaaacaagcacacaaataaacatttatatcatcatgtgactataggcactcaatagctgcaactttatggtcatattgctattattccttaggactctttgattttttgcatttcaatcaaaagtgaacagagctcatcacagtcaggaatctgaagtctgagaaggttcaattttgatcagttatatatttacatgtgctttttttcatgcttagcagaaacttagagagttatctcaatccgttttatgatttagaaaaaaatatgagaatcagttgcatcagtcttgtaatagaaggtcaaaaagaatgaaaaatttcttgaatgaataacttaaattttctgaaaccttcatcatcacctggtttatactcttcctccataactaaacttcccaaacacaagtggcaaaaattactagtattttactgaatatcagattcagtgacattttcttaatctatatccttcttttttttgctttgtaaagtgattgacccagtcagccactcgattttttattctgaaaattctctgttttagatgtctgtgaacatctgtgttactgctaacttctgacctcctttactcttatttctctaacagcatgcctccaaggttcttgtcttgagacgcctctttttttgtcaggggtcaggggatctcattcaattaagtcatctgaggatgactttagagaaggcttcatcttcagactcacctctctccttaagtaccatgtaaacagttgcaattgcctgcttcataatgctatctaaacgtagtctctacacatcacatgatagccagaaccttcatttctccatggccaaagtcaaaccacctgcacaccaactcctcttcacctctgtgaaatgaaccagtgagaaaagaaaaatataaaagaagaggcattgtgagaaaaagtttcatgtagcaagaatagtgaagactgttctatagtaagaaagagtgaaactgggtagtccttatagaaacagaatagctatgaacaaattgatttataagtgaggaaaacagagatgcaggatggaagcaggaagagagagagagacggagggggagagggaacgcgtgcataccaagcagtgatttgatcgtttagcatgacaatgagaatgcagggtgtgccctttatttattcttcactagactagaaagatcttcacctaaataaatatcacttgaaaaaatcatttttaacttatgataaactgatctttcaagaacatttggtgaaatatatacttataataaaatctagcttgtactattacaaatagtatgcactaatgtttaaaaattagtcaatgtctcctacagcagagagaactaaattaaaattaaagtttaaataatgtgtttaagctttaaagataccccatactgttagataatgtaagtatgttgagaaaagtaactaaaaactaattcaccaagtttgtaaaatcaaatattttatactctaggtaatcttaatattgctcagtcactgtaaattggattattcttgagattgtatttaagtcaaggcaagatggtcttctatttacaaatgtaatttagtctcatgagtgggtaatcttgttaaatattgtcaggttaattaaaattgatttgtgtttactaaacatagtgaatactaatcaaatattagatactgaagtgttggagttacattttaaactttgacagacaccattagcacagtatgaaagaatttgttgtctcagaggtcaacattactcttcagccttttctccaaaataaatattaagaaaaaacaagaagaaatgacctatactttttaaatacaattttgtgatttgggaatatttgggagaatttgggataagttttggtggggaattgattatttatgttttatttctgttgctacaaacagcacatttgcttttctgtctgcttaattccattccaggtttgctattctccaccactcatagcgtcattgagctccacatgataagttttataagacacaaacattaccaggcaatttgaaaggcaggttgaagataaaggctgatagctcacatgccctggcctggtgacttggctcacttctgaagcttacactgaatgtggttgatgtgcttcagctccatgaggcttaaagaaacatttctgctaatacaaaaataaacccactataatcattcattttggggaaattttacagttgttggttaacctgctcccttatgccctgcaatattcattagcagatttctctgtttatgagtgatattataaggaaatggttatatgaagccaacagatgtaatcactgaaataaattagaagaaaaagttctgttttttacagatggctccatcaaacgtgcttccctcccccaccctccactttaacatttagttttctttcaacagaaaacttttctttactgactacgggaatgtcgccaaagtggagagatgtgacatggatgggatgaaccgaacaaggataattgattcaaagacagagcagccagctgcactggcactagacctagtcaacaaattggtttactgggtagatctttacttggactatgtgggagtagtggactatcaaggaaaaaatagacacactgtcattcaaggcagacaagtaagtacaattttgttagacaacgctcctagggtaataaaaagaaaggaataataccaaaatttgcaatactgaaaatttcttgtaaagtcgagctgcaatgagtcataaaaattacagtatatttcctatattggagaatgttcttttcacagtgatattgtgatatttccacaaaattggagatgcctctcttgctctttctcccttctattaaaaacagagaaaacaagtaaacaaaaaacaaaacaacaaagacaaaaatgctatattcgcaagaaagaaaagtattaaaataggtcagatgttatggcctatttactaaaaactaatttaagtagttcattcatgaggagctggactatcatctgtcccatgtggcgttggagatattttgctaacaaaagcaaatggctgttcacaaaagtacctttattataacaagttcgattaaattttgacttctgatgtattcaagtacttcctaaaaagagaattctgtgaaagtcacggaggtcaaaattcttcctaaatgtgttactttttactttgctgaattacaacgttttgcaaacaacagtcagtgaatgcctaaaagagatctctaagtagaaatcagccttatttactataatatatttaaaaatctgattttatctcactaatggcacttattttatgtgagattcttagtctatggagctgaaatatgtgaatctctttggattcttttgcaatgcaagacaggtacattctgtgattatcctctaaagttacttttactttctaatcagcttttaaaatgaaatcctttctccttccttgacagataaagagatgcactaatctgtctggggtggggttggagtgggggaacctgttcaatgttaaaggtgggccagtgctttctctctcaccttcaactgccccaaaaatcttgattcctttcaaagctcttagttacaaccttagaggacctgatctctgagatgattatcatggcccttctctttacttatttgcaattaaaaaattaaaccttgttatgaagatagggagttcaaataaattttttcatgactactttaaaaagttttgaaagcctgaagtgtttattcttttttccccatgtctattgcctgtattttgcttgttccttaaacatatgctaagtctgccactaaataatccaacatagatacagtttttgaagtactggggctgaaggcaaaatggtttacctactgctccaggcttctcctacctctgcctagggtgtaattagcagaggtgcctgttttaggggaaacagtcttttctgaaggaagatagggaggtagtgagtgaattttatctttactgggtgaacatgttttctaccttgaccaattgcctcttatgtagcaggctttttctcctgggttatgaattggcagtcatgtgacaacaatgttgatatcccatcaccacaggttccttggttgatggccccaaactttgagcaaaacatgcacgagactaatggcaaaggaagagtcttgagcttgcttataatttttgtaggacaaaagtattacccaagtcaaaattggaccatagatatttttagtaaatttgatgtcagctaggtggaaaatgatattagtaaatacacatatgcctggacccacacataaatacaacacatgtccatactgtggagtaacatgtacatacaaaaaaactattcgggctataacatggaatagttctccctagtcattcttatattttatgtccgacctaagcatgaagaaatgagataaaacccaaaaacgacatgtaaagccagtctttttttagtcgtgtctcatacaagaagaccagaaatagaagtaatgagtcatatatgctaaaaagataaatcaaatgtttttgtttaaactatagaactggcaagattttctggttaaaatagaaaattttgtgattttgttctataagtatttttataatcaaaccgcacatactttttcaaattctctttaactgcaaatctgtgtattaaaagtgtgcaatataatgccgaaagtagtgacagatgctttttcaacaaaatctctacagcaaatcaagtggcaacttcactttaccctggaacagaaccatttaaattaagtaaatgagtagccaaaggcaaggtgcctagcatgtgccttttattcagaaaatcagcacatgtattcttctttttgctccaggggaaaactttctaagttcaagatatccattcctccccacaaactctaagacctttgccaaagagaagagctggactgttaactaagtatatggatagcaataaacatcataattctcaaaagaaactgttctatttcctatgataaattggctttagaaataatgaaatttctgagtgaaatgttgacatttatttacaatgattgcaaatatgtgatttctttatatattactttctgtgctggagcaagtggtagtctaaacatagattgggaccaaaaagttggattttgaatttataaaacaaatcttcggaggtgctttctcattagtcttttcacagggagagctatgtttttgcagcttctaaatatccattattatataaacaagtagcccttaaaatatctcaaattatgtataacagtgtcacaggcatattattgaatatgcttgaaagtcttgctctcacaagcctttgaaaaataactactaaatatgctctcttaatgtcatatgaatacaattctgtccctacatttggaactgttttaaacactactgcataatgttttcttctccagaaaaaaaagttttaatcagggaaatgttgaactccttgagaaaaagtaaataacatccttgcggttcttctgctgtggccattttccatactagtaaatagcaatcagcttttctttcaaattgcaagctacataattaaaaatcatagttatgttttgccctctttataggttagacatctttatggtataactgtgtttgaagattatttgtatgcaaccaattctgataactacaatatcgtaaggataaaccgatttaatgggactgatattcactcattaattaaaattgagaatgcttggggaatccgaatttatcaaaaaagaactcaaccaacaggtaagtgggaaagcttctttattaccttcctaatggtagattgaatggggatatagtccttgtgcttttgtatggtgttgaagtgagtgagtcataaattctctgctttgacagcaaaagtaggcatgtctgcttgttaaatggaatagagctcccgtcacaagtctaaatgacagattgttcagtttctagtgaatcgtttctatgatagaattgaaatgatagctagatttagattcaggaaggggctttcagtcgtgatgaatgtagacaggaaacccagatgctaaagttattattttttccttttaaatatcattttggtagacaaatttaaaatcaggtgactgccttgaagtatctgtccagtgtttattatagtcattgggctctcctaacttaacattgcaattgttctttaacacatattcattaaaaagtaattttcaatgagaaggctgcagtttttctcagaaaaacaaaccagttgtttctacaggagattagtgatgctgttcatcaatacaatttaggttcaatcatacataaaaaaagagaatataaaaagccaccagcaaaaatttttactgtattttatacttgtatttcaaattaaaactagcctagaattatctaagcattaacatatatctaatcacggctgtacattgtcacaaatatgtttacaacagactcaaatttaaaattctgtagatggccttattagagtttaatattaggatttattcattcattaatttttcatggacaatctactatgttccaggaactattctatgtatactgtgaatagagcagtgaataaaacagacaaaatagtcttgcctttatgagtttacactccagtggagaagctatgatacaaaataactaagtaaattatgtattatattagaaggtaataagtgctatagagaaaatcaagaaagtaaggtggataaagatgtcagaaatgggagcagtcttcaattttatatggaagagtcagaagaagttccatggaaaagatgacattgaataatgacttgaggtatttgaaggagaaaggcatggggattgtattaatcggttttcacactgctgataaagacgtacccaagactgggcaatttacaaaagaaagaggtttaattggacttacagttccacatggctggggaaacctcacaatcacagcagaaggcaaggaggagcaagtcacatcttatgtggatagccacagacagagagcttgtgcaggaaaacccccctttttaaaaccatcagatctcatgagacttatttgctatcacaagaacagcatgggaaagacctgcccccatgattcaattacctcctactgggtcccccccaacaacacgtgggaattcaagatgagatttgggtggggatacagacaaaccatatcagagatatctgggcaacaacattgcaggtggtgggatgaacaagcacaaaagccatgaggagagaacatgtctagactgttcaaggagtggcaagaatacctgtgtgtctaaagcagaacgaacaaggaaaagagaagtaggaaataaggctggagaaacaaaggaggaccataacaagtagggctctgtagactattataaaaaacttttgcttatacttttagtgagatgggaagtccttagaaagcattaaacagaaaaatctcacggtatgactgacatttttaaagaaccaatatggctactctgttgataataggtagtagggaggagaaggttggaaggttacagaggatggtggattggatcaagatccagcagtgaaagtggtaagaagtagtgaaattcagaatataggcaaatatagagccgataggattttctgatacattagaggtggagtataaatcagacagtggtctagctagaggagttggaataatttagttactttttagatggggaaactaagcatggagtgagtttaggacaaagatagcaaatttaattttcatgagttactttaaatgtttattacaaattaaagtgaaaatatcaagggtatatttaaatatacaactctggagttgaagggggaagtccaagcttgagataccaatttgggagtcattgacagacaggtcacatttaaagccatgactatggatgtgaacaccaaggcagtaatcacaaatggagaaataagcattccaaataatggacactggtatgctccagcaataagctgaaaagaataggaaaaaccaaaagaagagactgagatgaagcttcttaaatccaattgaccataggatttagcagcatgaagctcactgggatctgacaagggcagtttcagaattaagtgaatatatgagtagaatgggtttgagagagagaagaaggaaaagaattgtagaaaatgatcattggtagctttgcacagtgtggatgtaagctagggcagagaaatggagagctagttgaaggaaggattgttgtgggaatttgggttaaaagatttttgattagatgtagaaataatggtatatttgcatgttgatggacatgatccaatggaaaaagcaaaagtgatgataagatttagaaagtggagagttgttgattagttgagaggagatgcgatctattgtataagtggagtcaggttggaaaataacaataacactcttggcaggaaaaaattagtaaaaattgcatttcactcatcttctgacttggagaatgaagaatacaaagataataggcataatttttaaaagcatattagttttattatgaagagaacactgccatgatattcatcaccatttcaaacaagtgggtgatctaaaagaaacataattacaataatatgtaaaatcttacttatattattcctattatttcttttcactttgatccatctttcttttctcatcctctccatatagtacttttcttaccttttttctttagtagcttttatgctcacaaaatattcttctacgcctcaatttctatacatatactcagcctccaccatttgacaactacacacacacacacacacacacacacacacacacattttgtggtaagagtctcaaaatgacaatagacttaaaaatttaaaaaatattttgcctcagcacttctcaacagtgtatatataatcactgaatcacatttcctctagtttggttgcccatatgatgaatcatttcaaaggaaatcctttctctgcttaactacctaacctgggattatttttgtggatctttgtattcattttagaaattggtatttttaaaaaggatgagaagcaagtacaaaaaaaagttatgttacttttattttgctcaccggtgaagagtttaaattaatataaacacattttatttcttagaattttttttaaatgctcacttaggaggattttgtcaaatccctgtctcctcttctatggggtttacactcttttgcattcgattatggtgctaaatagttgagtatacaaaattttgctaagattccctgtttttacactatagaaattttgacatactgatgcacatagttatcttatctttgaacttgaatttcacgcatgctgttttttatttgttgtagtcagaagccatgcatgtgaagtcgatccatatggaatgccagggggctgttcacacatctgtctactcagcagcagttacaaaactcggacttgtcgctgcaggactggcttcaacttgggaagtgatggcaggtcatgcaaaagtatgttgttaaaataaaacatttgccagcagctacccctttagaataggattttaagtattaattagcagcatcaacatcagtcataacatgagacttcaacaggtgaagtttgcctgcaaatatatactgtccatttttctcaaaataagtatttttcttttgtgataatatgaatgagaaactaaccaggctctggagtcactaaatttattgattttagggaaacatatgttgaggaagatttttagaaagatgcttcccttaattccctaaagaatgtatttgagctaataagttggaatgattagttgatcagatttcctcttatttgaaccaatatgctactcctcataataggcatgttgcttgtttcgacagaaatccatgtatagtcaggcttcattttatccagcatcactggggagtgaattcactccatgatttaatttgtcatgattcaatttttcagatagctgaagctatacctaattagagatcaaacatttaatgattttatcaaaaagttttaacgattttatcaaaaagttttctaatctcttagatatatctttgttttattttaaaaataggcctgaataatttattttaatttaaatatggtaaaaaggattttaaaaatgactttcataacttaatattttgcacaataattagttaaggtcttttcctggggtcttgataatcaggtatagtagaacggccctgattgaaatgatcctagtggggactgttggtctttaaatgttccccaaacaccattatttttaattttatgatgactgctttttacagtgtccagtttgtctttacctttgtcatagtgacagctttttatttctgtcagtcctttctctctggtcacaatcctgtcatctcttccaccctctggtcatgtgcttactaaggactgtgaaattagatcactaaatgtgttagaatttgaagtctgaatggttagagctactaatagaatatatagtttaaagtgaagaatcaaagagtccaaactatgttaaaatgtatgcatttttgtactttgtttacattttttatttgtattcctgattttgtattaaatgctgggaatgtgaaggtaacaggtctcatgtttctaggccttctggataattgagggtactgagtttgaagcctcatgataaaagaagttttgtgtgtgggtacatgtgtgtctatgtagtgtgtgatttaaaaattgatctggatggcacttgggaaatataatcacacacacacacacacacatatatacacacatgcatatgtgcatacatacatacacacattggaggaaaaacataagatcagaattgcctattattcaattgtccctaatgtagtacatcacctggagtacattgaaagtcatcagaaacaactccagctatttgaagcaacaagagatttaatgtaaataggtgcctacaaaatcatttaaaaacctggaccagtagcttctagactgggtctttggaacattccaccaaacaccattaaaccaacctggctgaaagctggaacatctaccatactcagaagctagagcatcagggagccacaaatgaaaatgttaactttaaaaacataccatttagctgagatccagggattagaaagcttgccccacaactatcagatgtagagttaagtctcatctgatagtccctaactggcaaaaaataaagaagaggaggagaggagagacaccctgttcctcacctcttgatatagaatggaggaagactgctgtggaaaaattcagtgtctccattagattgataccagcagaagcggcaaaaaggggacctttgcctcacttccatattctaaacttgagctagcatatctgattttaggtagtcaaatgaaatccactacccttggctatatgagtgtctgtgaaatgtattttttactattcaattgtctgtagtacaagaagacacactagagaaacttaagtaggtattaaagaatacctaggaaatgaccaaagaaaataatggggaaaatcattgccattcttatttaaaacatacatacctacatacacaaacaaacaatcacacatattacatcaatgaagtactaggtttatcaattaccaattaagacatccattagaagtaacaacaagggcgagtgttgtggctcaggcctgtgatttcagcactttgggaggctgaggcaggtggatcacttgagcccaggatttcaataagagcctgggcaacattgcaaaacctagtctctaaaaaagctacaaaaattagacaggcatggtggcacactcctgtagacccagctacttgggaggctgaagtaggaggatagcttgagcccaggtggcagaggttgcaataagctgagatattagcaaaatgggtgctgtaaaaccaggattcccatgtattgctaatataattagaaatcgatgtcacagttcgtaagacatttgctaataaatataatgatcataaaactgacaacatcatttcacaagttatcctactttacttttgattaaggaaattaaatgtatttgtaataatagcaactcagaaacaatatagctatccaacaataggtaagcagccgactatattatgttgcttctctagtaggaaatattatgctgccattgaaaggaaagtttttgaagactttttaatggcttgacaaaaagtcattacagtaaaaagaatttatatacaagatcccaatttttgaaaaatataaaagtatgtaagtatctaatgttgatagaaaatactctagaaatgttaatgattttcaaatgtatcaatatactttaaaataatataaagtattattttaaaagaaatgcccttgacatcaggtagacactgagaggctatgagggcaatgaagacaaggatgttaaggtactttattctgtaatttcgtctaagaaaatgtgtgaaatgctaaattgaaaaaattatgcttatctcagtattattataatgatgaaaacagaaaaccatttggaaaatgacttggtaaattattatatatcaaatagaaacaaggcttaagataatggttcaacatagacaataatcttgattctaaaattaaacaataagagcagagtataaaattgagtatctattttgatataagtaaatatacattgaaaaaatacctacatacattaaatatgaagcagtcatacaaaggaatgctatacagcaatgaaaatgagtgaagtatgactacaagaagaatggatgaatatcaaggatataataaaaataatattaatcacaaaattcacacatgcaattcaaacatgcaaaattaaacaatctgctgctgggaaatacactacatatgtgttaaaactcttttaaaaatttaaaataaacacaacaatcaagatatcggctctttctcagttggaggagaatgggtttggggcacatttatgtcttccagtgtactggaaatattcttcacatttttgctaggtacctgggatttgttttatttttattctttatatattaaaatatgttatcagtttgtgtgctaatttgctgagaatgattgcttctagcttcatctgtatccctgcaaaggacatgatctcattcttttttatggctgcatagtattccacggcgtatatgttccacattttctttatccagtctttcattgatgggcatttgggttggttccaggtctttgctatttaaataatgctgcagtaagcatacatgtgcatgtatctttatagtagaatgatttataatcctttgggtatatagccagtaatgggactgctgagtaaaatagtatttctgattgtatatgcttgagggatcgccacactgtcttccagaatggttgaactaatttacactcccaccaacaatgtaaaagcgtttctatttctccacaaccttgccagcatctattgtttcctgactttttaataattgccattttgactggtgcgagatagtatctcattgtggttttgatttgcatttctctaatgacaggtgatgttgagcttttattcgtgtttgttggctgcataaatgtcttcttttgagaagtgtctgttcatatcctttgcccactttttgatgtttttggttttttcttgtaaatgtgtttaagttccttgtagattctggatactagtcctttgtcaaatgggtagattgcgaaaatgttctcccattctgtaggttgcccattcactctgatgctagtatcttttgctgtgcagaagctctttggtttaattagatcccatttgccaactttggcttttgttgcaattgctgttggtgtttcagtcatgaagtcgttccccatgcctgtgtcctgaatggtattccctaggttttattctaggatttttatggttttggtttacatttaagtctttaatccatcttgagttaatttttgtataaggtgtaaggtgtaaccaaaccctgcatgttttcactcataagttggagttgaacaatgtgaacacatggacacagggaggggaacaacacacaacggggcctgtcagggatgaagggcaaggggagggacagcattaggacaaataccaaatgcatgtggggcttaaaacctagatgaccggttgataggtgcagcaaaccaccatggtgcatgtatgctatctatgtaacaaacctgcacactctgcatatgtacccagaacttaaagtaaaatttttaaaaaaattaccaatattcttttatatatatttaatattcaattaccctaatttaaaaaacacaagaaaagaaatataaatgttaatatactttgtattgttaggtttataaataattgcttattttttattttattattttccaaattttaataatatattattttactttactatgaatatcaattattgtgttgttatccaaatacagctgagtcttttgtatcttcagttttattaataaagctcagtatgtttttccttgtatataaaaactatttcctttaaaattatacacagttaaccaagtataagatgctccgataattggagaatcttgtatatatttttatatagaagtctaaaataaggaattcattttatagaaagagctaccttgatgctgacattttaaactcaggagacagttttttgcttggggttttcattttcgttttgtttttgataaggcctgtgttgtacatcagagttactgtcagacagcatcagcctctaacattctaattaaaatttgaagataaagggatgctataactggtatttaattttatttctaaaaagaataagtcacatgtttgggcaactgtaatatattcacatgcaagttagtgatactatatgattctttgtttgcctctgacaatttgtagatgcaaacttggggttggtgtgtcttaaattttctgaagtttttagcattgtcaaatataatgaatggtacagttagtatcgacagaaaatgttagatagattataatacattataaaattaaatgtgcccgatgttttaataaatgccggttttacaagttacaagttatctaatgatctgtcatgtttttgctatccagacagttacagacaaagggataattaactacatataacccatttgcggaagtaatttctgttttaattaaagtaatgcaattagctggccttcttgcatcaagatacatttggcatattttagagtttaatttttagcattgaatttaaaaaacgctaattgtgccagttaaacggtggcattatgcagtgtaaagaagattaagcagcatcagttgtttgtgtttgtaatctttcctctgcaggaccaaagaatgagttgttcctcttttatgggaaaggacgcccaggaattgttagaggaatggacttgaataccaagatagctgatgaatacatgatccccatagaaaatctggtaaaccctcgtgctttagactttcacgcagaaaccaattacatctactttgctgacaccaccagtttcctaattggccggcagaagatagatggcacagagagagaaaccatcctgaaagatggtaagtgacactgtgacattaacatcaaactacccagagatgaagcactttaaaaggataaatccagtgtgtgtcagactagctttaaccagaactcaagttcttctggttggttcaaaaatattttttaatgttatttcttcattaacattgtttctctgttttcatataccagtgtattaaagccttcattataaaatgggacttggtgttgtctactatattctaaatattatcggaattaaaactgaactattatccatcttctgggaaatgtcaatttatactgatatgtttacagtgctgtatggtagaagatgaaatttaataggatttcagagacttgtaatagttggttttcattagactattgatcatgtcactcaaaatgcatgaaaaatatcaatgtccacattgtcatcacaattcttgcattttattttttactttacacatcactgaaatgaagttttctagagttgcccttggaatatcagtatctccagagaaacttaaaacatttatatctatttttatttataggtacatatatgaagtcatatacataaaaacagatagagatatattttaataaaaccaatgtatattataaattatttggcttaggaacaagtaatctagtaacaaaagaatgttaactttggtatcagtagaaaagattgcaaataataaatcaaaccagatcttcactggctgccagtcatttttaggcatgttaactaatgattctggacctgtttcctcatgtataaagtctgcttacttcttgaatattttagaaatacataatttgaggaacattaattgtgtgcttattgtatgaaggacatcacgatagctatatcgcaggagataaaaggaattttagggaatgacttctgccttcaaggggttcataatctacctttggagatgatataagcacacaaaaagtttcaagacactgcagcatttaattaataagttcaaagctgtcttgaagaaatatatgattaatagagaatgcctatgtaatggatattcacaggaagcaagagatatctttatgtgggtatactcagataactccttcggcaggagatggtgtttggactagatcttaatggagaaacattaaagagggagaggaggatgtttctgcaaccagaaattccatgataaaaaaagaaaagcacaatctctagaaagagggtgtgggggacctaaatggaaagctgctggaggttcctttacagataataatggcacaagagagtcgaaagtgaaaggcactaaaatgcgctaaaataaagggccttgaaggtaagtgaaggagtttggaaaaaatcccaaaggaataaaaagaaatgcttttgagtcaaagaataatgtgaacaaagtgatattttaggaggatcgatcacgttgtttggtgcagaatgaatcagaactttattgagatgagaaaagatgagaaaataaaagcagagagatagactaaaattatttacagcatggatggtgtaaatggtggtctctccaatcttttagaggaaatgagagcatgagaatattcttcattcaacacaactttactttaaatcaaacctgataaaaagtatactttctatgctaaaataaaaacgtacctgtttttgtctttaatataatttacggattaaggcaacgtaaatcctgcataatttaaaattccaaaggagtatctaatttaagattttcactttaaattggatgtgacagaggctgtctgcctacttttctcttaatgtgatagcagatgatagggtcctgacagttttagatggacaaagaaattgcacattctgtctaagtagataaaatttacgttgttttgtttttgacccagacacttgcatttattattattattattattattattattattaatttttgtgcagtgctgcaatcttggctcactgcaacctccgcctccgaagtttaagtgattcccttgcctcagcctcctgaggagctgggattgcaggtgtgcaccatcatgcctgactaatttttgtatttttactagagacggggtttcaccatgttggccaggttggtctcaaactcctgacctcaggtgatctgcctgcctcagcttcccaaagagctgggattacaggcatgagccaccatgcctggccaacacagacactttcaaggaccaaaatgcaacatagagagttcttggtttccttttaaactgtgtcagctcctgtactatgactggatgttcctgctaataatcttaactttgagaataatatcaaggacattggtggttctttgcattccacctatcacaacagagatcgactctaatagccacaatgaccgccaggcatatctgtccagtactgctttgacagtatgaaggttatgagaacattttgcaaattttcacacctgaaatatatttaacatttttgtctttctacacaaggaacagcttaatatcttttattagtttatcttttttctttccattaaagagaataatgatacacattacaatatgagattaacgtgtcaaagcagagacttagatttggcaaatgacaacttgtcattcttggcatcagaaaaattaaattctatgtgtattcacttatttaggtagagtgtctacctttcaacctgaagactgcgaggcaatgcttagtttgacacatgatttggaagcttgatagaaattctgagacattgataaatttacgtagtttgaagtacaagggtataaagagtttgctgtttgtaaataaacataaatatcttggacatcttttatgtaagctcagattctccctcttaagaaataaaaacaacaacatttccaaaaaaatccatctttattcattatttgattttttttctcctagaggtttattgaaaaccccctaaatgttgcatatactgttggctttgaggaatctcatgggtgaaaacagcaatcaaatcaatgagaaaggaaattgtccattgttatatttacatgtatctcatttcatctgctaagtgaaaacatattactgatttattaaagataaacttccataaagacgagatatttactatgtgtattttttcacccacctggaatctttgtcaaaatttttgtaaaattcatactattccttttttaaaaattaattacttgatttattatttttcagtcaataaaaagtgaatgccgtatcggggccaggtgctgttctaggtgataggaatgcttcagtaaagaggataaagcttcatatttagcatatatccaacagcagaaagggaataataagccagtaaacacataaatgaataagataatgataactgctataaagaaactaaagtagggtactgtgctagaaaataaaaggggtatcaacaggaggcaaagttagattaaatggttagagaatttaaattagccattcttgccaggtgtaattgttactttctctaacagaacaagatagatgctctttcttttttttttaattaattaattaatttatttatttttattattacactttaagttttagggtacatgtgcacattgtgcaggttagttacatatgtatacatgtgccatgctggtgcgctgcacccactatctcgtcatctagcattaggtatatctcccagtgctatccctcccccctccccccaccccacaacagtccccagagtgtgatattccccttcctgtgtccatgtgatctcattgtttaattcccacctatgagtgagaatatgcggtgtttggttttttgttcttgcgatagtttactgagaatgatgatttccaatttcatccatgtccccacaaaggacatgaactcatcattttttatggctgcatagtattccgtggtgtatatgtgccacgttttcttaatccagtctatcattgttggacatttgggttggttccaagtctttgctatcatgaataatgctgcaataaacatacgtgtgcctgtgtctttatagcagcatgatttatagtcctttgggtatatacccagtaatgggatggctgggtcaaatggtatttccagttccagatcactgaggaatcgccacactgacttccacaatggttgaactagtttacagtcccaccaacagtgtaaaagtgttcctatttctccacatcctctccagcacctgttgtttcctgactttttaatgattgccattctaactggtgtgagatggtatctcattgtggttttgatttgcatttctctgatggccagtgatgatgagcattttttcatgtgtcttttggtgcataaatgtcttcttttgagaagtgtctgttcatgtcctttgcccactttttgatggggttgtttgtttttttcttgtaaatttgtttgagttcattgtagattctggatattagccctttgtcagatgagtaggttgtgaaaattttctcccattttgtaggttgcctgttcactctgatggtagtttcttttgctgtgcagaagctctttagtttaattagatcccttttgtcaattttgtcttttgttgccattgcttttggtgttttagacatgaagtccttgcccatgcctatgtcctgaatggtaatgcctaggtttttttctagggtttttatggttttaggtctaacgtttaagtctttaatccaccttgaattgatttttgtataaggtgtaaggaagggatccagtttcagctttctacatacggctagccagttttcccagcaccatttattaaatagggaatcctttccccattgcttgtttttctcaggtttgtcaaagatcagatagctgtagatatgcggcgttatttctgagggctctgttctgttccattgatctatatctctgttttggtaccagtaccatgctgttttggttactgtagccttgtagtatagtttgaagtcaggtagtgtgatgcctccacctttgttcctttggcttaggatggacttggtgatgcgagctcttttttggttccatatgaactttaaagtagttttttccaattctgtgaagaaaggcgttggtagcttgatggggatggcattgaatcttaagactgaattcatttttatcttcttgaatatcctttccaagatttatttttcattgtaatatgaattataattttaccaggaaggaaataatataaaaatgataatttactattcaatttattgttacatgtattccactagtgcagtacttgtttttaaactgtatgccttcattctactcaaatgcagatatttaaatagaagaaatgttaaaataacctttcatatcatttcatatttttaaagtattaaaaagaattcaaagcatttttacctagatttgaatattaatgcttgcagctttaacagaaaaactgtagtttccatagatcctataattaaactggggacttgaggtcactgttttacataatacaaaggctttctttaccaaacttttttcataatagacatatagggataatgtgggttgaaaagggtgataattttgccgcttcttttgttgtggcattgatgaagattcaattcatctacttcaagtcgtaagtcatactgcaagtaaaacaatgcaaacataagatttatatgtacagttcttcccaactgtgattcttttcttttctttttctttttattttatttatttatttatttgtttatttattttaatttattttattttattttttttgagacagagtcttactctgtcatccaggctggagtgcagtggtgtgatcacgactcactgcatcctcctcctcctgcactcaagtgatcttccctcctcagcccctcaagtggctaggaacacaggtgtgtgccaccatgctcagctaattttttttttttttttgtattttttgtagtgacagcctttcaccatgttgccccagctggttgcaaactcctgggctcaagtgatccacttgcctgagccccacaaagtgctgggattacagtccccaacggtgatttttataattttacgtaaagtatgggcccaagagtacaaaatttgacctctattataattagatgcaagtttggcagaacattatgtcctctagatgtatccttttaattttagactataccaccttattttgtgataataaaatcaatgacagcaataatagtgaacatttaatgagtacttactctgtatcaagattgctcacgttatgttcattgtcccatacaatccactcaacagctccccgaggtcagcattattattagctccattttatagattggaaattgagactcagacaggtgaagtcttttctcaaagttacatagctagtaagtgataccacttgtcaagaactgtgaaagcactgagattttattatgtttgtaaactaaaacattagcctgctacacgttcatggatgctggcaggagacatgaaacttcagagacaaagtacagtttattactaagatcaataacaatagccagagtatctgtaattttgtttcaggatcctgatctgtactccccacagggtaacccaaaggtgacacctgcacataccatggcacatgttacaagagacgaatctggagcttagggaacgcccatttttttttctcttaacaataagcatgcctgttgattgctccagaaaaagttactttctccatgttctaagcctataagcaaacctgccttttgcttcagagagagatgtaatctctatcttccaaggacatttaccttattaacatccttgaaaatagagtctaaggcacttggcttctcttttcccaaggtggacagaaatgtgagagaaccttggaacattgtctcagcaatactgatatgcaagttactgtgatctgattttggagtctgtggtatgctgaacaatgccctccaaataatatctaggtcctcatccccagaacctttgattcttacctcgtatggaaaaggggacttgccagtgtgattaagtgaaaggatttttgatgggaggaagatgctactttttaaaaaaaatttgttgacacataataattgtacatatttatagggtacaaagtcatatttgtacatacatacatgatataacatgtaatgatcaaatcaaggaaattagcctattcatcaccacaaacatttatcatttcttaatgttgtgaccattcagaatcttctttgtaatgttttgaaaacgtacaccaaattagtgttaaccatattcactccttgcagtgctagagaacactagaacttgttcctcccatatagctgtaactatgcatgtgttgaggatcttgagataggaaattatcttgacttatctggaggtactctaaatgtaatcacaaggaaatttataagggggaggccaggacaaaggaggaagtaggggtcatgactatggaagcaagaggatggcataatacaaggccctgagccaagaaaggcaggtggcttccagaagctggaaaaggcaaagaaatggactcttcctgagactccccagaagggatcagctctgcttgcacctagactttagcccggtgaaaccagtcctggatattgaccttcagaactgtcaaagaataaatttatgttgttttaagccaccaagtttgtgacaatttgttacagcaacaataggaaactggcagagtctgtgctcctacccccttgctatactgatatactgactttacgtatgaaggtgtgttctatttgattgacataaggagtaggtgcacatgcttccacctgataatatcagaagagaagttgacttggatctcgttcaaaattatacattactctttaatttcatagctcctgtaaatacctggaaaaccgaggtcttcctttaaatgaaggtactttttaggagctataaagttaaagagtaatgaataagtttgacatgatccaaggtaggtttctcttttatgacattatgaagagaagaatagccaggaagaatgagaagcagtctctttctgtcaaatatattctccgaaagatgtgtttaatctgttcacatactatgaaaggacagtgctatattcatgtgattgcttatttggcaattgaagggccaagccctactcttcagctcagtcctgtccccagcatcttcagaattgccctgtggattttataatcagctgtccctccaattgtgtgttgaaatgtgtagcccatcaattattctctgatttatcattcgattacttagaaatcctactactgacacacagacacacacatacacatgtgcgcacacacacacacaatcaccagcttaagacccacttcagaactccagaaataggttagcctctattctaaataaccctaggacaggcacatacagcagattacaggatgtaatctgtacctgaatgacactgaccttatagtaggattatcattttctgcacctttaaatcacctcttacccttggatttcaatgatcttcagcattgtataactttggcaggatttctcataaagattgagtttcgtagtaatgaagcaaacatgctgagataacactaatgaattacattagagtgttcttatgaaatttaaagtgtgataatgtcttataaaacattttaaattaagaacaagcctttactcttcattattggatttcaggtaaatatcaatcttatttttctgcctttaactctgaactttttctcttgaagaaaagctttaagactctaagatatatactctgaccaactattaaaggaaataatgagtacatttgtcagtcatgccatatagtctaaataaaattgtaaaggagatatttgtcaacatttgcaactcttgagatcaatgaatattgttatcacactgagtgtcaagaatatagcctgtttgcacatactgactcctgttgacagtgaataagacattttcatagaatttacttgagatttgattcttgaaaacagtgttcagtttcacatttagtctgtaaatatatatttctcatattatttctccagaactagatgagatgtttgaaaagtaatttgaaccaatatatgtatttttgtctgaaaagtagacatgcatacgagaagattaaaatatgggttataaaacctatcaaatgatgaaaagatggaattggctatggtggctagagggttctagtaaacacagaggagaagacatcctttcctttatttccacccaaaataagcatgtgtacatatgcatccgtaatgacaaacacaaaatatacccatatgtatatacacatgtgagctcaaaagagctctagaaacttctgtaaagaagtctattatagatgttagattgctgggaaggtcaaaagagagaaggtgaaaatacatggtaatctctaaagtcccatagagctacagtagccccctttatcggaggtaaataagttcaaaaaccctcagtggatacctgaaaccatggatagtgttgaactctatatatacaccatgttttttcttatgcacacatacctgtgataaaatttaatttataaatgggcatagtaagagactcacaacaataatgataataaaatagaacaattataacaacatgctataataaatgttatgtgcatgtagtctctgtctctcaaaataccttactgtactgtactcactcttcttgtggtctgtcaatcttacaacctgggtggccagtaagtgaataacagataggtaacatagagtgtggatatgcaggatgaaggaatgattcccgtgctaagcaggactgagtgaaatgacagtgcaaggtttcaaaatgttactcagaacagcagacaatttaaaacttatgagttgtttacttctggaattttccatttagtattttcagactgtggctgacaaagagtaactgaaaccacggaaggtgaaaccatggttaagactgttgtattattatatatataattgttacattaataaatattctgattggtaattttcttacacacttaaataaattaccaatattcagcatgaattaaaataaagaaatacattcaactcagttactttatcatacttagcattatggaattcttagttactacttcagaagtcctttaggaattcttcatttacttaggaatactattatgaactttaactacaattaaactattgcttaggttagttaatacgaatttctcaatacaatatagttagtctagattgacttgactttagggataccaaagtaggaagcactacctcaaattgtgagactgaacaatatccataatacatgctgagaaaactcccacgacactagctattatgagaacattttagggagtagtaatagtcattgtgtaaccagtatgtttaaaaatgtgactctgacatatctaaggcataactttatttttacctcccactgacctttaaaatgtactcagtaatctttcttactccacatcaaaacttggtcaaatcccaatcctttcagcttacactaggtagtagtagacagaactgtcagtcattttaagtcagaaatgaaatctcaatttggtcattagaatgcatagtccaccatatatacacacaaatcaaaattctaaattcattgtgtcatcaaatcttacttgtttcccacttttgtgctgcctctggcccggagaaggactggagggcgtatttgttgcattctctgtttctctgccctgcatttattttcccacccctcccagcttgctagattttttttttaattatttttagtttttacttttctgggctgaatatctatatgtccctgctagttagcttctgatgcccactcacctctcaacattgattggaagaggtaacagtggtaaagagaggtaaggagatttaaaaaatcttatttgaactagtcccattatactttagcctctttgtgagcctggtagatcttttaaaatagactctcttgaggggtatggatgtgtgtgtgtgtgtttgtatgtgagtgtgtgtgtacatgcacgtgcgcatgtgtctgtgtgtgtctgtgcttgcaaggtttttggaagtcttccttctgctggatctttctaatttcatttcctttggccaaaggacatgaagtttttgcttgttactttgcatccccgaatgtccattctcttattgtttgaatccctgtatccagctggacaaccttgttgcactagatcaaagatatttatctgccagaattctatcctgtgtggtctgcctttggtctgcagaattactgtgagccttttgccccaatatactctgggagtgcagccatagtgcaaatcagccaacactatcctgcctactatcctatagaatgtgtttagctttctcaagtgtgagccagaagtgagacattctgagacgtgagtttcatgcatggaaaaaaaatcaactgaagagagctaagttcaaagtcctcatagaggcaccacagaagctccatcactagagttgaggtgaaaagtatccctccatcctctccttcctattttagaggttcacataagtaaaatttatatctggagaaaaagcatatttattgtcagtttattagtgtgaaggatttggccaatcaaataggctggatttgggttttgtttttgttataattacctttacggagccaaagctttcagatccctcccttggtggacagatgctactttgtgcttagcgtgggacctggaatatgtcttttcatccctcagttttcaatatttcctgcatgtcagccttactggaaggtctctctccacactcttatccttctctcaatggtagaatgctgtgacctgttactaagtggaagattcatggtggatgcaaaaaaaggttctcttttctcttgtgccagtcttggtcttaggtcctgcgtgtctgggttttgaaggtgggcccttctcctcctgtggcagtgaaactctgccttatatctaggggagttttgggcaggagataattttctgccccatccccagggcagcaattgtctttttttttaatatcaatatacaattttgtgtccgggcaatttttgtgccccttttccagggttagacagctttcgctcctattcttccctgagtgttgctgtacctttgtctgggaccagtggcaacagaatttcttacccatttccaagcaatacactagcattgcttgctatgactaacaagtttgtagtgggaccagggggtttcttacccctccctcagggacatatggctttgccttttacttctgcttcaatgacaacttgtctttgcagcttactttgcctttggaggaaaaagggttccctgctccttttctagaggcagattatttgtttgtacctctttcacaggaccgttgtcttgcttcagggaggtggaaggtcttctttctcttccccagtggtttaggagttttcctttgtatcagagaagagtcaggattggatggggtttcatgtttgtgagacactcagggatctctctcaggtttccagttttgccttccatctttctcttgtaaattcagtgaaagaaattctttgtgttgggtattcccagggattctaaattatcacattaaaccacactcagttttaagaatattttattattatagctttttttttaatctgctattatggtagtcgcctcttcttcccatgctctgacaaagagtaatactttatgtgttctgtttctcctggaaaaggtctgtcaccctttgcatttcaatgtattttgctgtcttgagacctaagcttttgtttggattcaagtaaatttgtgatcttgtagattattgggtttacgcttattgttattcttttgtggctttctgcattgcatcttaagcaaagccgagctctgaatgtttatagttcatgagtgcaaataggaatttgaggaacaagatggaaatagtttttaaaactgttttctttcccttttccttagagttagaatcaattaaaacatagttgagcacttccgtgaatatatgtgaatcccttgtgatgctttaaatatccacagtttacacataaaggcattttacttgatgcaaaaagatttaagtgttttctactttcaataagctcattttgtatttttttaacaaaaaaataaaagtagcagtgggagttttcactgtataaaaagaaaaattggtttatgtgttatattatcagaaaaaatcttttatttaaagagatggtacaggatgatatgattaaaggtaatctataaatctgatccttatttttttataaagatttctatttatctacaaaaatatcatataattgccaaatatctgtcagatagaaggcaaagtgtttatctgaaaatatcaagtggttgttctcaaagagtttatattcttattggatgcatctgccaaataataaatgaaacgagggactaaatataaggctaagcaaataattcaactttactttgcactctataacaatactgaaaagatttttttattattattattattattattgtacttcaagttttagggtacatgtgcacaatgtgcaggttagttacatatgtatacatgtgccatgctggtgtgctgcacccattaactcgtcatttagcattagttatatctcctaatgctatccctccccccttcccccaccccacaacagtcaccagagtgtgatgttccccttcctgtgtccatgtgttctcattgttcaattcccatctatgagtgagaacatgcggtgtttgattttgtccttgcgatagtttgctgagaatgatgatttccaatttcatccatgtccctacaaaggacatgaactcatcattttttatggctgcatagtattccatggcatatatgtgccacattttcttaatccagtctatcattgttggacatttgggttggttccaagtctttgctattgtgaatagtgccgcaataaacatacatgtgcatgtgtctttatagcagcatgaatcatagtcctttgggtatatacccagtaatgggatggctgggtcaaatggtgtttctacttctagatccctgaggaatcgccacactgacttccacaatggttgaactagtttacagtcccaccaacagtgtaaaagtgttcctatttctccacatcctctccagcacctgttgtttcctgactttttaatgattgccattctaactggtgtgagatggtatctcattgtggttttgatttgcatttctctgatggccagtgatgatgagcattttttcatgtgttttttggctgcataaatgtcctcttttaagaagtgtctgttcatatccttcgcccactttttgatggggtttgtttttttcttgtaaatttgtttgagttgattgtagattctgggtattagccctttgtcagatgaataggttgtgaaaattttctcccattttgtaggttgcctgttcactctgatggtagtttcttttgctgtgcagaagctctttagtttaattagatcccatttgtcaattttgtcttttgttgccattgcttttggtgttttagacatgaagatatttttaacaaaataaattgataacagtcctgggaaactgaaaaatataccatcagcgatcagaaataatgggaatttcctaattggaatacagattgaaccagactgactaacaagatcaccagaaaccatagcttaagataccataggtgtaaacttgaaatataagagttgagaaagaggaacaccatgatcctaataaaaactaaaagagatttttttaaaggccttaaggcactctttaaagaaagttaataattaactgcacttaaaataatgagtccagttcaatccatcccagctactttaagtatacccctagaagcatactcaaagaatggaattgaaataactgtctattcacttgggaggaagttaaagttttgtctcaaaaatcatacaaaaataaagcttcaagaacacaaaaaatataaaatttagaaatatggggattttgtttgggttaaatgaaaacatttattgttcacagttctagaggtaggaggtacttcaacaaggtgccagcagattcagtgtctggtgagggctctctttcaggtttgcagacagcctccttctcacagtgttcccatggggtggaaagaaagagctctggcctcttcctcttagaaggacactaattccatcatggcagttactctcatgacctcatctaagcctaattacctcccaaaggcctcaccttctagtaccagaccattgggagctaattagggcttcaacatatgatttttttttttttgagggacaggaacattcagtccatagcagatgtttactgtcactttaagcaataaatttgggggcaattgttacacatcaatggacaactaatatactcccctatagcttattctcagcacaacagcctgagtagttttttaaattttaaatctagtctggttaatctacttacaactttccaatgacttcctgtcactcaaaataagttcttagcgctcaccacgtcctggaaggctgagaatgatctggcatctgactgcttctctgttctcattttccactgttcctcccctcccttgctctctctgcctagccaccttccctccctcccttccaccactgttcgtgcacactcttttctcacagttaccccagcacaccaaccctcttgccacctcagggcctttaccacgtgctgttttctgtcctgtacatgcctacccctggactcaatcattcccttcaaggctcactccaaatgttacctccctgggaagttttcctcagtactgtctctccagcagccccatcccctgttgctgcctggccccttgctgtgatgcatcttttgttggggcacccatgtaggggatgtgcatgcctgtgtgcgtatggggaaatatgtattttttaatggttctgggatgcaaacattttctaagcaatgcaacgcaaaacacacacacacatatgcctgcatatatatatatatgtatgtatatatatacacacacacatatacctgcgttaaaattttagaaaacacatttctatgaaaaaggcattatgagcaagtgaaaacatgaaagataatctaagcaaaaatgttcacaattcatataacagaaaacaatgattatgaaataaagacaatatcagaaaaattaaaaaggacttattgaggcagttcacagaagaagaaatacaaattttctgaataggaatatggaaaggaactcaacatcatactaatcacaaaaatgtaaatcaacagaatagttttcaccaaattcatcagattaaagaatgaaagattgataatatgtaatattagaacataagaaaatatttcccacactactggggagaatgtaagttgttatattggtattgaagaattatttagtaatagctgtcaatttaaatggtacataagattcaaaccaattccacaattagttacctattctatagacgtatacacatgttcaaaaagacacattatttgtaatcataaattggaaacaatataaagtccatcagatgaggcatgatgcatttatgttagcaataatattaagtagccgttaaaatgaatgaggtagagctatatatacttaaatcaacaaaacccataaatagacaaagtgagttaaaagatatttttgcagaatgatcctatttttgcaagtatatccaaaagtttttggaaggatcaataaactgtttatagtgattacttctctggagggccatatgaatttttgcacctgcatctgactgtcttttaaaatttgtacaacatgatatacattcttagcttgagtaagaattacaaagaaaataacaaagaaatgtgattataggtaaccgtgtaaatacaagttttttttttggtgcatctagtttttagtcacattaatataagttgtaagttggttacttcaaacatggatgattgcttaaaaaaaatctacattttcatcttatgttctaaatgggtgttgttttattttagtttgtcttttgtctgctaagccctttcctcaaaatctttatacacttgaatctcttccttttatacttacatcaagtgttgttgttttcttcgtgaataaaatggtgtcttatttggggctagtgtgctacaagttgtctcttctggatccataaacatctatctactaacagtcattacttaaccagctattaaaaaatagcttcagaactattttttgtaatctatacatatttaattattttggcaagtcgcctatatagcattttgatttgaaactacccagaagattataaaattcagatgaagcaaaagagaaatatcaaattttatctaatcattggccttcttgtttcattttaaaggtaaaatattgacttaaaaagtttaaagattaggtagatcattaatataatagaatatccatctgaggtaactaagtaatactcttcaattctgatataagttttagtgcatttttatttcctctctctctctctttatatatatatgtatgtatgtgtgtgtgtgtgtgtgtgtgtgtgtgtgatatgtatatatgccattatatatagctcctccagaaaaatcatgatttttacacactccatggtctgatggtctcagcacttaaaattgtattttaagctaatgtaaatcatattttattgacaaaatatctgttgctgtataacagtagcatttgtgaagttcctagtatttaccagacatttcatatcaattattctgaatatgtaggaggtttgtggtttttgctcatgttagggacctagagcttataggaattaagaaatgttctcttataactcagaccaggtttattttagactcggtcatagactaagaaaaacaatattgtgtatcctcatactttttgcctccctcaaaaaaatgagtgatgactacctcagatcttccttaaacacctatcaattctcttttctctttattcattaacttttattttttctttattattcctatgcaattggaaagaatcagagttctcatcaaaatatgcatctactgtagtatagtatgctatatttagataacttgaagaaatatattgtaatgatattaggacatttaatgtgtggtgatggtctgataaccatataaaatattttgatacacatctgttcctttctttggttaatacaaatctgcctgcactggatagcaatgcactcctatccccagcattgacacttttatctttgttataaaaatgagctttcataaatctttattgttaatcatagaagaatgtgcatattttctgtcaaaacaaattaccttgatattttagctattaagttatttgtaatttgtcttaaatagaggaatttcaaattgcaaggtttaactcgctattatttcaggtaaaaaacaaaaagtaccctttttcaagataaaaaagatatagagatatacataaaatatcattctgagacaaacattttcaaaatgtttgtcagtgtaactattcatgccatgtttaacatttttcttttcaaagtattttatatatgtggaatttcaatgaaactgaacccattctgagactgcatatttgaaaaaagtaatttgtatttactactgtactagccacagaaacataactgaatattcttatgcagttttgccaaaaatatatggcaagtaacttttcatttcaagataagaaaactcatttagaggaatcaaaatgaaccaaagagtctgagaaatatcattcacttttaaggtagaaccccaacctcatagaacacggataattttgtcttccatgggacatttgatattatctagaattattttgggttcaactggagagggtgttgctactggaatctagtagatagaggtatgtgctgctaaacattgtgcaatacacaggacagttctccacaacaaaggatcttcagttcccaaatgtcagtaatgccacagctgagaaaccctatcataaaggatggtggggaataaacctgccgccactgcattggtgccaaaagtagaaaatgagacattgagacttaggaagtttattgctcaccacatgagtatcagcatggttgcactggttaccctgcccgggagtctcagggagcgacatgataggcctggatgaatgctgagcaagcagggagttgtgccacagctgcggatcccagggcctagagatcagcactttctgagaaagcagccggcattatgcaaacagcaagatctgtagtttgcctcccctgtggagctagcagttacacagcagtcaccctgtggtccccttgacttacttagctgcctatgtgagtagcaagataaattgttcagtatcaaaagagaaataagccttacaatctggcaaactcagcaagaatgtacagggacactcaaggcccacaggggactgcctctcccaatacccataaataaacccttgaaaataagtacaagtcacagtaagggaccaccttatcactgctgttcatgaaaattttaggtatgatcacctcataagggttccacgcaatgacttttaagttcacagggggaaaaggctatttaagttgtttttctgctatttaacctataatagccctgtaactcttctccaatatcctcttttcatcccctgaacaccctagacatggtcccaactcagggcttttgcacatgtttctgtgtctggaacgttcttccatcagatgcccccatgcctctcttctgtaagtcctagacgtctttgcctgcagaccacctcctcagtcagcccttctggccagcccaataaaattacttacagccaccacacccaacccagctctcttccctttcctgcctttttctcttttgtgattattctgcgtatgtttcacttggttgttgccttgctgcaagaatgtaagcttcaataggtaagagattttctttgttttgctcagtggtagatccttagggcctagaacagttcatggctcatattaactatagagcaaacattcattagatggatgaatgggtactttaatttagttgtcattactttaaaaacagtaattaaactgattaaaaagatctaagaatcattaaagaatgatgatttttgttctaatataagaaacaattaagatcaatttatcattttttgatcattcgaaaagtcattttggtttttactgaaattcctcttataataatcatccttggatgatttttcaggaattttcagttgaatcttgtaaaaccttacatatttttattgatttatttaaacttctgtaacgttttaataaaaaattttagattacaatttttagattacacataatacacccgtcttaacacactttcctagtctttctgaatcaacatctcatttttttttgcacagctttagattctttttctttaagagatacatatctaccttgaataattttatactatatacttatatgaataagttattattcactaatacctcttatacttttactgtggaatcataagtatttatttatcttattataccacaattgttataaaatatattattaatatcatttaaactaatttttacaggtaatgctacatctagccttgatatcttctattatataaaaacaatgcatttacaaagcaatttattatatttttaaaaataaattttgaagtaactttagtcaagaatttgcaaaatagtacagagaatttctgtatatttctctgtcttaattgattcaggcttccataaaaaagtaccatagactgggtgacttatacacaacagaaatttgtttctctcaattctggagcatagaagtctgagatcagggtgcgagcatggtcaggttctggtgagggacctcttccaggttgcagactgatgatgacttctcactgtatcctcacatgaaggaaaaaggattagagagctctctggtctcttcttataagggcactaacttcatttacgagggcaccaccctcattaactaattacccccaaatattttcacattagaatgaggatttcaccatgtgaattaggaggacacaaacatttagtccattgcgccctcacacagctttttctaacatcttgcaaaactgcactgcagttatcaaaactagaaaaattaatgttgatgcaatattgttaatcaaagactttattcaaatatcagccgttttttcataatgagtttagttatgtcttgtccttctcatgtagcttataacagtgccccaggttttcctcatgttttcttttaatatttcacttcccttcatatggacatttgttaaatctctacattgttagtcatcagatgtattttagtaagaaatgagaggtatcatttattgagaatttgattatgtgccaggcattgttctgcttcttattctctcctttaatcctaatatggagagaactgattattattcatattttcatttgcaaaagctgaagttccagtttaagccatgtatcaaagggtaggcaatttgccaaaggttatcaaagtggagaaatctgaaaaaatttgcagactttcactatatacggtctttgtgattggaaagtttgtaccaaaagcatcctctactgtagtaaccttattctagctttattcccctcccttcttccatgccccacttttccttcttccaaggaaactttgcctaggttaaactttcttcaactccttcctctatttatcattttttttctttacaattctagaggtcaaatttgaatacaaagcagggtaggcacattagaacatgagttaaatttcaagacttgctatagtgactactaactaatcataggtccttgtgagtcaacttacttttctgggtctttgtttcattatttgtagatgtacaagttaaacttcatggttttgtagcttcttttattcctagcatactgaattcacaacaaggctgctgcctaattttattatgactttgccccaatgtactgtttcagttttgtaagagtacctatgtacccaggagggttatgactgtgtgtgttttcttagatatttatggaaagatgttattagataaattattattaagaacttggcctcctttaccacatttacctagagtccacacaggcatttgtctagcctttttctctgcgtatttatgtggatctgaaacaagtatagttttggttgatttagcctggttatctccaggagtatggtcacatgagataacacatttgttctatgccatggtaattgtaaatataataaagatttacattctctaacttttaagctcaacttggaatttagtgatcagtatttttcactaaacatgatttctaagcatgtatatgataccttgtcttttttaaagttcagtaaacattatcagttgatgcaactttttgaatgtttaagggaccaagtgcaaaaacatgaaacctattagaaaatatagctaataaaaagtcaacttctgtgaaattaaattgtccaagtgactactaatagggtagacttttcatataatatgaaagagattgaataatttactattgatgaaatcggtaccaaaagtgttttacttttataaattataaacttcacagttctaaaatgaatattcgagaataggtgtgatatattgtgttccaaaaatggaagcagttttagctttgttttctcttgataggcagagttaggtagtaaaatggtgttaatggaaatgactttctccccattcacaatgaagactctaatattatccaaagaattttagtggaatattgtacaatgatctatatgccccttgcgtatctctagggcttctttaattgaaagctattttgtcctctgaaatatatacttttcagtgttttatcggaaaaggatgaatgtgaagaatgaccttcttcttcccagcccattcagcaaaatcattttcagatcacagtcatggtcattgtgtactagttaggattctctagagaaacagaacaaacagaatgtatatatagagagacagagaaaaaaagatttattaaggaattaggtcacacaattatgggaactggaaagtccaaaatttgcagagtacatcagcaggctggagacccaaaaagagctgatgttgctgcttgagttcaaagacagtctggaggaagaatttcatccttctcaggggatcccaatctattcttaaggccttcaactgattggatgaggcgaacccacattatagagagtaacctgcttattactcaaattctactgatgttcatataatctaaaacatacctttacagcaacatccagactgatgaccaattatttgtgtaccatgggctagccaaattgactcatacaattaaccatcacacatagttagctacacaatatgctttagatatggttgtgtaaatcaatgcagaattcccataagaacaatagcttggaatccagaaattattatttgtgttcatatccactcatcaatttgtttgctctatctatctgcatttattgctttaggtgtggttgtgtaaatcagtgcagaattcccataagagtaatagcctggaatgcagacattattatttgtgctcatatacactcaccaatttgtttgctctatctatctgcatatattagtgactaccagattatgacttttcaggaccttttattgtgagacatttctccatggatctctcacatttctgcatgtctcaaagtaagacacttactgttttttcttcagaagtatcttttcaaagatgcttgtatagcaaagagtattgagagaaagagacagtcacttgccagtgaaaacagcaggccttcttactgcccattataataggcttggattttctaaactcagaattcttctcctgtaatgccacccacagtatatgaaagcatccatatggacccctcccagttgctcctgcggacttcgaagtaaagggaactgacaccaatctgctgatgaccatcctgcttgttgtgccatgagtaataaaatcttttatatctgatccacaagtcttgtgtcttctaccagaattcatggaacaaaaacaggcaaacttgtaagcttgaaagtatgataaaaatctcagtccttaaccattcttgatctttcattttattcatcattttagattattggtaactatgatgcatactatgacactatctttacttgtccatgtcttcattgtatcaaagataaaataactgaatgtcatagagtgatgatctgtatcccctgacccattgagagtgacagtttgcattggataatggaaggaaaccactatgttttaatatattctgtttattctggaaaataagacccttatatgcactctacatatctctttgaatacaacatcaaggtattttgttctgagtgagaatggcttgtgtattcaccctccttgacctaacagctaaggagaaatctggaatgaaaatgaggttgagaaatatcagcctcagctggccattagggacaggtggtatctttagtctgtgaccagagacccttgaaaccccatgagacagcttattcagcaagcaaattttactgctacactattaattaaatcaatgtcattccctcatgtcagatacatatgagctatttatggcctcagaccatattgaaatgtacaaagagaatatgtattaattgaactacaagaataggagacaggaaagttgtccaagtgctgactctagggtgaggtaaggcatcgctggccttaggcatgtctacatgcatgatgcagacttaattatttaaagcactttaccatactctgtactcacgtagacacttccgttccaactcagaaaaataatgttcatgctaaggatagataacactggataaacttgtataaggtagaaaaatgtagaaactatggttttataatggccatttttgggtataatttttagtcagtttcttattatatgcctcaaattctgttgtaaagcatcaagatctatggatcatttctggaggtccagctcatgtgccataacaaaaataaggccactgctcacatcctttcttttaaaaatcatggacccattttaaaaagaggcaattatattttaagtatataaaactttagtcttctgttccatgaatgtataatatctaaaaatcagacctgtaatgaagttttcattttagaaatatgtttttctcccaaaaccactctctttaaaaatgtttatttggtctagtctaaagtattacattcatttgaagaacagtcctatttattctttttaaatccacatcattattcttttaaaatttacataaattttattatatgttatttatcctcatttccttagtggtaggtgtctcttataggaagtaatattgttaacatcaggaatttttcacttaagtaaaccacgcacttcattattaatcctaaatttgaatgagatatgtgagtgtgtgggtgtttaatgcactatttatatattactccattcatataagttattttgaaattactagaacaaagataacatgttgtagaaattataataatttgagaaaaataatattcttaagttttcagaatgcaagaaaaggctgtttattttctgagtatgagtaaatgtgcaatatcttcacttagcatgaaaaatacagacataatattaatctaaacaaagtttacaagaaataattatctactggaatttttttttcttaagaagtacaaacatgttaactccttgcctattgatgcatgaaaatgggtattttgtgaaagctaagggagattttgaccagatgtttaaaatagccatgctcttgtttgctattagttatgcaataataataataaatagtagaaaatatgaattttataatgtagaatacttgaactctatcccaaagtatacaaagaaatctactctaccaagtttttctttatcaaacatcttccttgcattttaatatcatgtgtttcctcaagctaataattagactctctgtagtcactgatgtttgtttggcctttgaatgccacaaccttcatgtgtccctgatctgtttaaagggcttttgttcatagagtcattattagtcagtctcaggcaggacccaaccagacccctttgaataaaatatcaaacgtacataagactgatgttctatatgtctaactgttccatctaatttataagttaatttaaagcagagaccaaataatgtggaagcagaatgcttcccttatcaatgtatatttgtggagaaaggaattaattgattgttcaagctgtgttctgcaagagagaaattcctccctgccccattaaagataacctaaaaagattcccaatttgctcatagatctttttatacattttcttatttttaaatttttattcattatcattctccctataacagaaaaaaaaatcaaagcacaaacagaaaacaaccttaaaaaataatctaggctaattcctttattactgtcttaatagactagatacctagcctaaggaaagattatacagaaattaaaatgatattattacaggaataataataatcattatatattatttagtatatgccaaccattaagaacatcacatatatttatttatatactatttttagttaaagttagtcactggtaaaaatgcaagaaaatattatagaaaaagcattttaaaggtgaaaaacaaaagatacaatcctatcaagtagtacccttaaagaaaagagacagaagagatataaaatattttttaatcctgataaattaataaaaactaacatgaactgagaagttactgtattccaggaaatatgctaaatgtttacatgcagtagctattaatagcttgccctttgtaatcatcctatgagataggtgctatgataatcttcactttcctgatgcgtcactgaatttgcttacccaagtgtcagaaacaaaagtttcatccatacagcattgtaactgcttcatatgaaaaaaataagtctcaagtcatatgttaaaaggaaaagtttcaaaaataagagggttatccagcatgaagactttttgtactggggcagatttcacatgtaattcaatttttgaaaaccaactaacaaaaaccagctatagactataataaatagaaaagggtaaataactactctcattccattataccagaataggaaagtgctcaggaaaattaagtgtcaataagtgaaggcaaaattaaacttctttttctaagcataggcacaattaacctatgaaaattacttatattggatggtaatgaagcagatagctcagcgaaattgggaacatatctgattcactgtaatggaattttcagttagatcagatcacattttgtaccagtcattctgaatcacaacacatgttgattagcaacaagggttacaagggaaaattttactgtttttcctgagccagaaagaccatgattaaacaacatgataatagtaaatatccattgtgtctgcatacagggaaatgtgatctagatttccttgtagtgtgtgaatacagagctccctctctaatatatactacctattgcctttgtccagtaaattccagttctgtaactcatgccaaaaaggaaaagaggaagtctatgtactctaccttggttttgagagaaaagaaggagttcacagccatttttcatgcaacagaagaatggaatcgtagttgtaatgttgtaggctgaagtgtggatgaagacaggatgctacagaaactcaccctaggaaccgtgcagttttgagggtttccacactgtgggtcataaggcttggatatttatccaattgctactgcttcgtgaatgataatagaccataagtaactgccttcactttgaagttttagttaccccccctttataaaataaagggtttgaattaggtgaactccaaggattattatttgtctattacatttgaattatcactgcctgtatctcatataatcctgtaataggattctttgcaaggtaagtctaaaacaaagagaagtattttggcgattccttgagattgactgttgatgcagttctgggatgaaagcctgtcctgggctttcatacttgtgcccctgctgaaactgttcatccttgggcaagaggacattcatattatttcgattactcagattacatattacaagtttgaacatgctgacacagtactagtagatttttcttcagaacagtctacattgctgaatttgtcacttatattcaagctttttcgctcctatcacttgtatgttcccatttttctgcagatcactgaattacaataaattgaagttcaattaaaatctgagttaatgaccatgattaatttgttaacactgtgtacaattgagagagggcctattattcacataaaaaggcattcaaaataaaattgaaaaatattctatagaatagtgacatttgcaaaaattacaccataaagatttcatggatcagagttctttcctttttgaactaaagtttttattaggtagctattagtagtgaacactaattttactatagttgtaaaagcaatttctttcttgtttttgctttttttatagatctggataatgtagagggcattgctgtggactggattggaaataatctttactggaccaatgatggccataggaaaaccattaatgtggccaggctggaaaaagcttctcagagtcggaagactcttttagagggtgaaatgtctcatcccagaggaattgtggtggatccagttaatgggtatgcaatatttgactagctttatataagaaaaatgataatagataaatttgtttcttacatagttaataatagttttatttaaatccatatgtatagctgattttccacacaaatggtcttagtgggtaaagttacacatttaagggtttttctgtactagagaatgtactaaagaaacatgtcagaatacattgacctgaattagattactgcgcaaagatgtattacttgatttattcaaaattagcactataattctgtactttaagcagcctgacaccaagataaataatcaattcaaccagagaatcaatccattttatattttaaaggctattgaaatttagtgtattcaaaaaaatagcaaaagttttatacatttcctagaggtcagacgttttattaaatgggttactctgaccctattttgtaacccttacaataatcctctgaattcgttgctattcttatccctgctttataaagttgaaaatgataactgtcttgccaatcactattcaattagtaaaagactgggtctacatttattcccaggaagcctgtctatatgactttactcttagccactaaacttcactactttttattagtctagggtgacaaccacataattttagataccaccgtaatttccatatagggacatcattttatagtatgtattacttgttttagaatgaaatattttgtccaattcttggtaatatgttttcttttgatttttaatcagcgctattacctgaatgcaaaactgtacttatagaaatatcaaagatggaaattttcatagtattttataacttaaaaatgttattttattgaatgttttacatgtatagttttttggagtgtttttccttccatggcttacatattattgtttcaagacatcaaaaaatagattttctttacactttactgcacacatacaaaaaatacatattgtataggaggcatgtgaatcccttataaaccgagattaccaaattgcggttcctagaattgtttgtgttaagagtagctccaaatacaaccagggttcctaggcagtgagtgaactcattgtaagtgtttcatagggcataattataaagtaattttggtgattttatgtttggattatataatcatctggtaaaccagccttagtttttgaagagagtatttgttccacactgtccaaatctatctgaagaaagaaatttcaaatctatcttaaaacagcatcttctttctcactgttgttagagaaaatgttttctgatagagctaaagagtctttgttgtgcccaagagatgacataaatgtggaattcatagaaacatataatttagaagaaaattcagagcccactagttccatctctctcatcaaatttagaaatcctcttcaacgtctcccaagtttgtaggtatccagattatattagaaacctatagcatctacatagttcaagctctttgaaggcaattctgattaatagaatatttttttcattgagacaatatctgcatccctgtcatgtcttcctaccaactgtccctatatacaaggaataagtgcaatacatattatttaaaactagacagtgttactaagaaacagaggaaagagcttattttgactcatctccagaaaggctggggatagacttcatcagataattacattcaaacaggccttgaaataaagggtagaatttttcttgctatattagcagaaggccagattaacctatgttttatgtgaagaatacacggagtcccacctagaaaaaatacttgtattagttcctgcttatttaataggttatatttctattctgtgtgtttaagaattctcattgtttggtactggtattgattgtaaagctttcataatttttttttttttttttagacaggatcttactctgttacccaggctggagtgcagtggtatgatcttggctcacgacagcctcgatagcctggactcaagtgatcgattctcccacctcagctttgagactagctggaattacaggcacaggccaccgtgcctggctactttttgtattttttttgtagagatggggttttgccatgttgctcaggctggtctcaaactcctgggctcaagcaattcgcttgcctcagcctcccaaagtgctgggattacaggcatgagccatggtgcctggcccacaatatatatttaagcatatatatatatgtgtgtgtgtgcatatacatatatacatatatatatatgtaacctctctcagattggcattacttagaaaaataactttcttatattttgtttaaataaaaataattttaggtgctggatcagttggcgaacaattccttttctcaaatagtaaaatatgcagtatatttagaatatccagatttatctctgtctcgtgtgtgcgtgtgtgtgtttctgtatacacaggcacatgtatgtgtgatttgagtcacagaaaaaaaaaacatgttgccatgatcaaaaggagaagctatagggtaagataactgcaatattaatgttataaatgaacaaaaataaaaccgtattgattaactgtatataagaaaatttcaggaaaatatcaatagagatgaaaagattgcatatttcacttttatatagttaatttatatagctgatgtcaagtagttatacctaactacatagaattacagcaaatagaatgactatcctttttgttactaagttgtcccaattaaaaaatcactttaaggaattacaagatacaatatagaaatatttccatgtttatttctaggattaatacaattcaacagtctcaatatagttccttgggtctaaaaagggcatatcaacataactggaaaccgttaagagaatttaaaaagagcttaattggtatgaaataatgggtagtgtgttcatcctcagttttcccaagtctgccagcttagatcacagtaggatttttcgtcatggtgacagactttttccaaatgcacttagaaattcttagggtctacaaaatgggggaggcaggggatctaataagggtatttcaagggtcagcagcttagcaaagatttgagactttataaagttgtatatgagatgactggattaaacctacactttaattaataaactcaggaactttcacatgaccctaaaacaacacatgtggtgggttttaacctcattcatgaggcaaatggaacattagttcaagaccccctctcctactgttagagctttacaaaagatttgtttttaaaggcagatgcttttgtttgagatagacattaaagctcaaaatctcaaggtcagtcaacttgctattactaaacttacgtgcagctaaatcatcttctgtagattttggggtaataataagcagcaataaaacatagatgatttgcatcaggaagacaaattagacctagccaaacaaacccaatatgacagtgccctttagaacaaagtcagtccaattacctgtcttaaagaatcataattcatctgagattaaataaagtctggagtagatcattaactgtgccgtgggttctcatgtcagtcaatctgctttttaatcacataattgattatatactttttgaagtggacaacatttaaaatagtaatgacccagaaaatcatttcctttacttggtatcaacagcccccaaaaatagatatttggcacttactgtcaggttcattaatgcatgaagccagtaagtgcgatagtggtggtagttggcttttctgtaataagtgtaaatgcacagttctaccaaacaaatctttgctttctttaaaacttcacagctcccccctctttgacagataagcacttagataggaggacaaatcagaatgaaactagaatttatggaactgccaaatctgaggaagtgtctatactgtggctggttgtaataacatgtatgcatttttgttgtttttttaatgtcttagttggatgtattggacagactgggaggaagatgaaatagatgacagcgtgggaaggattgagaaggcctggatggatggattcaatcggcagatttttgtgacttcaaagatgctgtggccaaacggtttaactctggactttcacaccaacacattatactggtgtgatgcctattacgatcatattgaaaaagtatttttgaatgggactcacaggaaggtaaaagacaaatgctgctgtttttaacccacaggcttctttttttcacagagccttgttgtgttgtgttaaaaatactttcaagtttatttttactcctctgaggtggctgccaatagtctccatggggtggctgaagcaggctgagcattaagtagtgcagctggcacttgcctctgggagaccaggcccagctcactgtggtatgccaggatttgtgggatttctaaaagcagctctcaggatatcagagctgttttaaaatgcagtttttctacattattgatgagttttctataaccaagcaaccccactctattaaaatatgttcaatattttgagctgaagtttaacattatgtattacgaggaagtaattacattgtatttagttgagtaagtaacttggtgacattgaaacttaaacacatagtaggaatgagctgaacttccagcttattggtatgaagaggtatcagtttcctcttgctttttttgctagagtaactgcaaaatgattttgaaattcttaggtaaaattgaggatgatgcagttggctgtgagacagaggcatagttgacaaaacaaaacctctatatttcatgttttagtaatctaattacaaataacaccaataactgactttaactgtgagtcgaacaatagaaaaaggggatgttagaaatgaccaaaatgcttcctttaagttacatttcttttctttttggaaagaaaacctgcacatttggctaagcctactcattatggattctgttttagaaagaaatactacactaatcagttaagactgctctgttgttgattgatgctaacaatactgtaaatattttctccaaataagtacaattggttggcattgaacctaatgtcacacacttaacaggtgctagataaatctttatgcttccttagaagatgttggtatgtaaacaataaacataatactttcatggccagcacattttggcctacataaaggtgagaaaaaaattaagaaaccatgtcaattattcaatgtatgataatttggtgagaagaattcagttaaaaggagcaaaatttaaatttatgaccctaaattatttagataattttctcaattctctaatattaaatgaagtgaatacaaaatctttttcatcttgtattcagtatgtttttatttatggtaaaaggtgaaaaagtattctcattattgaggtataatttattccccttctaaaatcctacatgtgaaactggacttaaacttttatcacatgattcctccatttaaggaacaacaaaacaatataactagaatgtaaatgaatatattaacataatcagaatttaacttgccagtgagtttttatctatttactaataataaatgtgtctgtgtttaaattaaaatctttaccatcttttctgccagatccaagatttcttcaatttgcattggctcaattaaagtaggaggatccttttgactcccaatgctgtttgaacatgttctatttgttggttattggaagagcaattttgtaatacacatgattattcagactgatttctatcccaggatatgatactgaaatatcataagcaaaaggaacaggaatgagagtagggaaaattcattttagtatttgcattcttaaccgtatttttcgtgccatagatgaaagaatttacattgataaaatagatggtttaataataaataataaatggtttagataaaatagatggtttccttcaaatagcatgccctaaaacaaaaaatatgctcacattgtgaaatccattttttaaatctatcagagaaaatgagttaagatatgagattattatctgttatacttattgaatatcactttctctaaatatctagttatgtttctaaaggtcagttctgatttttcacaatgtgtttatattttacagattgtttacagtgggagagagttgaaccaccctttcggactgtcgcatcatggaaattatgtgttctggactgattatatgaatggttccatttttcaactagatttgataacaagtgaggtgacattgctgaggcatgaaagaccacccctatttgggcttcagatttatgatccacgaaagcaacaaggtattaaaaaacaaattaaaatgcttctgagattcacatataataatacttcacagaagttataaaagatttatcttgacagtgttgctaaagttttatgataaaagatgtcaaattccctccaaagtcaatcaaatcagattttgttatcatagaaatttactttttgttgttctaaatatcctgagtgattatccctgggaattccatatgagtgaggtttaaggttttctccaagtatttccttctcttcatgtgattttcattgaagaaggctattagttatttaaagaaaaacaattctcttaatgttttcaaagcgtaagtattgttaaatgttagaacttccttagtttgaaaagaaaactactgaaaattgaagatgcattatacaagaaaaatgttattttttaaaagtatcttagtaagtttataattagtttcaatgtatatttaaggaacatgtaattattttagatgacacaaaagtaaaaccgtctataacaatattcatgtcttcttaaaatcagataatattattttatgttttacttgcataagttattaatactcattaggacatctacacatagcattactcagaatttaggtattgaatgaagaaaacagtttagtaaattatgtggtaggttttttatgagtctaaatagtcattgttcctttttttaatagacatatcattgtaaaaatttaatgagtatgtagttcaatacatttaagatgaataaattatattatgaatttcctaacacgtatgctatcgattggaaattatctagcaacagagtttttgaagatatttcagctaaaacaacgatcctaaagcaaactatctcattcaaaagcttcagttttttcccactatattaaaattgcttcaatggaatacaaatgtaattttataaaataatggaaatgtgtacatgagaaatatcaatagctgataaaagataaaattatcttttagaagaataaaacttaaattatttggatggcacaagccatagctatggacaagaaatgaggaatagagataattgcctggatagattaaaaggtaatattttattatattcatataaaccctgcacccctaccacactaccatagtttgcctatactgagcaagagcccaggctatgaatagaaacagtccttttcatattctgaaagatctgcttttcaggattgtagttctctctaacttcacaatccaatcaatatacgatcacattttccatttcccttctctttagaattgttcctcttgaatgttattgctgaatttctgttgccaaagtccataacatttttaccatcttcagagtttttaagcttccagttgctttagtgagttgtttaactaaatgcaacgtgtgtagtgaaaaatgccccgggcttagatctgggtcctgacatctccttttaaaactttggactcatcatgaaagatttaaaaaaataagaaatactttcctcataacatttccatgatggttaaatagctatgtgttatttaaaagcagaacttacatagcactgtgcctgacaaacaaattatggtaggtaacttacccctacaatttctctaataggaggtatttgtttttaaggttaccctacatataggcattttaaataaatattcgatggaataatgtatcataataatatacaatgaagtacataactctgatagagaatatttttggtgttctgaaaggtgccattgatgtataatagtgcaatgttattccttagatggacaatgatcttttaaaagtgcttttccccattttaattgaagggacattaaaataaaaactgagctctgattactaaattctttttcaacttttattgtagaaaccataatgttttgtttactgagtgaatgtattgagaataactgattgataatttttattaacttaggtgaattaataaattgatttgtgttttctaccacttcttcatgtagctaagaattacctagtacttaactatatgtttgatcaagcaatacaatatagaaattaaattcctggttaataccattttttctcagtcaagagacattgatattagataatctaattgagttctaaatttttagtatcttttactacattgatcaaagcagctgaattgtaaagcaaaatgcattccgatgttcagttgtgagcagtttgtcttaattattataattttctctcaatggtgttactctttgcatcttttgaatctcagacattaatacatatttgaaagtagatgatctgtgtcctataaatggtttcatattgtcctgttagactgtttttttttttccctatggataaaatatagcaattgaagagaaaatcaaatctctaagtagtacatatctcctttgcctaatggaataaaataaactaatcttatataaccatacagtctctctctctctctctctctctctctgagagaatacaaattatatgatgttatttatatatatataaaaactatatttatttatattttttatacatatggatagatagtattaatacacacacacacacacacacacacacacaccatctgacaagaccaccatgaaaaatattcaggaatgctaataatgtaatttataaatattttagactcagtgtcagaaaattagtcaactaatcagatctccccttactcctcatattagaagagacttgtcaatagccaggcacagaggctaatgcctgtaatcccagcacttcggcaggctgaggtgggtgggttacctgaggtcaggagttcgagaccagcctggccagtatggtgaaacccctgtcactactaaaaatacaaaaattagccaggggtggtggcaggagactgtaatcctagctactcgggaggctgaggcaggagaatcacttaaacttgggaggtggaggttgcagtgagccgagaatgttccactgcactccagcctgagttacagagcaaaactctgtctaaaaaaaaaagagacttgtcaaattacttggaatataccagtgaatttcaggaaggtagatataaatagataacatattaaacagaaagctacctctaggaaagaattcttaagtaattcttggggatttagtgtaaagatatttttctcatatattactgtgatttcttttggtaaaatgtataagctttcctttttcattaacattagatatctagaacaagttttaaagcttttttcttctcctcctcatataaagagcagcaattgtgtaaaataacagactttcctttttattttctaggttcaaaagcacactttgattttttgcacattttggggaatgagataatcaaaactaagtaatattttaataagggttgattaaatgtatcctattattttatgacaaatagaagacatttattaactaagaactagctgtaattgttaaaactacagggaagtggactaagcattgttatttaattttcacaacatatatttaaaataggtactattgatttatattttacatatgagaaagccaaggatcagacagacatagccattggccctcaagaaacacagtaagccagggataaaactaagattcagattcagatctgtttgaccagaaagtatttttctatgtttaatttgtgtggccaatttaatttctcaaaattttatatctactatacttttagatagaagaaaaagaatgtgaatcttttttggtcattgtaattttatcactgataaattttgcattcaaatatatatttttaatataaagttccccttgactacttttatagaatccaggatttagagattttagattacacaggactagtataacagacatagcagtttttatttaatgtatgacatatttattaatcacattattttataggtttaataagctttaggtttggtggtaggaccatcataactacatttttctttctttttatatttcccatttttgagataatcaccaaacctccccgccaaaacaaaggagtatcttaatatagttacacacacacacttacataagtggcttcaaagcatgtcaaatataaacacagtcttcaaggagcatctgattctgaaagagaaaaaaagtaagaagcattttatcctttcttcagattgactgacatcgttcaaagtcaattcttctgaaattatgctagattaaatgcataattcatctggcctcaggatctcactctctcagcctttatctaacttttggaataaatggggtatctgctgcctcttctaaactacaagctcgagtatctctatgttagttagaaaaaaaaaaaagagaatccccatagtttcacatattttatattaactgcagagaattctcactttgcctgtgataagacactgagaagtcaagagtccaggacacatatagaaaaggaggtttctttgttccaccattttgaagaaaattcagattaaggaaagactgaaacaatggaattcttttgcgctgatttctgtattctctcatttgctcaaaaaaagatactttattaacaaaagttaaactgctaaggtctaaaaacattgagatgttaatataggcttgtgaaatgttttcacatattatttgtgtctttactcccattctttggaagttgtatctatccacaaacttgtacctgtgcctgcactccaaatgattgttcttgtcattcaaactgctaactaaaagttgcattcaccacttacttatttaactaatatttatcaaacacactctatgctgggcactatttgcaaggtgtagaatataattttgcttctggaagatacaagattgggaaaaagaaagacaaagtttttgatgaagccagaaggccttcttcaactagataatgaaagctattcttcatttgctttccttacatatttgatttttaaaaactatctgcttcctgaaagtaatagacttttgttggttttggtatatttagtatgtctttttcgatctaattttattttatatataaataagttagtgtttgagagcacaattttggagtaagaaaatcttatttctaattatttataaataattataatgattagaaataaatgataatttaataagaattatttcctatttctacatattggaagggtcatttagacgatcacatattcagtattcctacttgcaaatgagataaaaccttccttgtaattttattttaaaaaaattgaataaaatataatgtatatgtaaagtaactagctgtgggattgcttataagttttcattaacagcagctattaatatgttaatgaccttttaattgatatataggtataaaaatttttagcaccatatttgtagttacttaaacatgttttaaagaggatatttttacataaaatatttttctagttctcagaacttcaaaaaatactatcatatgagatctatctggaacatattaatgaaattcaaaaatacgttgggtcactattaaaataaagatctaagcccttctgaggagagatatggaattattcaaattaatttagattttggatttctattatgacagaacaaataaccaattcctctctcttaatatgtagtattcacagaaaagaaatatatttcaaagtttgaataatgccaatttatttttaaatacttaaatttcatattcatttagaatggtatgaggcataccactgaattaaggagtatgatatttagcatataatttcaacgtttcaaaatgtcagtaattccttatttctgactgtttaaattctttatatatttctcaaaatatgttgaattaattctaattttccagaatctgaatgctactaaaatattaaatatacaatttcatcctgtacagaatgtgtacaacatagaataacagtgcatcctatgaagcattgcatttttattccatggccatggaataaacatgacgttatctggaagctgcttaaagcatttatgcatttcctattaaaaaaaccctgtattaggcttaattaccctctgaattcagaaattgatactgtagcatgcattattagctttcttggctttcatatgtattttttaatttgttataaacatagtgaattaaatttatttttcaagataatgaaatgataatatactttaggtcatttgttctgatctacgggcactcaatgataacctgtggtaatgtgttgaatatttatttgtatagaggagcattttagagtttttttcttacttcttattatcctccgtatagcacatccaacctctgagcctcagtataataacctagtctgtcactttaatcacgtttctggtatttgcactttaatcattttattctcttatcgtatggctctaagtaattaaaagctctttatttttaatgtttcagtaaaatattctgatataaaaaatgttatttattgatgctttcaacaagctgcaacatagagtaatatgaccctacaattacattacctattgtattgctagtgttgagttctttttaaagtttgacacatttatagataagtagagtcatacgtggcatagagatggttcagtcaatgatggactgcatgtatggtgatggtcctataaggtaataataatgtatttttactgtaacttttatatgtttagatacagaaatgctattatcattgtgttataattgtttacagtattcagtaccgtagcatgctatgtacaggtttgtagcctagaagaaatatatgatatataggtataaaattttttagcactgtgtttgaaaagtggtcacttaaacatgttttaaagaggatatttttacagaaaatatttttctagctaaaattttttagcaccgtatagtttaggtgcacagcaggctctactatctcggtttgtgtaaggatgctttatgatgttcgcacaatgatgtgattacacatttcttagtatgtatgcccatcattaagtgatgcgcaagtgtaaatacactttcttcctttcctttccaacctgtaagactaattggcaatctaaattgtatttattcataccgacacctttacaattgttaaaggatacaacgttacagctagataggaggagtaagttccaacgttctataccactgtgggatgattatagttaacgatgatatatagtttcaaatatctggaaggtggatattgaatgttcccaacataaagaaataataaatgtttgagattatggatatgccaattaccctgatctgattactatacattacgtttactgaaacatcactatgactatgaacaattgttacttgtcgatttaaaaataattactcgattttatctgagagtctgcaagggtgcctcacatacgttcatgaataatgtatgttattcataaatttcctctcatgcctgcttaatttatgtctgttgtatacctcgttagtgcctctgctttttagatccactgggagaacactttcgccctggtgaactgtacattcaccttataccagcaagcctgctcatttttgggtcttcacagatgtcctatgattcctggagtcctcaatacactgcctttccggtgtatactgcacaagagaaaagaataccctacccttgctcccaaccctcacttgctttctgttccctgggaatccaaagccacattctgagagccagtggtctactttccaaagaactcagacttgaatacaataggcctaatctggaaaactatcgaagacagataccattctgttctttctcttctctcacctagaacctaacttcactcagacctctatctcctccaattaatgagaaaattctccttatctaccaatgcaccacctattttcaaacattattgaatttagttatgattcaacagaaatcttcactatattactaaatatataatatacatagcatatataagtgtatgtaattacatctatgttcacctcctagaaagaacgtgaatcagagttctctgacacatttgctttcttcctcttgcaggtgacaatatgtgccgagtaaataatgggggctgtagtacactttgcttggctatcccaggaggccgggtgtgtgcttgtgccgataatcaacttttggatgaaaatgggacaacttgcacatgtaagttcttttcaagttacccttatttgtttatcgggctctttctgaagactagaagcagaagaaactaaaggaattaaaatgacacttggaaagagaaattcagataattatttagatataattctttttagactataaattattaactgattaattttgaatatatagatgaatattgacaatgatggtgtttcatggagttcactgctatgggtgatttagtaaaaaaattaaataagtatatgccacagaagcataagagaacttcactataagcagtggcaactaaaaatgcattgttgttgattagatagatggtaagttgacgcacaacataggcctacaatgactttaaatggcttcctgactcagttgtctgtattaagtggtgaagagcaaggagggagggaaaaagacttgtaaagaatttacagactatccaaatagtgaattaactggattgattgatctggattaaaggcaattttattaacttttgctgacatttctcaatttactgcatcttattattctgttatgacttttgaaactgattccttctaccccatgtggtgccccttcagcacaataacaccaacaatgctatctatgtattgagaactatataacacttttagaaaggtttaatcttgaattgtgtgttagagttcttcagaaaaacagaactaataggatgtatataatacatagagagaagatttattataaggaattgccttgtgtaattataaattataaaaactgatgagtcttaagatctgcaggtggcaagctggaaatccatgagagtccatggtgtacatctggtccaaatgtcagcaggcttcagacagacccaggaagtgctgatggttcagtttatgtccaaagacaggaagaaaccaatgtcacagttcaaataatcaggcagttgacgtttattttgcctgtgacaggttcagcctttttgttccactctggccaactgattggagcaagttcatctacacgactgagggcagtctacttcactcactttactaattcaaatgttaatctcatccacagcactctaacagatagtcctaggataatgtgtgaccaaacatctgagcaccccatgtaccagtcaagttggcatataaaattaaccatcacaaattgctgaataaacatttcgtgtatttattttatcacttataatgattgtctcttgtgagagaggagggataagtgtaataaaaagaacttcaatttatcaataacatcttatctcttctgatgaagaaaagatgcatttttcaaaagatatttaagatttaagacatatgagaaaataccttaaacagaaaaaatccacttacaatgccactattcagaaataaaccgctaagaaatcttaatagagtttcttataatgatatatcattggcatttatttttactaccagtgataataattgtaggtaagattgagtgaatgcttacactggtatggatgtggcattttgtaatacagtttgtgatttgtattagtctttacaaaaactgtgtaaggaaggtactattactatctgcattagtccatttttacactgctgataaagacatacccaagactggcaatttacaaaagaaagaggtttaatgggcttacatagttcaggaggcctcacaagcatgatggaaggcagggaggagcaagtcacatcttacatggatggtggcaggcaagagaagagagcttgtgcagggaaatccctgtttttaaaataatcagatctcatgagtcttattcattatcatgagaacaacatgagaaagacttgtccccataattcagttacctcccactggattcctcctatgacatgtgggaattgtgggagttacaattcaagatttgggtggggacacagccaaaccgtatcaccatctcattttacaatttacaatttagacttttaagctaattactttgcaagttcacataattagtaagtagaacatttggaatttagaccccaaattctgtcatttttacttaatatgagcataagcatcttatcatgtaaccaaatatctttgtaaacataatttttaatgactgcctttcaaaccatttattttctttttagttgatatttgggattatttatgatgcattgttataggtaattgtctgtttctgttaccatttatgaccttttatgtgttttaccatgtagtttatgtctattagacataacaattggacattgttacatcttctttaggtatttggaataataccctcagttttaaattattttattattattttaagttccaactaccggacatgagaactttggtttcttttctactacttttctcatcttcttcaatttcacttattataaaattagcatatctgaccaagaatatgactttgaattaccaaaaataagtccttttttaataaaaatatgtttgacatttatatttagtttgttaattttacaatatttttaggcctagatcactgtttcactacttgtattgcttagtacttaaacttttagcactccattgttcatttattcatttcactggtgtgtaggatagatggaatatatcttgaaataacttcttcaagaagactatgtagaatacagtggaccctctgtactgaacacttacactttctttcttgtaattatttcctaagcaatatagtatggaaactatttacatagtatttgccttgtattaggtattataagtcatctagaaatgatttaaagtatatgaaaggatatgtgtaggttatatgcaaatactgcactattttatataaaggatgtgagtatccatggattttggcatttataagggatcctggaatcaatcccccctggatatcgagggatgactgtatatattgctgagctccaaatatgcctcctgtacttttttatgtaaacagcatttcttctgcatattaattcttggctgaacaaaatctccctttaaaattctacaaatttgtacctattctattctgtaattacatacttcagaacacaaatatgaattttacctttctagtaaggtttttttttctttagtaatggaaatttgtaaattgccagtaagttgatttctgtggaagatagttctcagaggtaaactttctctgagtcaccaggtgattgtttccgtttctttattctgtggtattattttttaattcttattttattgtttatcatcagaaatgaaagaaacctatcaagatccacagtttgccaacaggcagggattaagcatgactttgaacaacttaaagtctgccaagttggctgctaggctgaatcttatcttagttactgggagaaaagatatgctttatgtgtacatttgctagtttaatttttcagtttctaccaaggagtcttttaaagttgttttcctggcataaaatgaaattcctgctagcccaattgaatgactctgacattttgaaaagatgaaaagtacatgcacatgcatatgcgtgcgcacgcacacgcacacacagagtagctttcagggacttctgcctggtctcatcatgcctttgctctacccataaacttcctcttaaagatgggaggtagcacaaaaagtgctcttattttggtagttacagaccttatagtctgtgccgcaggagcaaaggatctccctgcttacctaaagatggacaggctttaactatcgcaaggacagaaaaccaagcaccacgtgttctcactcataggtgggaattgaacaatgagaacacttggacacagggtggggaacatcacacactggcgcctgttgtgaggtgggggacggaggagggatagcattaggagatatacctaatgtaaataacaagttaacgggtgcagcacagcaacatggcacttgtatacatatgtaacaaacctgcacgttgtgcacatgtaccctagaacttaaagtataaaaacaaaaaaaaaagatggacagcttacaggcttattcaatttccagtggcataacttagaaggacttatgaatgaatttttaaatctagttttattggccttgcaaaaagtgaaaattcccttatgataatgtcaacacaatgatcaagaggccaaactctcagagatctgataagtttttatgtttgttctttatcattgtaggaagttacagggggaggggacttgcattcatcatgtactaacatttgaatagtattttgaggttaaaattttctacttggttttttaatttcggttatgtggatcataattagtggatcattggccttcaaattatatttcctatttctttcattcttatgctccattaaaaatgtatgggttgcttttaggtgaacatatctatattgatataggaaagatattgacagattgataaataaatgaaaaaatcaacattgtagactacagggaaaagatgagaggaaaaacactatcaatatgaaagtgagctgggataagcagaagtaaaaacaaaaagaattatcactaaaaaaacttaggaagtaaaatcctacaaagcctttatcatgacttaaatgaattgttatatatatcaatttcctatttccatgtacattctgtggctcaaaagaaaatgaaagatgagttacgaatcagtcctctgcgagtttaaagcttgctcctttcgcccacagtgcaagtggaatgtaggaagaaaggctcactggggtatacactgacccttaacctagtctgtagtccctgaggagagaagcctgtggcatctccacctgtacttgtaatagacacatctaaagccctcctataccatattctgggtatcaccaagtcaatggcagatgcttctcctcacatccacttaagaacctgagactgaaaaattgtcttaattgctcacttttatactttactgactattacacctcatagttacatcgtaccttttgatcaagcttgtcctttatgtttattttaacaaagctcacctgtgtttaaatatcatggtgggagaggacacacagagatatttgcttgggtactgtactctattagaaatggccctgtctggccaagtgtggtggctcacagctgtaatcccaacactttgagagcctgaagtgggaagattgcttgaatccaggcgttcaagaccagcttggggaacatagtgagatcttgtgtcttgaaaaaagaaaataaaaaatgagccaggcatggtggtgcacgcttgtagacccaagtactcaggaggatgagtcaggggctctcttgagcctaggaggttgaggctgcagtgaaatgtgattgtatgtgccactgctctccagcctaggtgacagagcaagaccccatctcaaaaataaataaatacataagtaaatagtcctgtcaccttctccagatgcacgaatgggttttcagtattggttttcctcagcagtgactaccattccctccttttttgtatctccaacctttcatccttactctgccttatgtagtttcttctttgccctaattgccaaaccaaaaacaacaaaacatgttcagtagtttcttggaagccacagatacaaatatcttaataggaactctagctaagcacacgcttcagtagcacgtgaaatgattcagattgatgcttaactatggaaaaaaacaacagaaagagaagagtatttatttctaaataacccaggctatcactgcatatctctgtgtaaataaaatttaaatgactttggcttgtaaggaaatactatatacaatgttgtttaccaagctgatgttagaaaatctgttatcatggtggtacacatgtgattttacacctggtgaaagtagagaaatttttttctgagactgttggtctctttctaatatctataattcatgcatgaggtaaccccaatgcaataaaagggaaaagaaagaggattttgtctatactcattgcactagacaatgttaaatcaacacaaataagtgcttatttgagaatttgtagttgcatttggctgttaaaaattctgctatatcttctaatatagcctgcaacttgcctagcttcctttcaaatatattaggaaatattaaggggaataatatagtaactcatttcatgcaaagaaagaacacaaagtatgtttatagaaattatttcagttcctttttatttaattgtaaaggtttttcaaagatatgttagccttagtttgcagatgaaaaaaataaactgcagacaactacaaatggaattcatggttgctgagtagagtagtgcataggaaatatcagtatgccactaacctctcattactgttgattcttctggatgtctgatttagttcagtctagattatagtcatgtgaactggaattagctggattaactgtgcaatctgagtcaaacaagcaaaacaaagttgcagccattgtgacatgatcttcctggtttcagccatccttgttaaattgacatcaaatgaacaaaaatccactggcaaatgttcaagctgggctaaacaccaatgactgtttctcaatgaacttgcaacataaggctatgccagcaaaggcatgtacccagcagaaaaatattgacatgctacatgattgattaaggatgaattctaatgccatgcttggaaggaatcaagaatgagagtaggctggactctttgtctttttgaatcttgtccgtcatggtcaaatcctctcacaactagaaatgatgtcagttgtagcatagtaacttggaacttactacccctgagaagcatgtgtaaagctaggtgatcaattaccaagcaaactttatatttctctcaacatgtttgtgggaaaaaaacacaatatagaatattaataaatgaagacatgaacaatcccaaaaagtaagttagattccaaagacagtgagtcactattaacaacaacttcaaaaactccagcaagattattttgtctaaagaaacagtaattcttttaattcttctttagtggcctaaaaataagacagaatttttcaatgtgccttactcccaggagagcaacttgaacattgcaaaaacattggttatccaagggacagcattgcacaattatgtgtcaatggtactctgtgatctttatcaccttctggagccccagatatattcctctgtcaagaaacaggacttcactatggtgaaccatttatctgcttggctgtgacaagccttatgttctaggatatatgcaatctaatgtgtagtaaaaagtttaaggcagtaaaaagtttagaagcccatccagatgaatatttatggccctctgtgcataggaactcacagaagattatgtaccacttaggttggctgctcagaagaccactttatgtaatgaaaggtcatcctgctatgatctaaaggagaaaaatcaaaacctatcgcagcatttttcacacagtcttccggtataggcgagcttatataaagagatccagcaaaccacaacttcatgttttctttttggttcttttctctctccctgctcaaataaagaggcaataagagaatctggatgcccaaaatgaagaaataaacaaacaaatatttctcaatattagataagcagaaataatagaaagacattttattttattttttttgttccaggacaaatgctattatgactaagttataattctgatgcagttgacagcaaagcatcaattgagggaaaaattaatttagaatagatcaccacactgggtttgaaaagagaaaaagcaaagtcagaaacatcagaacttcttcatgcacaccacaggttattaaactgaggtcaggaatatgtcttgagtccagaagctgagctgagttcccaatctgagataattcaaactaaaataaattaaaaaaaaaaaagtttattagcagcatttcctacttcccaacattatgacctggacattaactccagccagtttttgccaaagaaaaataattctggaatgcatattttcttttgtagtgccttggagattcatgcataggccttctgatttcattgttctcacagcaggtaccacagtatgtgtaaaaattaatagttccatgacaagcataccatgattcatgttattttacttttgatcctggttaaattataggattatttattactttgtcaattttttattggtgagatcatactgtagaatttttgctagaaatggttctggcagtagaattacaggttttgtatcagttttcaaatacatagttcaaagcacaactctgaagtaaagtgtccaattccatcacttgttaatatactaaaagcaatttttggctgtgctcaaacacccaagtgctatgtagattcagtcacattatgcactggaacagaataatatatataggtctttatatattcactcttttgagtgtaggtggaactttgactctcttcgttctgtctacatatccctttgtctttatcttttatctttttgtctttgtcttttatctttttgtcttttgcaactttatccatgtccttgggtgatcaaagaagagaattagctgcttagccagttgaaaggatgtggttttcctgaaggatttatacagcccccacaaatagaatctctcactgcaataatgccaatctctgttaattccagtaaccagtcaacaaataattttgagcataaactctacaccctattctgttctaggtattgttcctttctgtatgtgaaattattctttctacattcaagaagctcctcaagtggagacaccataatttgtaaaaattaattataaaacaaatgctttgtagagaccttgtttaatgccggggaaaagaccatgcattttgaacttctaagctgctgtcttatctggattacgacttggcacattaaatgttttctttataatagatattgctagctagcctattatcatgaacctaaagaaaactgatagtctgcattgataatgtggtttctttgtgatataactactgattacatctggaaggcttgggcagggatagaattattacaattaatgatgccttacgccttgggagaatttggaaatcagagctaagaataaaaagaaaaattcttatgtcaagaacaatgaagaatctaagattttaccctgattgcaagctagcatgttagcctcagattcatggattccggtagaagacacacgattcctggattagacacaaaggattttatccctcatgccacagcaggccacataacattcatgtttacgttggttctccttgacatgcccccctctacccttttacagtccatgaaacacaaattctttactttaacccttgattgccacatattctcttctctttctaaactatttaattcacttagatacaggagaatagtaagacccaatttgtgaataaatcccacttaaccaaattcctaacatttgtttagagaacctggaacatgcagagaaaaaacactgcatagaatcccaaaacataaaaagatagttttgattaacataatccttctagaacccttaagtaggcctgagtttttctcctatttgcagaacagcaaagtgattatagccatcaaagctgtgtgctattgcattgtctttttattttaattctcagtgtacttatttataagatggaggtagtaaaattctttgccatatatgccttataggttatcataatgatcaattaagactatgaataaaagctctttgaaaagcaaaactacacacccagcataaatataaagtggtattgtgttattgttgttaatgttgttgttactttgatcagtgttgtttaaaataaatcttcgaagttcttagttgttaaaagtcaaatcaaatacatcttgcaaagatacatctccctacttaaaatgttttatttgggaagtaataattgcagtttggggcatacccacagactagatgatcttctgtatggccgaaaaacaaagagaaggttggaagttttctaaaaagcagaaatgttgcatgttgttttgcaagaaagcttattggcaccttaaagttttggggagctcacaaactctgattggtgagtgacagaagtgagtaaaactagttttagagctgcagcagattgtttcagtagctattcaataaaactggtttcaggttaaaacaggcagttccagcatccaggcttgcagagaattacattcctccagcatgatatgtgccctgagtgctttttccccttcacttctcagtagtgttttagttgtatacagcaagaataacccaatttacatgtcaactttcacccagtagaatacttgttgccagaaaaattgaaaattttctttttctcaaagatggctgtcaccacaatgttttatagtttcaattaagttaaatgagacaacattttgttattgtagcaaaatttatttctgtgtatgtttgattatagtaaactttatgagtatcacatatttttgaatttaaagtatgtaaaattttaggacattatttttattgtatgtatttaaggtgtacaacataatgttttaatatacatagtgaaatggttactatagtctaattaatatatccatcatctcttatagtcactctttagtgtatgtggtaagaacacctgcaatctactctcagcaaatttccaatgcatattttaacacaatattgtaactatagtctttgtattgtatgttggatttgtagacttattcatcctacctatctgccactttgcgctctttgacctacatctcctcttctcctctccattaccactttattctctatgtattcgacttagaaattgtgatacacacacacacacacacacacacacacacatccttacctaccaacctacatatataatggaatattactcggcctttagaaaaaggaaattctgtcaattgcaacaacttggatgaacctggatgacattgtgctcagtaaaataaggtagacagagaaggacaaatacctcatcccactgatatgtagaatctaaaacaaacaaaaaactctacaagatttaaattttaatggactgactgtagctagcattattcatataccttgggtttttttaactctagttaatcctggagaagcactacctcacatatgtaaagctggagagtttcgctgcaaaaacagacactgtatccaagctcggtggaaatgtgatggcgacgatgactgcctagacggaagcgatgaggattcagtaaactgctgtatgttctcttccaagtcacctaaaaattgtattttcctgagtctttgagtgtgtgaattatcaaggcagtttgtgacaatctgaaaatacctttgatgcagattgaacctagtttaatttttcagtcatccttttgcataaagagtagaccatagattgcctcctttgcatagtttcaaagcagtttttctcatccttttccatccttcatattatcattttagttgctctaagaatttctccttttacattccatgatatcagcgccaccatgccactgtcagaggttgctgtagggaaattctttggatttttgaatttaaagatgtggaaaatcaatttaaattccctcaagacaaaattattggtacagaaggtcacgatccactccactgctctttggcaacagagccttgaagaagatccaaggaaacagacatgggtttggaacatgttactatatagcttcactgtctcaggacatggtagaaaacacatatgggcactcagaaatcaatgtttgactttcccctctttggcttctatttaattatttatcatctgctgggataggaatagtttcatgttgctagtaggcaaaataaaatttctcacatatgtgttaggaaaacatttggggaagtacattaaataatgttttgagaatatatttgattagagtcactggctaagtgattttgagagatataaaatattttatatgaaaagaaggcatgtgttgaacaaatttatccttgatctttttatctgacctaagaacattgtttttaattttttttctttctataaatgtccttttttaggtctgaactaatgagagttaattgacagtccttcatttcccttttttaaaaattaatatacaaatgaagttttaaagatcttttttaagaatgggcaaagttagtctgggcatccattttattcaaacatcgatgcttcaggacaaaaatctcaagaatatgaactttaaaaaatattttcaaattgtatattaatacataacacataaattataataaatgcgtaaatataggactgcattttctcttgatttccaaattcaggccctgacttcaacattatgtacttcttattttcagacccattaatatctgtcctgcaaagtttgaacccacaaaaaaaatttaaatactaaattgctataattagtcaagatttttggagaggaacctttcgtctgagggtaaagggtatttttgtcctaatttacataaatgagtattatttagtgattaattgtctcacttcttgactcacaatcagaactgttatttatttattattacttttaagactaatcagtcaagtgcaataattaaaaagaaggaaggagtagaacaaggagtttgatttgtaactaagtgtgaagagtcagttgagttaactcattacctttgggccagcctatttgtggttgtgatgaatgctccctatatatcagcttcctctgtagtcaactttaaatgcctgagcagagtgcaaatactgcatcacaatattcatgtattggttccttaggtccacgttttcatcagtgtgacttgtatcttctagcaaattaacaagaaaactgacctcctctatgggtagaagaagcattgcatttgtactgctaattagaatgttaaaatttctaatcagtcattttatcttattatcatcactcttcaatccatcacccaagccatggtttttttgtgttttttttcccctggagaactcttttacttatagtccacactcaattttttaaataaatcctattttttctacttcctaaataattaattttttatgtttacttcctgtcaattttcattggctaaattaggccttcaccttagattgactcagaaaatggctttctattatgcctgccactattcctcccttaactttagcccactttccacactattttcagagcgatatttatagaataaaatccattcttttaatttcaataactgcacaaccaacaaaataaattctaaaatctgttgactcacatatacaatacttcctgctctgtcttgtatttacatttttagtctttagtctattatgcatccatttaccctttttatttttatcaacttgaactataaatctccaaaacatgtcctgtttttctcctctgcaatactgcactgactgttttctgtctaaggaattcaacatagcttaccattaccttcttaggaaaatctttttttgactctcaatacagccatttggagttaaacattcatctgctgtacaattctttattacagtagttgccaaaccaaattgaaattatttgcttacttatttggtacatctaatagattaatattttcatgagaagacaccttatgttgtagtgttacgtagtctctcggtctagcacagtgcctggcacatggatgagtgggtgattagataagtgaggcaataagcagttacacacctctgaccaccttccagcactatgtcatcttccctaagcattgcagtgattctgagcaacattttatttctgagatctcatggttaatattctaatactacataggtaatttcagaggattattttaaatattaaacacccataatctgcaaccttgaattttgttattctactttctattccttcagtgttttggctccataccaaaaggtgtttgaattcctgtttattactttattgttgaaaattgcaaaagtccttgattaagcctcactgaagtgcatatgtataatattggtactttaaattgttggctctctaatacatcagatgacttatatttctctcggcatttattcttgctaaagtccctgaagtgagtagaaaatgtaaatcatgctcaaataccagagaatataaagcttttctccctatttttttgttttgttttgtttttttactatacatcaataaaaactttctaaaaagtgataaaaccacgtatcaacaaagctactttaaagaaaaactgttttatagaaactaactggaaatgcacgcatttgctactcaacaagcatgataaaacaacaatttttcaaattctcagtaaaacaaatataaacatttgtttttatcatacgaagtgtaactactgggcataaagaaaattacccttaaaaacagcgttgaaattgtgaaacacatattgaagagcatgccaattcagttaggaatttagcctctggaatggaggaaaaataatcatagaaggttaacattaagatggccctcctgttgtgcttggatattggaagtttaatccttagctgtgcacagcttcccagatgaggattggtcacctcctaagtattttctgtggttgcatgtttgtttgtactagggaagaaaactcatgatgattttttttttttaagtaatacagaatctcatagttaacatcaactctaggtcacaagtgatgcatttttcttttctgtgttttcattttcttttctgtgttcctccttccattcccaagaaacactggacagagagtaataaaagtaggcttagttaatatgttaagaaatatttgaatgtttatgtggtttaaaaaatatttttaatatatatgactaaattattttcaatacatacttgttatgtttaacattaagatttgaggttaattttaaatgttcttggtaaaaaatttttaagtgaagtctccagttggtttaaggaatgagaaaacaaacttagtgatacagttggttttatttatttattttttttgagatggagtttcgcttttgttgtccacagcgatcaatctcagctcactgcaacctccgcctcttgggttcaagcgattctcctgcctcagcctcccaagtagctgggattacaggcatgcgccaccatgcctggctaattttttgtatttttagtagaaacagggtttcaccaagttggccagactggtctcaaactcctgaccccaggtgatccacccacctcagcctcccaaaatgctgggattacaggcgtgagccaccacgcctggccatacagttggttttaatggagacataaaaaaagaatacatttccttttatttaagatgtaattacttgatgttttttataaaagcattacattttaacaaagtgaatattagtatttgctattaaatataaggcaatgaatgacagactctatgacatttattgtactataatattattactgtaacttttctgtaactatcattcaaaatattcacaactttatccaattttaaataattaatcttgcttccccctccctcccagtcaatcatagctgtcctgatgatcagtttaaatgccagaataatcgctgcatccccaagagatggctttgtgatggagctaatgactgtgggagcaatgaagatgaatccaatcaaacttgcacaggtaaaggtttgcttggatatacacgtaaatctcctccaaagttagtcttaataaaaatgcaagtaaatgctttgaactaagctgaactttcctagtgctgatgatctgattattgcagtagtaaatgaattcagagtttgatgccacaaaggctagaatacaaattatcttttacttaatctttggacactactctgctttccagactaatttggcacttcatctatccatatgggttgactgtcgacacactacttgtacaagacttgtccctactaaatcctacttggcagtggaggttgatgtttgctagcatgctgtgatataggccatctcacaaggaggattttttttttaaccttgagaaaataatttataaattttatttagtctactatagaatacctctgtgaatagttttctattcatgcacattatttatgtgaagtaggtttttttccccatgaaatctcaagaccactagcctatttatatttccatataatctactctattgtaatagatctttgaatccctagccagattctcattgaatggaaatacacagcttgtggtatagtttacaatggagtgccagaaaggtcattattaatcagataaatgttgaaaaatgatactgactagcagcagcctagtgcttctttttaaatgataaagaaaaaaatagttcatttgatgactcatattgatatgattcataaaaactgattttttaaaccattatatagagcaacatcaaaacatattaatcaccccatcaactctttctgtctttgccaaaataagccttactcaataacaagtgttataaattaccagtgaaaaatacagggcaacctctagagagaagacccaggggttgagaagactggtttccattcttggtcaccaccagcttttttcttggaaagacatacctctctgcacttttgatttccttgagcttttttttccagcacggtaagagtattaactataaattgtttccagattttccctatgtacaaaacaacactggcaagagcaaaacagccatcattccagagtcctagtctatgtcttctattcagattttttccatagtgacaaatttgctgaggatccatgggccagttattctcttgtcccctgattaaaaatctgatctgacattttaaagtaaatgaatgttttgcaagatctttttgtctcatagcaaatcttttgttttacaaaagactttctaagagaaaaggacctccagagaccatccagtcctaagtccctaccctccaagctatccatcttatagatgggcatggcagagggaacttgcctaaacttaacatcattggtaaaagatcaggggaaacttgatccaagagttttgtctccaaggtcatttctctttatcccaaatgatattatcctgcatattagctagaattttaggtatggtcagttcaacttagctcaagttgctcttgccatatgattataattcataatgagacatctttctaaatgagtgcaattcttcttcttttttttcgacagtcttgctctgtctcccaagttagagtacagtggcatgatctcagctcactgcaactttcgcctcccaggtgcaagcaattctcatgcctcagctaccagagtagctaggactacaggcacacaccaccatgcctggctttttcttatttttagtagagaacagggattcaccatgttggccaggctagtctcaaactcctggctgcaagtgatgtgcccacttaggcctctcaaagtgcttggattgcaggtgtgagccaccatgccaagcccaattattattcttttgaggttaagattcaattcacagattatgctttataacatcctaaacaaacatcatctgttttcaccttaaaatagaaggcattgctggctcaatttataacaccatgtttacttcattactattagatttttaaaatctgctggtttctacatggtttttaaagaagcatttgtgattggctagctatttatagtagtaaaagtaaaaacgtttatgtataagagcaaataaaacagttttaattgttagttggtgcaaaaataattgttgcttttgccattattttcaatggccaaaccacaattacttttgcaccaacctaataataagatatctaaaatattcaagtcctgtggtctactaggaaatagaacataacttacttaaatgccaccttaagagctgccagatgaagtctgctgctcactactagatcttttcgtcagtatatttatgacagctattatagtcactggataccttaagaactcgaataaaaagaacaaagaaaaataaacatgccttttgctttgtaagcaatgaagtacatagtcaagttacaaagtacctccatttcacttcatcaaaatatataaataggtcacatagcttaccatactggaaaaaaatggcatatttatgtagaccatatttctttctggatttcaatccattgctagatataagtgaatacatggacatatatgctagataaaaagactttccaatgggaagttactttgttattgaatccgccatcctgtagctgtttgcattgtgattattttatatctaaaagaaaacccttgtccacaataagccaatttcctattttttctaaaatttctacttcgtgaatttgtttacttcattaaatatctaccaaagcactggtgatagaatgaaagaaaatacacaatgcctttcctcaagaagctaagagtgaagactgggagaaagaagtataagcaggctattctaatgcaatattcaaattgctaagttgatccacatggaagcacatgggaagagtaaggaatttggtcttcagctatctgggaggacttcttaaaggaagcactgtctaagctaagccttataaaaagcttaagaaaaattcctaagtgacagttccagccattcaattagaaaaagtaaaataatctggtaaaactcagcattggcaatactgtgggaagaaggaattgtcatacactcttgctgggtatgtgaattgattttctatcttggaaggtgatttggccaaattcaataaatgtgaagatgtgcataccttcaactttgtaattctatttctatgttgataatctaatacctgtgcacgaagagagagatgtgaataaaaattttcattgtcttgtgctataatagtgaaaaactgaaacaattgaaatgtccattaacagaagaatggatagatatatcgtgttctattcatgaaagaaatgctattcataattaaaataactgaacgagaactcaaatatcaacaaaaatgaatttaaaaataaagttaaattacatgagatactctcatccaaggaaaaaaaaaccactaaattgaagaaaataaacagtactatttatatgaagtataaaatataaaataattttatatagtgtttatgaattcataaataggaatagtattataatatgtccagaaattaaaaaaataaaaacaaattaaaagtagttacctctggaaagagagggagggaaatgtgattgagaaagattatgtaggaaatttcaaatgtaagtacatacatttttttcttagataaaacaaaaataaaaatctgtaacaaatatagaaaaaaataagatttgatatagctatataacagtaaactgatgttaatgatattatttcctatacctttctagatggtagaaatatttcactgggaaaaaaaaaagaacaattgaccagaatagattgtccaggatgcggcgaagtgaataataagagaaagggttggagaatttgcccagaagaggaaacagcacatacacagtgggctggagcaagtggacacagtcagggtgttggtagccgttctctgtcaacatccagaatattgttgtctacttctgagggagacccagagactgaagatgaaaagtagttagatttgaaattatgtttcctcgtagtaacatgatcattccttatattcaagcctagacagtttcatatcaacatttctccccaccatagcgctctggttagattacataatatttgctcttctcacatcctctaccaattataactcaattcatactagataagtataattgattttaaaaaaccctaatgtatttaaaaattagacttttctttacaaaataatagtgcattttgatatgacattaaataaaactaagtagaatgctttgattaaaatacaggaaaagtgaagtttaggaatagtgctatgctctagtctcctcttggctgtatggttggtgtgccttgtgagaattctcactgttacatggctataggagaagcatgattacagcaaatctctgattcagcagctagataaacaattctcttgaaggaggtgtaaatttcttcctccttagagaagcatttgccacaaaattagagtcctatggggctgctctgctaatcttgcctccaaactaacttagatctgatggagacaagagatgaaaaagtgaatgttgtgagtttgttttcagaaaaattcattgattagaaagtgataatttagtcaacttgattatatcatatagataaacagtccttgggggtttgtggaataaagcatctttctcatctgaaatcagttaaaattgcctggtagactaagtgaataattttctccatgattagaacagacaatgaattcatatatcttcagggcatactttccactctataataatccagtgaatactctttggaataataggtcataacagttcctccagcttcagagttaatgaggtaacacaaattcccacaccatcacaacgtgagatgggtcatacacaatatgagacaggttcatagaagttctttctcattttcctctctaatcaccatagctttcctaatgaaacaaaacaatctgataaaactttgctagaattaaacctgaattattaggcaagaatacagtgacataagaatgtcaaataaaagaacattggttttgataaatttaatatattcttattacaggccaattagaattttagatagaaatatgtgataatgtctatttatataaagcaagaatatagaaaagactgaaggaatgaaatagttaaagaatgaaggaggaagaaaggtatggaaaagaaaaagaaaagagaaaaaataagggaaaacaaagaggccagttagggtgaaaggaagtaaacaagaattgaaaaaaattctgttattaaatttctcttaaaagataaaaaggtatttattgtaaccagtgaaacagagatatgtaagggaaaaattattaatctctctcacacttctatttttaccccttcctgtcaagtaaactaatgacattagattttgtgtatatttctatatccttctctaggttaatacaaatacatatatagtttttttctcagcagaaataattttataacaattatctaagaactttattcattttcgtatagatgacagaataatttaccagaaaatatgtggaattaaatgagacaatatagaattatttaattttacttgtaattttaacattaaaaacttcagaagcatacatgtttgctggaatatttaaaatctgttaatttaaaataaatgatgaatttgtaaaatgtaaaaaatcagatagtgcataaaatattttagatgtaggaaccttatcacataagcaaagcaaaatacatactacaataattttcctgatatttctaattttagacactaagactaggaacaatctaatgtatcaaaccaagccagtaaatttttcatttgtttttcttggataatctttaaaatattcacaaataatgaatatacatcttaacactgcaagtgcacttttcttaaaaggatagaacaatgtatatatcttttaagaaattattttcaatgatttctgaagccctaattcatggaacccattttagtgcatttgattgagttggctttgctccactctttcttatatcaaccattagtacccaagttcacaaagtgtgttgatgagacaaacaatggttctgaaacctaggaaaaaggaagtctataaactcagcaagattcccttattgtagccactgatacttcgaccccaattattcactatctgttcaagcctcacctatccacaattttcacaggactgagtatccctttcccaatatatctcatttttttctctagtccaatgaaaggaaagggtagaggggatatcgagactcataaagacatattcgtagttcagagggacagaagaaaaaaagaaatgaaaatcagaggataaaaacaactaagcatgtcactaccaaaggcctgggggaagaggcagggaagctatttaagctttcatgctttttaaaagttgccctgattatactagaaaaggattatcaaatttcctcttgaacataaccccttttctgaataaaccactgcctccggctaacacagaaaggaagattccatgtttgtgttcattgaaatccttaagagagcccaaagcaaagttcattaatataccttgattaaaaagtcatactttttaaaataattgtgctgaaaagtgagttaaaaaaaaaaacaccttaaggccaaatgtatgttttagaaaatattctctgcactctcactgcatacagcagatcatttagagatcaagaaataaatgcattaaaaatgttagaggaataggacaattcgaccccatgattagaaactagatatcctgagatcgtctccaaataatgccttctacaatactacaaaaaaagttttcttggtttattagcaaatgctatccacaattctttttttgttaattaagagttggatgaaacttaattcaaccttatattcataagcatgtgctgggcaaaagtttaaaataatgaattcatagcttcatttatggaattgtgtgagggttactgactatcttgtcatttagcagtcattgataattgaagggcaaagcatgtgaactttagagaagacaagcaagctggtattcagaagccttaaataaaaatggacttttaaaatattttattttaatagagaaacatactatcttatgtatgaaaggaatattgcatgcttaattatatccttgatgttcaaaatgcctctaaattgattttttgtttattaattgatcatcatagccagaacatgccaggtagaccagttttcttgcggaaatgggcgttgcattcccagagcatggctgtgtgacagggaagacgactgtggtgaccagacagatgaaatggcatcttgtggtaagttgtgagtgagacatgttattattacagattgtgtcagataggataccctaccactacaccctccttaaagggctatttatttctttatgagtacaggtaaaagaggcagaagatatggcatttttgttacaaacttttggacctgattgtgcgctttaatgataacttctgaataattcctatttgtgaggcagaaacaatattctcagctaaaataaatggatttaaacattgcagattttattaggaagtggttattacgcggctaacaggacactctcaaatgttcattattaatcttaggtctgtagtgattaaacttgtcaaagagaatagttcatggagtaacatttggggtaagggaggaggacatgtttcttattggcatgtatatgttatcttctgggaagaataaatgattcagactgagattacataattggtaaatcattgttttcatttccgtagagtcgtatgattctgactgacaaactcaatattagtttaagataatatttttgttgatggcaaaattcccactttcaatagattctcttacttttgaaaatagtaaaaatgtattgtcacatgaagttgcaaatttaactactctcattgtactcatgcatcagtatgtttcgttaccatttgtctcaataatgtctactgaaacacagtaacagaatgagccaggctttctaagacttgtgctttatttaagtcatggcaatagattttttaaaatttctatgggaaaactttacccataatttagacatgtatagcatatttattaaaatataatacaataagtatacattttaataatttaacactgttatacttttaatagtagaaaaataggtttttttaacccttctgtttattatatttttcttttttaaaattccaatagttttggaggtacaggtggtttttggttatatgggtaagttatttaatggtgatttctaagattttagcgcactcatcacccgagcagagtacactgtactcaatatgtagtcttttatcctctaccccctttacagctttccccccaccaagtccccacagtctattacatcattcttatgcatttgcgtcctcataggttaactcccaggtgtaagtgataagaaaacaatatttggttttccattcctgagttactccacttaatataatggcctccagctccatccaagttgctgaaaaagacataattttattcctttttatggctgagtagtattccatggtgtatatatactacattttctttatccaggcgttggttggatgggcactaaggttggttcagtatctttgcaattgcaaattgtgctgctctaaacatgtgtgtgcatgtgtctttttcatataatggcttctgttcctttgggtagatacccagtactgggattgctggatcaaatggtagttctacttttagttctttgaggaatctctgtattgttttccatggtggtaacctctcaatttaaatgcctgtatttggaggatgcttacctaaaattttcttgtgctagactattatgtccctgtaaacatctgagtatataacctctgaataaagtatagataaagtaagtggtggtaattgacatagtaaagaaggcaacagcagtggtatggaagaaagcactagagaaccacacaatagacaatagaatattttacgtatataatagaatatctggagcctgaccaataaagtgggttgagcagtgtattctctctcttttccactatccagactaattgtgtggtcctatatctggctgtgtctgctgcttagttgctctgtattttagagaacttgattcctttccacagtgagcatactcattcagagaataccaaaaaggtaataagcaatctaataacattaaatacagagaggccctggaatcagagtctcaattcagataagaaatgtcatgaaaacaattaggaaaataaagtatgagctcattaaagaacttctattaggtctttgatctgattttctctttttttctttttttttaataggcctagggcaagacctgtttctttattttaataacaatttacttgaatcaaaggaggaaaataccgaaaattttatataataatctaataactataccagcaaacttgtatatcttttatgaggtgaggcgaagaagggttgggagggctgccagacacgtatctttctattaaatttttttaataacaaatctatgaagaacattttatggcccaggtaaaggaattgaaacttagagacttttagaaacctgcttgagaacacaaagctaataaatagtgggaccagactattaatccaggcatgcttacaactagaatccaaccattttaggctgactttgttttgtgatccttgcatggggtgcagataatgccattatacttcaatgactatctgatttaaatgcacatatagttatagtaggtttcattccttgttgtgttggtaaatgttttaacatttcctggtggggaggaaccctgatgtattgtttgcctatttgtgtgctgtaaatactcccaccctggccaatatcaagttgccaacatgattctctgaatgtggaattaggatgatatgcagtaacacactagtatgtattatttccactattcagatacagctgacacaaataacttcaagagcaatgtagtaaaattatcaggaaattagaagtctcaggtatatattacctttgttttaaacattatatgtttaattgtaaattcataaaaattatttttttaaaaaataatgccacttgctttacagctggcaaatagaatcagtgaaaatttacaaataggctctcacgaccaggtgtggtggttcatgcctgtaattccagcgctttgggagaccaagatgagcagatcgcttgaggccaagagttggagactagcctggctaacatggtagaaccccatctctactaaatatacaaaaataagccggtgtgatggcacatgcctgtaatcccagctactcgagaggctgaggtgggaggatttgcttgaatctgggaggcagagattgcagtgagctgagattgtgccactccactccagcctgggtggcagagtgagactctatctcaaaaaaataaaataaaaataagctctcaaaagctggtacaagaggcctgcagcacacaactggatatgaacacattgtaatgatttagcagctagacagtttggttctgaaatatagccagattttacagagtatcggtaaactagcggcatgggttagtatcagtaccatttcttctttacaaccaaggaaacatgttttacctcagacatgtttctctcttcagtaacacacatttacctttcagattgttatttaaaatcaaaatttacatcagaagagaagctgacaaagtctagtaggcacaatttcactgttaaagttattataagaaagaatggcacagatctctgcaagagaaattattcctgcactgcatacaaaacgacaaggagtgcaattttttaaaaagcactcaccctatttgacaatatactataaataaatatagattcaactcatttctagttttattacaaaattcatactggccatattttgcttttgtcattggaatagcccagattcccaaaggtttcatcctaccagaagatgctgcaatcattttttttgtttttacatttcagcttcatgaacaatctctgttagggttatggctactgttacacattaaaaataatattaaaatttggatttaaaaacatgcaaagcctatgattagaaatgtttctgctggtaattaggagttgaaggtgctacaactgagggtcaggttttcactggaatttactagcatctattttcaaacctaatttattttacttgcatttgcctttacgagttaattgcacattttaggttgagattatatgtgggtgcacgtttacattaattgggaaggccctctgaggattcagctttaatctttaagcagttgtttaacttttttagtagtcttcacatgtggaaagaagaatttgtaaattggtgatgcagacaagagaagacatattcaaattgtgaagcctgtgttgaaagtggaccttgtgtcaaggaattggatggtcaatttaatttcaaggataagactaacgttggttctcaacttaagttgtcaataaaataattaccaggggaactttaaaatcacctgcccatacctcactccagagtaattaaatagaatctctaggagtgggacccaataattagtatttttaatgcttccctaatgatgaaatgtgtgatcaaatttgaaaactcaagacatacatacagtcttttgaggagcttgttaaaaaacagagtgctgggccccatttccagagtctctgatccagtcagtctcaggtggggcccaagaatttatatttctattaggtcagtgcaaaagtaattacagtttttaccagtatggagaacaacaacaaaaaaaaacgcaattactgttgcaccaccctaataagaaattctcaattaatgctgatccttgtaccatgtgtatttgattttatcatctgtgcactatgtaacgtaagaatgtctatatatgcaaaattaatttaagttggaagcaattatccttacaaatttccttcccatatgtattagtccattttcacgctgctggtgaagacataccgtagactggacaatttacaaaagaaagaggtttaactggatttatagaagcctcacaatcatgatggaaggcaaggaggagcaagtcatatcttaggtgggtggtatgagacagagagattgggcagggaaactccccctaatgataccctcagatctcatgagacttattcgttataatgagaacagcacggcaaagacctgcccccatgtttcaattacctcccactgggtccctttcacaacacgtgggaattcaagatgtgacttgggtggggacgagccaagccatatcaccatcctcaaattactatattaaatataagggcatttcatgattaaacatgataatgtttcaaacaatgacatgttttgtcctttagacaatttatagtcaagtatgattgttctttttaaactttaacaatctttggcttgttctgtcttccaagtatctcattatagtttatatttattatgttttaataaatgtaccttaatgtaagttggtagtacctaattcattagaagccttcaactttggaaattacctaaagtttgttagcagattgaaaggtagttcaggctgggtgtggtggctcacacctgtaatcccagtactttgggaagctgaggtaggtgaaccacttgaggtcaggagtttgagaccaacctggcaaacatggtgaaaccccatctctactaaaaacagcaaaaaaattagtggggcgtggtaatgcatgcctgtaatcccagctactcaggaggctgaggcaggagaatagcttgaacccgggaggtggaggttgcaatgagccgagatcgcgccactgcactccagcctgggcaacaagagtgagactccatctcaaaaaaaaaaaaaaaaaaaaaggaaaaaaaaaaagatagttcaatggagtagaaataaaaatctactgaagtttgcaaagttaacattactcatttttatggatattgatcttttataaccatgtagatagtaggattttgtctcttgtacttgtagtcttacttgtaaatgctcttgtaatcttgttatcttacaaaattacaagaaaagagaaaagagaggacagtagaggagggggtagggagaggagaggaaaggacaggacaggagaggagaagagagaagaagagaggaagagaagagtaggcgggcatggtggctcatgcctgttatctcagcattttggcaggctgatgtaggtggatcacttgagcccagaagttccagaccagcctgagaaacatggccagatcccatctctacaaaaaatacaaaaaaattagccaggggtggtgatgggtacctgtagtcccagttacttgggaggctaaggtggtatgatcacttgagcccaggaggttgaggctgcagtgagccatgatgcattccagcctgggacaacctgagtgagacccagcctcaaaaaaataatacataagtaaatagaaagaaaaatagagaaataaggaagagtttcagctatcaaaatggaatttttacccagttaaatcagtggtaagttgtatcaaagatagtttacacaagattattagaaaagcaaagttcctgattaagtataatattttttattttctaagaaaaaacctgcatatgtgtgtaaccatataatgaggagtagtaatccagtggaatattgacatgaaatataattattgtccagcactgctttcaactcctttgccattccttaataatatctttgcaccacacaatgagtctggtgacttttagtttctataacttgttccaacccattttgaaacaccaatattatatcttagtcaaagctttctcctccctcattgctggccagacttcaggttctaagaatggggggaaactatgtcctgcttatataactttagctcttcaggcagagaggagacatggaggaaatgagtaacatcttttcaagcaggtctagaggaaacttcctttctgctgctgtaaatttcacaatcctctgacacatgagaaatgcaactctattgagaggcttctgtgtgagatcttcagagaggtttgagtctcatccctctttaggattccctgaacttcctccttttcatttcttctctcttcttttcccttcttcagggttccctgcatatctagatctaggtttcttttattccccataacttctcattctcaccacaggatgtatatctcatagccttaagttgctagaatccccttgcttggtgggctgcccttttggttgcattactgacgtaacaagagaaggtttgctgtctttgctaagtccactttttttaatttttttccccaaatgttgtgagcaggctgctctcttaatggcctatcccttgggcctgcgatcactctccagttctttgttcttctctagatacaggtaaaagggccagaacacttgcagaaaaaacatctcatcagtgccttctcaggaaccacacaatttcatgaatgattctcatggagtctgtccttctcttgcatttggggatctctccacaggttggtccactggtctctccagaaggttgacttgtgcagtactcccctattatatgaaatggttccaaatatcggtttctctctgtagaacgtggggatacttggtgtctccttgtccttagtattggatctaagtgggccagggccatggcgaaagaaagaatctcactattacatgcttttgttttttaactgactcattttgtttctctgtctctcttcttttccttcttcctttctcccttctaatctcctattaaagcaggtttgtacacacctactagtacaaacatatacatgtttattcaatatatgaacatttagaaagaataataaaagttattttagttttcacagtataaataaggagacggaagcactgaaaattgtgtgtgcaaagttgcagaatgtgttagtagatttcagttggatatcagtcccattcactcatagttgcttattctcacagaattagagactgttgtagttgaataaaatgctttgtaacttaatctcttttccaatataggaattcttctaaaactgttcccagaagtgcttacctactgattgtttaaatattttcagaaataactcaacatttcagagggtaattaattccactgttgggcagtaagcaatgtcagaagattctttcttcatggagctaagatctgccttcctaagtattctacccactgatatttgtgctgtcatctgaagctacatggaatcaataactttgtccacaatctggctcttgagataactaaagacaccatcatgtccaagcaactcttctgatttacaggttaaacacaccacttctttcagcttttttcttacatgactatgtttgtaggggcttttcttaccaattgccctgctattcattcacttgaattttaataatcttattaaaattaatagcctaaaatgagagattaatattcaatgtgtatagaatttcaaatatgcaagatgaaaaatttttggagatcttctgcagaaatatatgaatatagttcatgttactgaactctatacttaaaatggttaatatggtaaattttatgttatgtatttttatcacaagttttaaaatgtaaaaagttcatgtggtagaaatttggtattttttacaacagatcatactgggctttttacctttagttatttagcttctaggtttctcttaaagtaatcttggacgacagccttatcatgtaactgacatgttgagttttcagtcaattaacatgctgcctaagcttttcttataaacaagttggctttttagggatatttccaatgtttacatttcaaaagttctcttaggttttattttgatagtcttctgattctcccttatccacacatttcaaaatatgtacatgagtgaggtcctctctacccccccatcctcctacaattcttaacttttttgtaattttgcagttttgaatccatcatccatcatagtactgatgtcttctagttttgtgtaaattcaaagattggataagcctaacttttgaagctttaaccaaatcatagtaacaaaggcatgagctttttggagagcaattaaaaacattcttctgggaaaagctgacctaataattagaattctgtagctatagttatgaatcaactactcttctacctaatttgctattatattgagtgtatgatattttcatttattgtgaaagaatttctcaaaaatgttgcaaaaaatacaggagtactgtgtttagaaatatatatatatatatatatatatatataaaatgaaatatatttaatgaaagcatatatgaaaatgccctaaacatgttacatatgtaaatatatatgtatttacatatatgtattatatgtatatatatatatatatcaaaaagctgcatcagcaaaaaatttattcttgcatactatatttttatttcatttatgaccaaatagtgtcattataaatactgacaaactattgttctaacaagttaatcttagaattattgtcagaaatttacataaacttcacctctctctagtttccaaattttctctcagtttcggagtcatgatcaaatattatcattataaatactgacaaactattgttttaacaagtttatcttaaaattgtcagaaacttacataaacttcactccccataattttcaagttttctctcagttttggagttggtacaatattatttgcattttttcccatttttcccatgtttcctaactcccattaattccacaattactgtcaatattctgagaacatcaaagatgcttgatgtttcattacttctttgataatttgtctccataggaagataaactcatattttagcaattagacactctatttttctccattctctggtttggagttttaattttctttcaaacctatttgctctctactttcccttctgttgataattattttttatttgaaaggtagatactgaagaaactgagaagctctttttcgtgcttatgtcctgtagatttattcattgcatcccagacttccttattctgtttatttccttgttccatacttttatattttagcttacttaatttttaatttagaagtggtatgcaagcttctgctaagttgtcttcttgttattcttacatgcatgtggcattatttcgcatctttctttctttgcagtttcctgttttgtaaatacctgactaacaaagcccagtctgcagaaaagtgggaggttaaagcctcgagggatattttcaaagccataggcagaaattattaaaaacggcttgtagtttcttgttctaactcagcatttccccaatttcttgcttgaggatatgagttgcttgcagtgcttgttgctgataaagattccaaggctcctacctgcctccctcaaagattttcattcagtaggtcttggatggagtccaggaatctgtattttcggaaaaataatctcatgtgattctaatttttttttgagacggagtctctctctgtcacccaggctagagcgcagtggcgccatctcggctcactgcaaactccacctcttgggttcacaccattctcctgcctcagcctcctgagtagctgggactacaggcgcccgccaccatgcccggctaattttttgtattgttagtagagaaagggtttcaccgtgttagccaggatggtctcgatctcctgaccttgtcgtgatctgcccatctcccaaagtgctgggattacaggcatgagacaccgcacctggccttgattcttatcttaaaagaagatcagagaatgtaaactgtggttttaacattttctaccaattagaattttttagggctaccacaagaaattgttgcaaatgtggtggcttaaaacaacagaaatttattcttgcacagttctggaggccaaaagtccaaaatcaaggtgtcaacagggcttcctccaaaagctctaggaaaaagtccttgcttgcttttttcagcttctggtggctatcggcgtttcttggcttggggcaacataacttcaacctctccctccatctttgtgaccttcttccccatgtctctgtcacagcatcctctcctttctcttagaaagacaccagtgttttaaagcccacctttaatccaggatgatctcatactgagatccttaactttacgtctgcaaagactacatttcttttttcttttgaaggatgttggttaaggttattagcacaaaaaatgtcatcattgtttcaataagcgaccaatcattttagaggctgagcacggtggctcatgcctgtaatgttgctgaggcattgggagaccaaagctggcagatcccttgagcccaggagtttgaggccagcctgggcaacgaggcaaaaccctgtctctaaacaaaaacaaaaaattagcagggtgtggtggtatatgcctgtagtccccgctactagggagggtgagatgggaggatcacctgaacccaggacgtccaggctgcagtgagccaggagtgttccattacactgcagcttgggcaacagagcaagaccctctctcaaaaaaaaaaaaaaaaaaaaaaaaaaaaaaaaaaaaaaaaaaaaggttaaaaaattaaaagaaaatcagaaaacttgggtgatcctggggcagttccaagatggccaaataggaacagctccagtctgcagctcccagcatgagtgatgcagaaaacaggtgatttctgcatttccaactgaggaacgtagctcctcgccagcaacagaacaaagctggatggagaatgactgacgagttgagaaaagaaggcttcagatgatcaaactcctctgagctaaaggaggaagttcaaacccatcccaaagaagctaaaaaccttgaaaaaagattagacgagtggctaactagaataacaagtgtagagaagtcctgaaatgacctgatggagctgaaaaccatggcatgagaactacatgacaaatgcacaagtgtcagtagccgattcgatcaactggaagaaagggtgtcagtgattgaagatcaaatcaatgaaatgaagtgaaaagagaagtttagagaaaaaagagtaaaaagaaatgaacaaagcttccaagaaatatgggactgtgtgaaaagaccaaatctatgtctgactggtgtacctgaaagtgacagggagaatggaaccaggttggaaaacactctgcaggacactatccaggagaacttccccaacctagcaaggccagccaacattcaaattcaggaaatacagagaatgccccaaagatggtccttgagaagagcaactccaagacacataattatcagattcaccaaagttgaaatgaaggaaaaaatgttaagggcggccagagagaaaggtcgggttttacccacaaagggaagtccatcagactaacagctgatctctcggcagaaactctacaagccagaagagagtgggggccaatattcaacattcttaaaagaattttcaacccaggatttcatatccagccaaactaagcttcataagtgaaggagaaataaaatcctttacagacaagcaaatgctgagagattttgtcaccactaggcccgcactacaagagctcctgaaggaagcactaaacatggaacagaatcaccggtaccagacactgcaaaaaacatgccaaattgtaaagaccatcgatgctaggaagaaactgcatcaactgacgagcaaattaaccagctaacgttataatgacggggtcaaattcacacataacaatattaaccttaaatgtaaatgggctaaatgctccaattaaagacacagactggcaaatttaaagagtcaagacccatcagtgtgctgtattcaggagacccatctcacatgcagagtcacacataggctcaaaataaagggatggaggaagatctaccaagcaaatggaaaacaaaaaaaggcaagggttgcaatcctagtctctgataaaacagactttaaaccaacaaagatcaaaagagacgaaggccattacataatggtaaagggatcaattcaacaagaagagctaactatcttaaatatatatgcacccaatacaggagcacccagattcataaagcaagtccttagagacctacaaagagacttagactcccacagaataataatgggagactttaacacaccactgttaacattagacagatcaacgagacagaaagttaacaaggatatccaggaattgaactcaactctgcaccaagtggacctaatagacatctacagaactctccaccccaaatcaacagaacatacatttttctcagcaccacatcacacttattccaaaactgaccacatagttggaagtaaagcactcttcagcaaatgtaaaagaacagaaattataacaaactgtctctcagaccacagtgcaatcaaagtagaactcaggattaagaaactcactcaaaaccgctcaactacatggaaactgaacaatctgctcctaaatgactactaggtacataacgaaatgaaggcagaaataaagatgttctttgaaaccaatgagaacaaagacacaacataccagaatctctgggatacattcaaagcagtgtgtagagggaaatttatagcactaaaggcccacaagagaaatcaggaaagatccaaaattgacgccttaacatcacaattgaaagaactagagaagcaagagcaaacacattcaaaagctagcagaaggcaagaaataactaagatcagagcagaattgaaggagatagagacacaaaaaaaaaaactgcaaaaaatcaatcaatccaggagttgtttttttaaaaagatcaacaaaattgatagaccactagcaagactaataagaaaagagagaagaatcaaatagacacaataaaaaatgataaaacggatatcaccaccaataccacagaaatacaagctaccctcagagaatactataaacacctctgtgcaaataaactagaaaatctagaagaaatggataaattcctggacatatacaccctcccaagactaaaccaggaagaagttgaatccctgaatagaccaataacaggctctgaaattgaggcaataattaatagtttaccaaccaaaaaaagtccaggaccagacggattcacagccgaattctaccagagttacaaggaggagctggtaccattccttctgaaactattccaatcaatagaaaaagagggaatcctccctaactcattttatgaggccagcatcatcttgataccaaagcctggcaaaaaaagagaattttagaccaatatccttgatgaacattgatgcaaaaatcctcaataaaatactggcaaactgaatccagcagcacatcaaaaagcttatccaccatgatcaagtgggcttcatccctgggatgcaaggcttgttcaacatatgcaaatcaataaacataatccagcatataaacagaaccaaagacaaaaaaacacatgattatttcaatagatgcagaaaaggcctttgacaaaattcaacagcacttcatgctaaaaactctcaataaattaggtattgatgggacatatctcaaaataataagagctatttatgacaaacccacagccaatatcatactgaatgggcaaaaactggaagcattccctttgaaaactggcacaagacagggatgccctctctcaccactcctattcaacatagtgttggaagttctggccagggcaatcaggcaggagaaagaaataaagggcattcatttaggaaaagagggagtcaaattatccctgtttgcagatgacatgattgtatatttagaaaaccccgtgatctcagcccaaaatctccttaagctgataagcaacttcagcaaagtctcaggatacaaaatcaatgtacaaaaatcacaagcattcttatacaccaataacagacagagagccaaatcgtgagtgaactcccattcacagttgcttcaaagagaataaaatacctaggaaaccaacttacaagggatgtgaagaacccctttgaggagaactacaaaccgctgttcagtgaaataaaagaggatacaaacaaatggaagaacattccatgctcatggataggaagaatcaatgtcatgaaaatggccatactgcctgaggtaatttatagatttaatgccatccccatcaagctaccaatgagtttcttcatagaactggaaaaaactactttaaagttcatatggaaccaaaaaagagccctcattgccaagacaatcctaaggcaaaagaacaaagctggaggcatcactctacctgacttcaaactatactacaagtctacagtaaccaaaacagcatagtactggtaccaaaacagagatacagaccaatggaacagaacaaagccctcagaaataataccacacatctacaaccatctgatctttgacagacctgacaaaaacaagaaacggggaaaggattccatatttaataaatggtgctgggaaaattggctagccatatgtggaaagctgaaacgggatcccttccttacaccttataaaaaaattaattcaagaggggttaaagacttaaatcttagacttaaaaccataaaaactctagaagaaaagctaggcaataccatttaggacataggcatgggcaaggactttatgtctaaacaccaaaagcaatggcaacaaaagacaaaattgacaaatgggatctaattaaagagcttctgcacagcaaaagaaacttccatcagagtgaacaggcaacctacagaatgggagaaaatttttgcaatctactcatctgacaaagggctaatatccagaatctacaaagaactcaaacaaatttacaagaaaaaaacaaccctatcaaaaagtgggtgaaggatatgaacagacacttctcaaaagaagacatttatgcagcccacagacatgtgaaaaaatgctcatcactggccatcagagaaatgcaaatcaaaaccacaatgagataccatctcacaccagttagaatggcaatcattaaaaagtcaggaaacaacaggtgctggagaggatgtggagaaataggaacacttttacactgttggtgggactgtaaactagttcaaccattgtagaagacggtgtggtgattcctcaaggatctagaactagaaataccatttgacccagccatcccattactgggtatatacccaatggattataaatcatgcttctataaagacacatgcacacatagtttattgtggcactattcacaatagcaaagacttggaaccaacccaaatgtccatcagtgatagactggattaagagaatgtggcacatatacaccatggaatactatgcagccataaaaaaaggatgagttcatgtcctttgtagggacgtggatgaagctagaaaccatcattctcagcaaactattgcagggaaaaaaaaaaaaacactgcatgttctcactcaggtgggaattgaacaatgagaacacttggacacaggacagggaacatcgcacactgggtcctgtcgtggggtagaggggagtggggagggaaagcattaggagatatacctaatgtaaatgacgagttaatgggtgcagcacaccaacatggcacaagtatacatatgaagcaaatctgcacgttgtgcaaatgtaccctagaacttaaagtctaataaaaaaattaaaagaaaatcaatttagaaaatagtgtacataaaattttatataactattatttacatgtatagatactctgaatcatgctcaccaatatatctataatgctgaatttccgctgactttgactttcttcttttagattttctgtactattttgctcatcctccatgtggaggtatcatttttcaagtagaaaaaaaaaaaggtattttaaccttgaaagttaaaataacaaaaagcaaagtcttctgtagatctgtgcatagttacaatgacaaagcagaaccacaagaaatacttaagtattgacaaagactctatttctaaagaaagtcacatccacaggtcctgggggttagaattcgatgtacctttttgatacctaacaattcagcccactaccccaggggaactttaatatgccctatattgccaattaaattataatggaggctcaggcatgggtaatttttaaaacctgttcacgtgattctcatgtgcaaccttatcctgatggttattgagtctctgccactccattgaacttctttcaatatctctctattatatccctccaaacctcagttgcttttctttgccttccctcccgagttggagtcttgctctttcacccaggctggagtgcaatgacgcagtctcagctcgctttgacttccgcctcctgggttcaagtgattctcctgcctcagcctcccaggttgtgggtggcaagccacccaggcaccgaggcaagagacagaggacacgagctgttccagtataataaaatataaaacaagaattgttataccagatatagatcttagatatgattatatatgagtatcattaatcattagttggtagcaattactttttattccaatattatgataatcctcactcaataatcatagcctaggaaaaaccaggccatacagagataggagctgaggggacatagaagtgaccagaagacaagagtgcgagccttctgttatgcctggacagggccaccagagggctccttggtctagcggtgacatcagcgtctgggaagacgcccgtcaccaagcggatcatggtccagccgtagcaaaatgtgtcaagaaacaacacccgctacttagcagaccgggaaaggggaggtctccctttccctgggggagtttagagaagactctgctcctccacctcttgtggagggcctgacatcagtcaggctcgcccgcagttatccggaggcctgtctccctgtgatgctgtgcttcagtggtcacgctcctagtccaccttcatgttccatcctgtacacctggctctgccttccagatagcagtagtaaattagtgaaaatactaatagtccctgatatgcagaaataatggcgtaagctgtctttctctttgtctcctctccctctctgcctcggctgccaggcagggaagggccccctgtccagtggacatgtgaccttacctatcattggaggtgactcacattctttaccctgccccttctgccttgtatccaataaataacagtgcagcccgacattcggggccactaccggtctccgcgcattggtggtagtggtcccctgggcccagctgccttttctcttatctgtttatcttgtgtctttatttctacactctctcgtcgccgcacacagggagagacccaccgaccctgtggggctggtccctacacaggtaactggaattacaggcatgtgccaccacgcccagctaatttttgtatttttaatagagacgagtttttaccttattggccagactggtcttgaactcctgaccttacgggatctgcccacctcagcctcccaaagtgccgggattacaggtgtgagccacaatgcccagcctgcttttgcttttctagtgtgtttttttcaagtaattcagcagattatttctggtaggaaggagctaactggagctgcctcaccggttactggccagtgattattttaactgtctttatgatgctgacagatattttgttgtttcagtttttatcaagagtaaacatgaattatttagagacttcagcagcattaatatctccattggttaaaaatatatatatatatataaatatgcatgtacatgcacacacacacacgtaaaaatcagggtcaaaggaaataattatgtaaaaatctaggtcgtggatggcacatagtggtttaactgtagatttatgttcttttcctttcttctttcttcttccttccaaataatcttcttttctcaagtgggaatatatgttttttttttcaattgaaattatttcagaaaacagcaacatttctgaaatcctttattggttaatattaaatttattattttgaaaggtgttcagttgaagtcctatattgatccaggaaacatttctatcatgccaagttggggttttaaaaacagaagctatatgcatctttgcctaagatgtaaccaatacgtcagtaaataatttctgccactgtaacattttgtcattgatgtcaaaatatttcattacagcatatgtaaggtctaaacctacctctgtatttccctgcagcgtttttttaaagggtccagttttcctacaacagtgactcctctgcttggatgcagagtctcagacatgagctaaaatttgctgtgtagccatagcagcattttctctctcttgttcctttcagtcattggcaatatgaccacatctaactaccaaaaaacaaaacgaaatgaaataaataacaacacaaaaacacctttccactgctgcacatcccagaagcacagcattgtgtagtttgatatcccgcacagtagagaagatgtccatatttgaatcactggtggctgctcattgctttgatgaaatctttctagaatttgagcaggcctgaggtgagtgaaatcaggaccttctgtaccctgccaggaaggcagtcgtggtgtaacttctgtgagttgtctggagccaacctcctcttcagagaagaagctacagaacaccgtagcttaaacactatagggtttaaagttttaaaacactatcaaacactaaaaacttctaaagttttaaaacactatcgtgttttattgatgtattctctaaatattttttacaatgttattttcatatgagtccacattagacctgctctggtgtttttagccactgtgttctagatactgggtctcaggggaaaaaggcaaagtttctgctctagaaggttgcatgggggatagtggttgtggtgtgcaaaacctcaataaggagatgacaattctacatgatgtgcttatatgtgaattttctgaagatcgctacattcttttaagtgaataatttatacttttcctctgcttttgtatatgtaaattcttatacagtagcactgaatccttacaggttctgaaattctaggttcagtgcatacccattctctattcaatttctattgctatttttaaaactgatgtagatacatttagctaaagaaagtcggataatacataggtgcttacaacaacaaaaaatagtagatagtataatagtacaatagtagatagtaatcattctacaccttttgtataattgccagtggcaagtatttttaactcttagccaagtttcctggttattacctctacttgcatataaggtagtatgtttaagtgccatttcttggtttctgaaaattatactcctctcttgacttcctcttgactagaacataatttaagttataagttttaaagttttaaaagctttaaattaaaagtacaagtaaagaaatgtactacacagctttatagaaaataatattatattgtgataacaataatgtaaacatgcttacctcatggtataattaaaagctgtgacactatattgagaaaatggaaaaaaaattgtgtggagtaccaaaaaatagtcaaatttctaatttttaataaagacattaggaagtgatatacaacaaaaattatttatgaaaatattgcttgtgttttagtaactctttctttttaaatatttgtgtgtggaagaatatatgtcaatcatttgtgttttccttatgttcagataaagggtgattttgattttatttcattgtggtaggagaaaaagtctgtgtgatattctttctttggaagctattgcgactgctttgtgacctaggaaatgattgcttttatggaattcctttgtgaacacaagaaaaatgtatatattttaaaatttgatagtggtaaatttcttttgacaaatagaaggatagattgatggattgataggtgatattgatcaagcctattaattttgttgttactatcctatgtatccttattgatattttgcctgcttaaggataatgtaaaaacataaggtagttttcctgaaatgtatttacttgtttatatgtaaattggcaaacataaaatctatctcatattgttggcatgaggattaaatagagaacacaaaaccaccaaatacagtgtttgagtagttaattgtattaactacaacttctttattagttagtagtactaccctctcctttgttctttaattccattaataggttaatgtcaggctgatcttattctgtaagatcatttaaaatattggtttacatgtcatgtaatttcacattaaataatttacaatgattttcaattctgaatcttgctagatgttttaaatagatctttgaatattgaccatagtatcagatgtgtataatttcatatgtaaataatcatatattggagttcaataaaatattaggacatcttacttttagaggtgagtgctcacaaataaggacaaagtacttttaactataaatgtacactggtaaacatgtgtgagctatcaggcatgactaggtttagtaatactgccttacacttgcatttaaccctgataattctcgtaggtcccctttcattgagtgcatgcttctttttttaacgttctttctatttagtgatttttatgtttcctgtgtcaggaaacgtttttaaaatgtgctagttttagtgacatctaacgcttcacacttaatgacactgtgatttctcatttgcaatcaggatctggcagtgtgaagctcactgataatttgatttcttgggaaattttatgttgttttttacatgttgggagaaagatctataactagaataaataagagtgaattcttagaaaccatttataatcgtatcttgatccagtattgatgtaataaccaaagctgtctattttgggtattatcaaagttaagtctgatccatttgaagtgtcatttgcttctctttccctgagtgctttgctttccttttatgaaaaataaaaggcaattgcctgggtagcctgagcagagtcaagatatcagaattataaatggacatcaaccacagagctaggaacaaggaatctcaaggtgtattattttcagtggaaagtcaatgtgtataagcaaattgataaaaaaattactcattttaataatatgctacttttaaaagtagcaaaaatgaaactgaacgaaaagtaccccaggcaacctcactactacttcagggccctgaagtgtctattccttgtgcttatatactgctatagtgaataattgcagtgtatgaatttgaatgagagaaaaacaatgaaatgccacataacataatgatgcatttttgaaatttctgtagttttaaaaggttgtcactgtgaaatataatttgtcttactccttttctcttggaagttgtagtgttgtaggcacactaaaaataaaaggctgaaatttcctgaagtaaagtcttaaaatatataaccaaattaatttacttgagatacttcacatgtattttgagttttaatataaattatagataaattaatcattgttgattttatctgtcacatgttatttggcatttctaagttatcaaatttattattttcttaattacttcttgggataaaaaatctaaattcattgtttaattattaactttaggactacattaaacctacattcattttagtagtaattattttaattgccagggagaattatcattgttagatatgagtttattctttgacttggaagatttttctgttgtgctaaaatgtattaaaaaaacagaaaatgcaacttgaatctcctattcagtttttcagtcaactagtttcttcctatcaatatttatgtatgtatgttcaacattttccctcttaaagaaagattaccaccaatataactctcttctaatcctgtatctctcgttaaggatcacattaattcttacattcttcacattcagatttcctggaaaagttgcataaaactttatgtatccatcttccactcagtctactaatactggaaatttattttccccttaaaccattccaccaaaactgtctttgacaagctcaatagacttacaaaaaaaaaaaaaaatctgagcagcacacttcaagtttgtatctaacttatctgagcagcgctgaacactgctgtccttctccttcaaacacttctcttgcctttagtgactgatatttcttgatttccctcttatatttttctggttcctctgtctctacctaaccctcatatatacgttcactgttttctttgagagggtgggtaaattattttctaaaatgttctcactttttattttttcagtgggggtggtgggtaaatttctcactccaggtttaacatttaaaattgttgcaggttaattcaggttttatacatgtgttcttgagatcctgatgtttcactacggtgtttatgtgaatttatttttacttatttcaaaatagattttgcttcctgaatctaaagtcatgtctccttaaattctgggacattttaagaaattgtcttcttaaatattgcttgctatcctgattttctctccttcctgttttaacaactattagtttgttagattctgtccttcatgatttctcttttatattgttcttaaactctgagctgcaactatggtgatttcttcagatcttccagtttagtaattctctcttcaagtgtactaatttgtaatttaacttgttcatgcggtttgtaattccaaaactacagttttcatttctgaatgtcctatttggttgcttttcaaatctgcctattttatctgtgtgtctttttacatggtttttatttttgtccttaccttttaaatacattttgacttacctattttatattccctatcagatttcaatctatagcctctacagatagattttttaaaaatatctaaagatattctggatctaatcctgttgtttgttaggtctgctgaattttagtcaccagattttaattattttataattattattattggtaagtttaattttttttgtcccatgtggaaattttaggaagactttcttgggtgatgtctttcctgagcaccctgtcactgttctgaaatattattacatggcctggattaatttttatttgaatttttcaacttaagatttctgaattacaggaagtagagctcgtgactgattatagccttgtgatcatctattttcaaggggacttttttcccctctcacagtctaggctgagatatctctttctactaggaggagatattatctaactcacccttgtacttagagtttagactttgaaggtcctagcttatgttggcatcttttgtagaactagagaattctctcctgtcccagattgacattaaaacccaggcatctagatagattacagaaccagctttcttttactgcctttggaggcaaaactacacatgcatgcacaggcaacgtttttatatatcattcactcacaattctagtttttaggaccccttttatttctggactctgaaaatttatattctttgtatacatttacctatatattgaaatatttggctgttattttacctaacattcctgattgtctgccatattgtcagaactattcaatattttttccttgcacttcttttagtctcattgtatatgtacttcctaggtgttctctttgactttctaatactttgtcatttaaatagtgatcatttccaactctgtcttgcaagcctatttcactacttctatcttataccttattgcaacctttctaaaattctttcattttctcaaacattgtatataccctcacttccgggccgtcatgaatctgtctctttctttggaacattgtagaagcactccttctcctcttgttcatgtgccttaattcaaacatattattcatatcagttttatatccctttctctgggaagcaatacataaatagccgagattagtttggctacttctgctgtgtactataataacacattacattgcctataaaataacatctatcagatatttattaaaatcacttaattgtattccaaatgtcttccctagtagattgtaagcactctgaaaaatgagaatactcaatattgtattcctagtgcctagcactctttcattcactcactcattcattcactctgggtggtatatttctaaggcctagaactctatctgatataaaattctcagttaaatatcttgaaccaataaaatatttcagtgatattttcttccattttgcaaatcacagacctctgttcagagatgttaggtaactacccaatatcacacattaattggcaatacagtcaggatttgaacccacatttacctgcccgcaaagccttgttttttgtatgtggcattatacttggtatataaaatgagattgttatgtgacagcaaggaaagagtggcaaaacgatgacaatttgtggtacactactctcatatcgttttctccaaaatgcatttactctattggatcatttgaagtctgtcctatataagtaccaattcttgggagccacaactagtgtcaatatctagaaatgtaatgtattttctcagtgaatctagtgaatgtgtaatctttaaaagcaccacttttcataagaatatttaattatgtaccataaggtaggtaaaaattagaattgaagtttaaatgttagatgtaaactacagaatgaagaattaaatttttaattccttcccaaatctttctaagctataaatactctttcaaaagtattagtataatcagcatggtatagtgaaaaaaataatgtattttggcattgatcagagtgttgtattcaaactttactgccacttgctatttatgtgatatgtccttaggcaggatatactgttttcttctgcaaattggtgttagtgttaacaattgcagggatattgtcaagagtatcagtgtattggtaatatatctacagctagcctagtatcatatattcaataaataataggtaatgtgtttattattgtctttttcaggtgaagataatactttcctaaatctggactcgtacaatattcttatcttgtcattaattttaacttgaatcttctatgcaatttccacatacataattttgaaggataaatttatctatatagctcatgtgttacatgatctcaaacatacctatggcataggttttgagactttattaacaaattacttaaaaatattattttggggggcaaggaggaggaataaggaaaattcctaggtcagagacaggaaagaagcctgaattagatttgaaatctaccttcctgggagacattcctctaagctttgtatactggttaaatataagtaccataccaatcacgattacccttgagagaaagacaattgtagccatttatataatagcttacctataacctgacaataaattttaagtgaaacatataataggtaaattgagcatactacctgtaataatagaagatttttaacagtccattaatccatattaaatattctatgaggtttaagtaactaccaagataaaatatagttttcttttcctttctataattgtaacttgatgacatgtaagccatttttgttcataatttttctctttttcagagttaatcaggtaattcttgcaagtgtcctgcaatttgtatccaaagtcaaagaatttttatgcaaagtcaagaaataaaaaattgtgtgtaatatttaaatctttgtcaaatataagaattcgtaatgacattttaacagagcaggtatccagaaataaacccatatattcagatgctattttcaacttttaaattaacactaatatgaaagaacaggaaaaatgttaaatttattttaagaggtttttaaaacacaataatcaattatggtaatttattataatgctgtgaaaaccccgggagttattcaagtggtgaatcctactttttgctacattaaatgctttcagggtattatgcatttctagatgatatctcttctgacttcttgatctctaggacttataggacccaagagataagattataaaccagaagtctgaaaccagagaagctgagtgatttactcagtcatagtactttgagaatgaaacagaaatgaaacattaataactttcctcctgtacatgtctctctttaaataattactctcttcagtgatttcccttcagccttattctagttcccaatgtttttctctacagtaatttttctccataagctaagttggactataaggttaacaacaagagacatgatgtaactatcattaaaaaattaatcacatatgatatataattgttaaagcacacgtttacattatatgtgtttatgttttattcagtgtgggcagaaggttaatgtctcattttcttagaggttgaatgtactgaatattagatttttaaatttagtttgataactttttttatatattcagagctaatttccactttattttttgactgttttttagtgttaaaatctaacagttggaaataattttaaaatttacatggaaaatttcccaaccgatgaagtatcatcagtttcaaaagttttcagatgcttaggatgatttatttttttcttagcaaaacttagaatattgattaatatgctcctaagtttatagaagagagataaaatttaaattagcttattatagagtcaaaaaagatgtaatgttatttttaaagattagatctcatcatatctgagtccccattttattgtttactcatttgaaccaaaacttgagttgattctctgtttaaatgccttgattcttgtctacagtacatcttctacactgcagtacatccactaaacagttattatctatctaaggacaaaagcatatttcggacaacgttcgtgctgattcttgaaacataaatgtgagttctcactatcttgttaggcaacaaagagaagaaacttacgaaggagtggctgacatgaacaaaatcttgttaactgaatcctaaaatagtggaaatatttagagacacatttctgataaacacaagaaagtactcctttgcaaaatgaaacaatgtatgagaaatgtttaaaccttatgctgaatatatgctaacaatatgaggagattaaaataacggtttaggtacattcatggatggtaagggaaagtgagataggaaattggtaatagagtgtagtacaaagagtgctggatggggagcttcatgaaatgaattctaagacctgtttttccttaaggagatacatgtatcattaggcaagtctaatttctctcagtttcagttgccttatagctaaaatgattggacataattagtccattttttaagcagagaaatatatttttgttattcatatatttttctccaaaataaaatagtgctcaaaactacaaaattgaaatgactgattgattgatgagtaacatgtgaatagatttggctggagaagtttgaatagccaaagtcaagcctgttcagccatcagttgttcttgacagccctgagacaatgcagagaatacaatttgaaaatatttacaaatattttacaaatattctctgcgttgtcttccctcaaatatattctatgattctgtgtcagtggtcttaaatggaaaaacaaatattagtcacaaaatgtcattggcttccgctgtcacaagaacaattaaagaatatgggccaggcgcagtggctcacgcctgtaatcccagcactttgagagactgaggcatgtggatcacaaggtcaggagatcgagaccatcctggctaacatggtgaaacaccgtctctactaaaaatacaaaaaattagcctgcatggtggtgcgcacctatagtcccagctacttgggaagctgaggcaggagaatcgcttgaacccaggaggcagaggtttcaattagtctggatctcgccactgcactccagcctgagccacagagtgagactccatatcaaaaacaaacaaacaaacaaacaaaaagaatatggaccataggtctatttcagtatatcagttttttctatctttatgtaattaaactgatagagtttcttatttcttatttttcttctttaaatatcttttaaaggagctcttgtgtgtgaagatttgtaatgctatccatattctcctgagcttaaaggtctgatattgagcaacttaaataaactctaggtgaataactttcaccatgtatgaattagagaaaataaaactttctcctgggacatattagtaagcaattctaaattccttggataaagtgttcagcaattatatttttctctgactactgttacccctcttttttggctattcaccttgattatcagattttattatgacagtgttgtcttttagatttattgatattcaaattggctaattatctctttttcaaactctttttctatgctaattatatgcctttctgttgtaattatctaaaggttagtaaggaggtctcttgatttaattatgtaaaattcatcttgaaatctaattctttgctatttttttttcggttttttgttttttttgttgttgttgttttgttctttttcgtagactaagatttcatacttttctttgtaactaggtgatactggcttacctaaatgattttattgtgtttattttttttttaactttcaccatataatgttaacatctttcagacgcagagtgagatctgacttttcatctttggctctctgtattcagaaaaggccttccactattaaagcataaacacattactttgcagctccagagtgtacagctccaatagctgttatccactgagtgaatgttgagtcccttggtgcatggagttgacatctattcatttttctagcagtataatgaatccaaatgatccttcataaaataattctcctaggctttcagtcactggaaagcactcatttaaagtatattaaaagtatgtgtgtcctatgtcctcaagaagttatagtcactgtatttgtttatctgccatttcctctgtgcctttgtagagaacagggaaggagttctgatcacattatcagatgatacgaattatgtcatgcacagtcaataacatgttaccttttggacatttttatatctttcacagaattcccaacttgtgagccactaacccaattcgtatgcaaaagtggaagatgcattagcagcaaatggcactgcgactctggcaagtaccaaatgctcactgtatagcactaatttgatcgggggcttggcggtctggactgcctggctttcttcagaggtactttgtaggggaatcttgcagagccaagaaaaacggctaaaacaagtggtgagcgggcagctagcagcacatcagtgggaattagcattaaagataatggaactcaatatttgccccatgggtgtgtgatagagatttgttttcaaatgttatgttggacatagtctaattctacaaacatgtagtaaagtggacaattgagaaaataacctggacatctcgggttccataaaacatgcgtgtaacctcaggaggagaagcttatacattgctatgaaattacccagatagtctcaactctgtcagtttcctcttatgttcaaatggtattttattctcatattcaattgtattactatgctaaattatgccaaatacaggtaaattaattatataggaatcaatgcattcccagccatttattttaatttgatctaattttccttcacagctctctcccctccctcccgaaatggttgttaataaagaatataaatcatttctaatgatactgtacaacagtttccaagtacaaatatatacagaggagccaaggaggaggggtaaagagtgggttctcatgttggagaatggggaaaaagggaggatattgaagatagaattataaactatgggacatgagaactataggtttaagtaataatcttccacaataattatattattggttgtatcatttcatgaaattcctacagtcaccattgcctccttgtttcgtggtgcatagatgaattcagtcagtggttagttatttctgtgtggaacagaaattaagcttcaaaatccaaagtcaaggatttttttctctcagtttagcagttgatattaaatcaaaggagaagcaatatgaagatgaaaataattcttccactgtttatcagcaatgttgttccactgattcaattatcattcatttttcaaaaaaaaaaaacaactttatataggaaataaataaataaatcaaagggccgggcacagtggctcacgtctataaccccagtattttgggaggccgaggagggtggattgcttgaggccaagagtttgataccagcctggccaacacatggcgaaaccccatctttactaaagaaatacaaaacaaattagctgggtgtggtgacatacatctgtggtcccacttacttgggaggctggagtgggagtatcatttgagccccaggaggtgaaagttgcagtgagccgagatagtgccactgcactacaggttgggtgacagagcaagactctgtctcaaaaaacaacaacaacaacagaaaccagttagatatttcataagaaaaaatttcttcatggttcagatttcactgcctcatgttgatgtttctttccagatgacgactgtggggacgggagtgatgaggtgggctgtgttcactcttgctttgataatcagttcagatgttccagtggcagatgcatcccaggccactgggcctgtgatggtgacaatgactgtggggacttcagtgatgaagcccagatcaattgtactaaagaaggttagtaattttataaattaatgaaatctcattttaaaagttgatgcataataatacttagggtattacagagagaatattgtataaaaagaaattgcttattaggcaagaatatacatgtggaactgtgtaaaatcatttgctatctctttcctttccctctttgctttttccctttggtttctcctctcaatacctccttattcctttatgccttctgtggtctttgtttcctacatttactcaatgctttacttactgctttttttcttttttttttttttttttttttttttgagacggagtctcactctgtcacccaggctggagtgcagtggcgccatctcggctcactgcaagctccgcctcccgggtttacgtcattctcctgcctcatcctccaagtagctgggactacaggcacctgccaccatgcccggctaattttttgtatttttagtagggacggggtttcaccatgttagccaggatggtctcgatctcctgacttcgtgatctgcctgcctcggccttccaacatgctgggattacaggtgtgagccaccgcgcccggcatacttactctctttattctcatccaaaccctaaaactatttcaacagtgaaaaagaaaatatataaaaaaaaaagaaaggaataattttacttttatttccatacaacatttgtttacatgaggtttgaaataatccctgattaaatgaggatgtatttccaactgactgactttctagagtacaagctaagaaaggaaggagattatgaccatggctctcaacatatccatggggatgataaccctgtcattcgcctggcttactttgcaaaatatgatcagtcatagagcatattaataatttaaaagtcatgttggaaatcttacagaaaaaaatcattagactgtcaagcaatcatacaattagtactattttaacagaattttttctgctaagagactgaaagatgttatttatttcatttatctcacaaatatttattgaggactaaagaataaataaaaggatgaaaacatatggcatctgctcagtttaaatatcagcgtaaacaaacaagcaacaaagtaatttatttagtgtggaggggtaggggaatcatatactccatgagcaaaagaaagcattttcaaagtgttttacacagatatgtttgtcttctgcaatatttgtcaacctataagatagacagtgtctaaattgttttctcccacatagattccttttgtcttttgtttcccctctttctctttaaactgtaacttcttaaaacagtggttattaaattatctacaatactaggtttttaaaaagcccagctgttctgcggattccctgagtgatgtattaaaatacatattgtgtgattttttaatttacctggagaacttggattataagagtcatagtaaagatccaaatatggctaaacaatggcctataggccctgaggcagtgaaacacaagttctcatggttgatggtcttgacatgattcctgtcattctctggcaatggacatcgtagaaattataataaaaacagaaacgaagaaattatttgtgacatcctataagatttaacataagcatatttgaattcaattttgcttcaaaatcagaagaatgcattatcaataaagctaccatttaatattatctctcattctccattatgtaataagttcaagacctcactcttctctctttacctctagctcattattgtgtccatttctctatttagttgttgcatgagtatatatgagctagaactttttgcctatcattaatattgagtgaaaaaagaaaaagtatatgtaaagtttttctttttttgccaatatttgaaacattcatctaagagtggtcgacatttcatcattatataacattttaaatgtaaacagtatttttccttcctcacagatgtcttttaaggctcctcgtggggtgtgcgtctgtggtctgctgacactactccataatgtgctatgaaatctaaattgccctaaagttaatttattgtcatctcagatgtgagctcacatccttctcttgcatgtgcatttatcactaagtttaaacgatcattacatattatgaaatttttaaaagattgcttttccctcatgagtgtccaaagttagtggcacacctctttgtaggctctgtagatagtaactcaggtttcactattgtagaagcagtggctatttaatgttaatggccttatttagagcacctcattttcactagtagattactgtatgggtatactgtcaatgtgaatggcatatatctcttgtataattatggaaatgatccagttagtccacatgactccttgacatgtttcaagcaaagaatgaagagagttcttgaactaatttgtattgatcagattatacattttactaggattccctaatcaaatattctacgtggtgaatacaaggtggaggaattgtgaaaagttaacattccaggatgactttggtaaaagacaattcaaaggatttcaagtggaacttaaatatttctattcattattcttttgattgtatattctggtatagaagttgtaaaatgacacagattgttaaagctgatcagcaaagtcatttgcacgtgcagaatttgtgagccattgccgaagtaaagcagaaattcgctttgattagtcatataattcagtccccaaacctgctgtggaagaaagagcaggggattctggcttgagtttcaagactggctgtcaaaactgatcaaatccaccatataattgctcagcactttgctttacactgcatggataagcagagcatatggtgcaatttctctcaactcaaattgttttcaaaagggtagaaatacacttaaattgacttttaatagtaaaggaggaggagaaactgggaaatggaacattccatatataatcttcgtttcagaaaatttctaaatttaagttcaatatgtattctctctaaaatcactttcaaaaatttatttttgttaaattttatttttataatagattcggggggtacttttgcaggtttattgttaagagtattttgcatgatgctgaggtttggacttctattaattctgtcacccagatagtgaacatagcacccaataggcagtgtttcagcccttgctcacattccttctctccattttggagactctattgttcccatctttatgttcacgtgtaccaaaggtttagctcccacttacaagtaagaacatctaatatatggttttctgtttctgtgttaattcacttaggattatggcctccagatgcattcatgtcgctgtaaatgacataatttgttcctttttatggttgcatagtattccatggtatacatgtatcacatttcctttatccagttcaccactgaatcaacctaagttgattccatgtctgccactgtgagtagtgcagtgataaacatacaagtatgggtgtctttttggtagaaagatttattttccttttggtatataccgagtaatgagattgctgggtcaaatgatagttctgttgttgttgtttttgttgttgttgttgttgttcttgtttgagactgagtatcactctgttgcccaagctggagtgcagtggcatgatctcagctcactgcaacctccacctcctgggttcacgcaactctcatgcctcagcctcccaagtagcttgggactacaggtgtgagccaccatacccagctaattttcatatatttaatagagatgggttttcaccatgttggccaggctggtctcaaactcctgacttcaggtgatccatccacctcagcctctcaaagtgctgagattacagatgtgagccactgcccctgaacctgtttttactcctttgaaaaatgtccaaatttctttccacaggggctgaactaatttacatttctaccaacagtgtctgtgtgttcccttttctccacagtctcaccaacatctgttattttttgactttttaataatagccattctgattggtgtgagatgttatttcattgtggttttgatttgcatttctctgattattagtggagcattttttcatatgtttcctggccacttgcatgtcttctttctgagaagtgtctgttcatgtctttggcctactttctgatgaacttgtttttttcttattgatttctttcagttctttataaattctggctattagttccttgtcagatgtgtagtttgcaaagacttgcccccattctgcaggttgtctgtttactctgttggcagtttattttgcttgacaaatggtctttagtttaattaggtctcacttataaatatcttttgttgcaattgctttagaggacttagtcataaattctttgcctatgccaatatctagaagagtacttcctaggttttcttctaggatttttatagtttaaagttttacatttaagtctctaagctgtcttgagtttttatttttttttgtatatagtaatagggctacaatttcattcttctgcatatggttagccaatgctcccaacgccatttattgaatacggagtcctttcctcattgcttatttttgttgactttgttgaagatcagtcagctgtaggtgtgcagctttatttctgagctctttattctgttccgttgatctgtgtgtctatttttgtaccattatcatgctgtttgggctactgtagccttgtagtatagtttgaagttggataatctgatgcctctagctatattctttttgcttagggttgctttggctatttggaattattttctatatgaattttagaatggctttctaattctgtgaaaattgatgctggtgttttgataggaatggtgttgaatctgtggattgctatgtgcagtatgaacattttaataatattgattattgcaatccatgagcatgaaatgattttttatttgtttgtgtcatctctaatttctttcagcatcttcttggttagatgtattcctagatattttatttttgtagctattgtaaataggattgtattcttgatttatctctcagcttgaatgctattagtgtataaaaatgctactaatgtttgtatgttgcctttgtatcctgaaattttactgaagtcacttatctgggctagttgccttttggcttaggggttctagataaaatcatatcatcagttaagacagataatttgactgtttcatttcctatttggatgccttttatttcattctattaactgattgctctctctggggattccagtacgatgttaaatagaagtggtgagattagaaatcctcatcctgttccaatccttaggggaaatgcttgcaggttttgcctgttcagtatgatgttgactgtgggtttgtcatagacagctcttattattttcacaaatattcctttgttgcttagtatgttgaaggttttatcatgaaaggatgttggattttatcaaaggctttttctgcatctattgagatgatcatatggtttctattttaattctgtttatgtggtggttcacatttattgatttgagtatgttgaaccaaacttgcatcccaggaataaagcctactgatcacgatggattaacattttaatgtgctactagactcagtttgctagtaatttgttgaggacttttgtgtctgtgttcattaggaatattatgctgtaattttcttttttcattgcatctgatttttggtatcaggatgatactgcttttgtagaatcaattacaaaggagtccctcctctgcagttttttggaatagcttcagtaggattggtacctgttcttctttgtaggtcaggtggaatttgactgtgaatccatctggtctgggactcttttgcctggtaaggtatttattattgattcagcttcagaactggttactggtctgttcaaggtttcaaattctttctgatttaatctaggaagttgtgtgtttccaagaatttatccatttcctctagattttctagtttgtacacacagaggtgttcataatagtccctgagagtcttttgcatttctatgggatcagttgtaatgtcaccattgtcctctggggttgtgcttatttggatcttctctcttttgttcttcattagtttagtagcctattgatcttgtttattctttcaaggaaccaacatttcctttcactgatcctttgtatggtattttgggagtctaaatttcttttagttctgctctgatttttagttatttcttttcttctgctagcctttggattgatttgttcttgattttctagttccttatgtgtcatattagattgttaatttgagatctttctgtcttcctgatgtagatgtttagtgctataaactttcctcttaagactacttttgtcaaatcccagaggttttagtatgctgtatctctatttttcatctgtttcaaagaagtttttaaatatctgccttcactttgttgtttacacactagtcatttagaagcaagttgtttagtttccatgtaattgggtggttttgagagttcctctggctattgatttctatttctatttcactatagttttagaagatgcttggtatgattttgattttttaaaaatttattgagacttgcgactgagcttgtggttgatcttagattatgtttgactgcagatgagaagagtatatattctggttgttgagtggagtattctgtagatgtctattaaatctaatgggttgagtgctgcatttaattgagtaacagaattcatttgttaattttctgccttcacagtctgtctaatgctgtcagtggggtattgaagtcccccactattattgtgtagctgtctaagtcttttcctacatctagaagtaattgggtgccctaatgttgggtgcatgtatatttaggaaagttagtatttttgttgacttgaaccctttatcattatgtaatgcccttctttgcccttttttactgttgctggtttaaagtctattttacttgatacaagaatagcaatccctgctgtttttcgttttccatttgtgtgatagatctttttccatcccttcactttgaacctatgtgtctcattacatgggagatggtctgttgaaagcaacagaaagttggttcttgttttgttttaaacccaattagtcactctgtcttttaagtgaagcatttagactatttacattcaaggttaatattgatataagagattttcgttctatcatggtgctattagcagtttgctttgtactcttgattatgtagttgcttcatagggcctgtgggctatatacatgtctttttgtagtggcaagtattattcttttattttcatgtttagaactcccttaaacatctgttataagaccagtccagtggtagtgaattcccttagctattgttactctggaaaaaaaatttatttctccttcatttatgaagcttagtttggcaggatatgaaattctggcttggtgtttcttataagaatactaaaaataggctcacgatctcttctggcttgaaaggtttctgcagaggagtctgacatttgtctgataggattcactttgaaggtgatatgacttttgtctctagctgcctttaaaatgttttctttcatgccgaccttggaaaatctgatgactatgtgttttgaagatgatcatcttgtatgtatcttgcaggaattccctgaatttcttgtatctgtatgttgacctctcttgtaagattggggaaattttcatggactatatcctcaaatatgttttccaagttgcttaatcttcctgtctccctggaatgccagtgagctgtgtgtttgatcactttgcataatcccatatttctcagaggctttattcattttattttaattatttttctttatttttgcgtgactgcgttgattgaaaaaattggccattgagcttcgaaattctttcctcttcttggtctagtctgttgttaaggcttccaattatattttgaaattcctgtcatacatttttcaatttataaaagttcagtttggttctttcttaatatagctttgtcatctttcaaatcttgaatcattattcttgtttcactggattggattttaacattgttttggatctcattgagtttccttgccatccagtttctgaattctatgtctgtcattttagacattgtcatttggttagtgttcattgctagaaagctagtgtgttcctttggagatgatgaaacactctgtctctttgaattgctagagttcttgaactgattcctcattatctgatggagctggtgcttctttttcttcatgaatttgctgtcatttggatgggacttctttgtttttatattctcttttccctcaaaggtttaacttacatgtatgttgtgtatagtcaattggcttcatttgcaggtgctttcagagggccaaggttctgtatgagttacttggttgtagataggttcccatggtaggtttcactggtattgcatgttgaagcagtatgtttttgttttgtgggataattcaggctcaatccagtagatggtatgtaagaataagggctggcaggtaggcttttacataggtgctctcatgtctttcgtatttcaatgtgtacacagttatgctcccttgcttaggtctggtttggtttctggggaccagtcctcacatcctgcaactttgaacaggccttccaatgtcctccttcttcacccatggtacctgtgttgcccgtattgactttcagtgttttctctcaagagatctctttgaagtgtgatagtttactcaatattttgtttcctctccatggaagaagagtatcttggctgggtctagtcagatgtcttgttctcctctttaccattttcttcaaaaaggagttctatagtgatgatccatttttcatcatcaatatggttaatacatgggaaagtataaatgaatagtttctcctagattaatttatacccgctttttttctcttaatgtcatgctgtttctttttctcatttccaaacttcttatagacaaggaagatgtgtcttcagaaaacactatgtttcaaataatttgaaaaaaatgttgacatcactgatcattagagaaatacaaatcaaaaccacaatgagataccatctcacgccagtcggaatggtgatcacttaaaaagtcaagaaacagatgctagcaaggctatggagaaataggaacacttttagactgttgatgggaatgtaaattagttcaaacattgtggaagacactgtggcgattactcaaagacctagaaccagaaataccatttgaccctgcaatcccaatactgagtatatacccaaaggattataaatcattctattataatgatacatgcacatgtatgttcattgcagcactgttcacaatagcaagacatggaatcaattcaaatgcccatcagtgatagacttggcgaacagtctgtctcaatggaaaaataagtaaggctgggtccctacagaatttggtatgagggaacttcctctaaagcccaggtctgaccatttatatttatgtattgcaaggttcttgtgaaaaggtggatttacctataaggacatgaagaataaagttatcatgaaacttcagtcttttcttataagtcattaactctctggccagaatagtaaaataaggagagtctggatatacatcacatctattaaatatcaaatataaaattaatctcatctcattgttgacagtttaattcatctgaattatgtaaactttcactacacttttttagggaaatctcaactatatttcacccctggaataagccatttttgaaataaacatataaaaaattgttcagtatctttagatagctatttccgcaggtaagtttctattcagaaatgtttgtaacaatttacaccaaataggctgggcgtggtggctcacccctgtaatcacggcattttgggaagctgaagcagacggatcacttgaggtcaggagttagagaccagcatggccaacatggtgaaatcctgtctctaccaaaaaatacaaaaattagctagctatggtggcacagctgtagtctcagctactctggaggctgaggcatgagaatcgtttgaacctgggaggtggaggttgcagtgaactgaaattgcaccactgcactccagcctgggtgacagattgagacactgtctcaaaaaaaaaaaaaaaaaattacaccaaataattcagcatgtccttgataaagaaagaaacatgtttttcctaaaaaaaattttacctgtattttctaattgcaactaaaagtaactcaaatattccttaaatgtttggattttcatgttgaggggacatctgaccctggtttattgtcattgttctggtttattgtcattgttctttaataccttcttttaggctatctgaaaagggaatatttattgcctgctgtattaagtgaacactcagagtaatgctgggtcatatgtgatatcttatttacatagtaaatacagtttaaatgcaaatataaaagtaagcatgtattgacctacaatttaaatttattataaatatatatttataatataattttatattataaatttattataatatatttataaatgttataaatctttaacaagtttccaaatccattaggcaactaattgtgtaatatgattaatatacatactcacacatgctcttattcttctgttttaactgtttatctttgcttctgctttggaaacttctcctttggctttttcttcatttactcattcatgcattcattcattttcctcactaatttcttgttctcagatctaagaagaaaactaaattaagtttatcttgtgtttgtacttttacagttaagcatgatatttgatactgggaatgcatagtaaatgttgaataaaagagtatttcttggacagaaaatttgattagactctcagaatccatcccttgtagtactttttttctctttctttatcttacccccagatcacagagtttagtgttatcataatatacaagactaatcatatcaatcgagtttgtacattttcttagtacaatgtaatcattttcatttattcaataaatactggaaatttcagtcaggattcaataaaataaaactgacaggctgtcttccatatcttttgttattgtttatttcttttgcttatgtcctctttgcccaataaatagtgaatttccgaaagatagaaaaattttaaatttttctgtatatatcatttagcaataaatgcccgtgagaagacactgttgataatataggggaagaaaagggagttaatgtatgttagtgacccactaattgtccgacattttatatttgttacttcatttaatcctcacagtaagtactactattcagggatgtttagatattttcccaagattatgcagctgaagttccaaagactgactgctctttattcctatatccagtcacctgtctctgcagctatagaatataatctcctttttcccctaactttctgtgaactaacatttaaatgaacccccagtaactgctaccttgctctcaattgcatactcaatttcaattaaagatgacaaaagaaaggcatttctacttactacagatcactgtaatgaaatttcacaaagagcactggaagagatctaggcccttatattaaatagttacaataagtctgtctgtctctgtcttttttgtttttattctcttttacttttcataattcaccttgataaaatagattctaggactttttcattgtgatagtttggacattctcacactattcagttcacacaaagaccatatttgtctttcataaaagttttatctcatacattaaaaaaaataggaagctggaagaaaattaagatcatttagttcagttattttattgtgtagatgaggaaaaggtctcagcaagctaaaatcttatccttataagtatataatggtaacaagaacatttatgctgcttcctggaaggagctgattgcatcctgtgttagagatgttgattgagacagcgacttttgaaccataaggacatttctcggggagattctggtttcaaacaatcatgctatgttctttgtggaaaatcaaggtagttctgacaatattatgtaccaaaaaaaaaaaatgtcctaccaacggaggttgaatccactcaaagcagtgaggctatcaaaacttgatttgtaatggaaaactgagattacatatttaagcatagagagagaggaaattaaaaccaatatattttgacttctaatctatatcataccctatctcagctaacccaccatctttagcagcatacttgaatccttatcacatagaaaacaagataccaataaatactgtacataaatacaaatactgactcagtcacctcttctgtttctttcatgagaacattgttttaattgttctaaaatactcatagcacaaaatttaccatcttaaagattttaagtgcacatttcagtggtattaagtacattcatattgttgtacaagcatcaacactccttcatacctagaaatcttgtcatctcgcaaaactgtaactctacccattaaacaataattacctattcttccttatctctagctcccagaaaccaccattctactttttgtgtctatgctttttataactctaagtatctaatataagtggaatcctacagtatttgtttttgtttgtaactgatttattttactcagcacaatgtcaccaagtttcttccatactgtagcatatgtccgtatttccttcctttattaagtcttgaatgatcaggaggggcttctgtcattttaccatttgtttcctatgtgccctttagtactttttgttcctcaattcctgcattactgcccttttatgtttagttggcattttgtgatgaaatgtttaaatttatttctcatttgtttttgtgtatattctatagcttattatctttgtggttatcatgggattacatttaacatcctaaagttataacactctaatttatatttatagcagtttaacttcaataacttacaaaaactctgcttctttatatccctgtctccactcctttcagttattgatgtcacaaaatcacagccttatattaggttggtgcaaaagtaattggaggtttttaccattacttttaatgccagaaaacacaattacttttgtaccaacctaatacattgtatgtctgaaacataaactaataatttttttaaaaacacattaatcttttaaattgtgtagaaaacaaaatgtgatttgcaaacaaaaggtacaataatactagcttttagaataatatttttttcaaagttagtcttttaaatcatgtaggaaacaagaagtatagtacaagtcactgttaaaataagactagactttgtaattgcccacatatttacctttcttgtgatttttattcctttatacaccttaaggttactctctattttcctttcatttcaccagagaactcccttgagtatttcttgcagggaaggtctagtggtaaggaactccctaagcttttgttcatctgttcatctgggaaggtcttaatttcaccttcaattttgaagggcagttttgccaaatacaggattcttggatgacaggattttgtttattttcttccttttcttttcttttttcctttctttttttttttttttttttttttgagacggagtctccctctgtcaaccaggctggagtgcagtggcacaatctcagctcactgcaacctccacctcccaggttcaagcaatctgcctgcctcagcctccaaagtagctgagattacaaatgtatgccaccatacctggctaaattttgtatttttagtagagatggggttttaccacgttgatcaggctggtctcgaacccttgacctcaagtgatctgcccatcactgcctctcaaagtgccaggattgcaggcatgagccaccatgcccaggcaagtttttttttttcttttgacactttgaatttacacacacacacacacacatatacacacagaatcagtctaagctgatatgcatatatataggtatatgtatgtatatgtgtgtgtgtatatatacacttaacatatcacacatatatatacatatatatgtgtgtgtgtgtatcagcagatttctcaccagaaacttggatatacatatcagcccacactgccatccaagcttccaatgaaaaatctgttgataatcatactgaggatctctcatatgtgatgagtatcttctcacttgccgctttcaagattttctctttttctttagatagtttgcttataatgtgtgttggtgtagacttctttgaatttatcccacttggggatggttgagcttcttggatgtatatattcatgtatttcatcaaactttaaagttttctttagatattctcgctcccttcctcctccttctggaaaatttatatattgctcttcttcatggtgccctgcaagtctcttatactgtgttcagttttctttgatttttttccctcttttcctcagatcaataagtcccattgtcctatcttcaaatttgcctgttttttcttcttccagctcaaatctgcctttgaatctctttagtgaatttttcattttagttattgtacttttcatctccaaaggcttttcattttctttttaggcttagctctttaaagatatcaaaatatcttttggtatttcatttgttcatccgttgtttcttgactttatccacattttctttgacttttttatgcatctttaagccagttgttttaaattctttgtctagtccatctaccattagatctctgtcagagatacttttcattggtttattttgttttctttgaatgggtctttgaataatatactcttctttgcatgccttgtgatttttgtttttgttgaaaactagaaatttgaatctaataatgtgataactctggaaatcagattcttccccttaaattgctgtaggttatctctgtgccacagattaccctggggtataaacttaaggtcttttcaggtctttcttagcctgtgactttcccttggtatacacagtaactttctaatttcatttgtataagtggttgtgtttgaacatcctagtcttttatatctagctcccaaaaggggaactgagtaaaatgaaatgaaagtaagagggcactggctcttaaaattccctggaagccacttcagctagaaatggagggacttgtaacgatggagagaggtgcaatgacaatggccaccacctctttgcacctttgcggtcagtgacaacagtcagtaatcaaagcacggatcccagaatttggagggcagatcctgtctgtctactctggatcacacaagctgtgtgcaagctgctccaggaatacaggcctgattgtttgccatagaacgggggtctgagggattcataggtgtgactgtgctaagagctgaaactgacctaaattaactacaatttaccatctaaggcttaccctggaagttgcaagggttcagtagacttcagttccaagatagtttgcattagaaagatcctgctagtgcaattgttgtctgggtggagagatgtattcctgttgctttctattctgctgtctttctataatcctcattcaattcatatttaccaagacaaacacatagtgcaaaaacaactgctgttatttttcagtaactaaattttattgagagtaaagcactggctttgaatttaggggaattcccaaattatgtgttatagactcagcaaaatcatatgttcttctgtcctgatttttttttgactatttacttttaataaaactatgcattattttctcataaaatacaattaaagtaaaacttaagttctaattttagagaagtataatatctattttcaatgaaatacaaactgtctggctcaactttattctctcacagattgatttattttccttagaatataataccactgagacatataaacaatgttaattattaatggattttatccataggaaacctctttttgttttccaagacaaaataacgctttaaaggtcactttaaccttaatactgaaaccaactgatgtctttacatcaaaagtaaagacaactcaaggcttttgaatcacttaataacaaagcctatttctaacaatgtgcttatcatgaaaattaaaaccagtaactgtaatttaaaaaataaaatattagaacatggttcataagaatagaaggaaagaagccaattatctttatttttactatgcagaaaattggtattgggttcacctgtatttctggataaatttagcttttttagtaagacaattattatgcactttgacatcagagtaacatcccttgttttgttaaagatataattaatagcataaagacctaattttaatgaagaacctcaccctgttgtcctgcttttttagcagagctttaaaaatgacaaaagtcaattaatttccttagtctttaaattctggttccctattctcaagttatgattaatgactattaaactgtaggatttcaggcattcagcaaaaaataaacaacatggagacaaaaaacatgaataacctaaaaaataatgacttcattcctcagtaatgagacatgtccctgcttttgtgataataaagaaataagcaatgggataaagtgctgccttttctttgagaagtagttggtatttagcttcctttagaacctatttgacctgtcagcatttgttttcttatttatatgaagcttcaactgaatttgcatttagatattatattcctgcactatactgaacagatcattcactttttgttaggatatttatttgaagtctaggtgggcatttgtgcatgcatggctacctaaggaaaatgtatcgccataatgtacatccaaaacctttttatgaataactttgatgcctaaaagcatccatataaattaatacaatattctgtgcatttaatactctggaacattctggcatcagaatatatatacatatatatgtgtatatgtatatgtgtatatgtgtatatatatacacatatatatgtgtgtgtgtgtgtgtgtgtgtgtgtgtgtatagggagagagagagagtgtctcactctttcacccaggattgagtgtactggcacaatcacagctcactgaaacctaaaactgaactcaagcaatcctcccctctcagcctcctgagtagctgggactacaggtgcatgccaccatgccctgctagttaagaaaaaaaaaaaaattatagagacagagtctcaccatattgcctaggctggtctcaaactcctgacttcaagtgatcctcctacttcagcctcccaaagcactgtaattaaaggaattagccactgtgcctgggttgttattgttgatatgtatatacttgattatcatgttctgtgaatcacaaacaatatttagaatagtttagaacaagggtgggcaaacctattctgtaaaggattagacagtaaatattttaggctttgcctgttgcaactactcaaagctgctgttgtagcatggaagcaaccctagacaatatgtcaacaaatgagtgtgtcagggttccaataaaactttatttacacaaacaggtggtagactggaattagtttgcaggttgcagcttgctgacccctcatttagaacacaaggagacagacatattataaagatctgtaatcttgaataatcctacacccatatattatagaatatcaaattcattggacaaaggcaaaagggagaagaaagggatgaagtaagaataaataaattattaataatttttaaattatattctccatccctccctcacagagatatctcataagtatgtgcttatgcacattctttccacaaaatgtttgacatcatttttaaagttcaaattaaataatatcttttgttcagttttttcctagaaaatatttgctaccactaagcacactggtaaaccaaacagtaatttccaaatgtagcctatccacattgcaatttcttttacttaatatttgataactaacatatctgttaagttgattggttaatacaaacagtgaatgggaaacttgatttctcaattactttacatagccaattcagcggattaatacatctatccacttatatttagataatgtaagagttcatcattcttctgatacttatattttaaatgaaatgttcatggtgttctagatgtcaaaacataaaattttaattaactaaatcaatgttttatgtagattttgcttcgatagtactttaacttgggtgatacttagaactctacattgaaacttccgtttcgacttactctttgaatgtctgttttgaacactaaagataatttaacttctgcctagttatccacacattattttccattcccttctattaaacttttctaactgactcaaacagtaaacctatataaagtcttgaaatcttgtattttttttttcacttatcattaagtcctaaagtctatgtactcatgacgaattttgatggtttcatccaatatcttatcaggataatctcagagtggtgactacatataaggaggtaaaaggagtttgttgaaattaaagggaaaacacaaaagccacgttctggacgtgtgtgtgaggttaaaggtagggaagtgacatgtgaataataaaccaagaaatatggcaaatccagatgacctataggcagtcatgaaggtccaatgggataaggactagttgatttaagaagaaagacttaggcttgactgcattgttagttcacagcagagatcatactacattaggtaggcagcatcccctagggagtttatcccacattacatagaaaagagcaggacaatcaccaatcccaacacaaaccagttagcccaaagtctgggaggtggcttttaataagcatctgtctgctgaggatctctagaaactgagggcaggctaaactccttaggggtatattaaggttctcctcagacaggaacagacaaaggtatgtccacattgtgttggttaacagaatgaggctatggatgtgctgccagaccagcttctaagtagtgtcagggctggagaagaaatctgaagcaaaaggctgccttaagtgcaggaattattaatacatagtgattcacagaaaagctaagaacagagcaaggactgacacatggtgattataatggggagctctgtgcacatccaatatacagtgctttttaattttcaaagcactttacaatgaatgacaagttaaaggtgtaaactccattaaaataatcgaaaaagaaaaagacttctccctcagactggcctcacaatttaaatattccattgtatttgcagcaacattcttgactgttttctaagggggctttaacaatttttatataccaaaaagtatattctgaataaaaatatttatatcatatgtatgatttttgcaatactaattttcatttttttaacattaggaaaacagttttttttctgtcactgtacagttgctagtcttctaactataaatatttagtcacagtgaattcatttaaatattggaataaattctactagcagttgccatatttccttcagggctctgtatttacttatttatcagagtccccaaattgtatgcttggtttaaatagcttcggggcaaaaatacaataaaattgtattagttaaaaatataactggcatcagcaacatgaaaacataacagcaaaacagcatgcacatatacatataaattgtcatcattttaacagtctgttgggacaagtccaacggctatctattacaaagatagattgtgtgccaagccctgaagcttaagaaactgggactctggggaaccataccggcttggaactcaagctggaatggtcatcataggttcttcagagggatgtagctctccatccggaggaaaatcaacaacagttaacagaagcggatttcaaatttggcgagaaggtcaagagataataaaacctcatgacttttttctgttttctggcagaagatgacagcattcctaaacatcaacacccacccaaacctaacagatattgagaaatgggtttgagatatttttaatttatagtaaggaagtagaatgagaagtgggaagtaaaactgtgtgtgtgtgtgtgtgtgtgtgtgtgtgtgtgtgtgtgagtctatatgactgtggtataaactttaagtgtccaagcagataaaatagatgcatatacataaaacccttataaatgtgaaggttcttggagattttattctatttattgtttaaatagtcgcaaagtgatctacataaactgcaagtctgattacatcagaatctagctgtagtctttctgtggttcccaaatgcctataaggttatatccaagacattcagcacaacacacaagatctttcaagatctaggccttgcccaccaacctagctttctctttctcccctcttctgctcacacattacacaaaattttattaatactgctggctttgtgcagaaaatcttttgttccatttaattttttcctctgcctgactcttaattctgacccagaacactctgattaattttctgtcatagaaatgcctagtatgaaatccccaagtccaggacagtcttccactctgtgtgttctcctggcattctctcttatcagagcatttaagacattgtttgtaactgcctacatagcctacttatttgaataatcactattctgaaatcttttcaaatgcaaaaaatatgcctcccattttgcatctggactccactgaaacccatttatctgttttttctacttctactcaagtcttgtaaaatccgttttcacacaacagctcgcaaaaactttaagcaatgtaaattaaattatatcaccgtcacttctctgcttcaaaatctctaatagatacctattgtgcttatcttatcttagcacaatttttgataaatctctacaagagtcacccctacctacctctcaggtctccttttactcactcactaccattatatatatttttctttttctgtaaaaattaagctctttcctgcttttaggtctttgcaattgctattccttctgtgtgttctttgtcctaacatcttcatggctagctctttctcgtcattttggtctcactcaagtgtcaccttctgtaatcaccctttttaatatttttcctataaccaagtcattcctgatggcagtcatcaatgatattgacaatgtatttctagttattctcttttctgggcccatggtaaggttgtacttcctgggacatttgtggttgactgggaccaataagatggggccctatgctatatgatgaggtttggtcaatgaattgtgatcagaaatgatgtatcttccttttgcatcagatatgaggccatccagaaccctcatttccctctcgcctgccaactgcaaacattcaagttggtctcttattcatcagcttgggtctttgaatgaccaccacagggatagcccacctactgatccacaatagatatgtaaaatgagccataattaagttgtatatgtgtgtaagatgcagcgattttgtattggtctgttatcacagcataaccagtctgttattatctgttatactatctataatattactctgatccgttttcttcacagcacttatgactttcttaactaatttagttgatttcttgtataattatttattgaaagcctatatgctcccttctctgctcatgttcaagttttatgagaataagtctctgaacacatggttccatggtgtaatggtgaacactctagactctgagaataagtctctgtcttattccttgctctagcccagtgcctaaaaaatgcctgctgactgggcacagtgactcttgcctgtaatcccagaactttgagaggccaaggtgggcagatcaactgaggtcaggagttcgagacctgcctggacaacatggtgaaacctcgcctctacaaaaatacaaaaaataaataaataaaataaaaaataaaaataaaaataaatgaatagccgggcatgatggcgggtgcctgtagtcccagcttctggggaggctgagacaggagaatcacttgaacccgggaggcagaggttgcagtgagccaagattgcactattgcactccagcctggacaacaagtgagattccatctcaaaaaaaaaaaaaaaaagccttcctcgtaatactaatctgcctcacacaactggtaatgtattgaacttttcataaaagaacaaattttatcatgatcttataatagcataaaataaatgataaattttattagaaaacaaacaggctgaacagcaatgatttaaatataaaaattaatgactttataaatgctttttgattattatatgaatgaattctatttttcttcttgagtttttatatgagaaaaaccatacaagaagttaaaaatggtacaatcataaaactgagcagactccaaagtttaattatgtgggtttgaatctcatctctgctacttatcatgtgcgtaactgcaggaaaattaatcatttctgtaacatgagatgctttcaataggcaaattccatttatttgtgtgagacagagtctccctctgtcccccaggctggagtgcagtagcaccatcttggctcattgcaatctctgcctcctgggttcaagtgattctcgtgcctcagcctcccaagtagctgggatcacaggcatgagccaccacacctagctaatttttgtatatttagtagagatggggcttcaccatgttagccaggctggtctcgaactctgacttcaggtgatctgcctgccttggcctcccaaagtgctggaagtacaggtgtgagccactgcgcctgacctatttatttattttttaatcaaaaggagctgatggttgttcctttttccactgggttcaatctgatgtaatgaatataaagcataagcaaaatggagtgccatctaagctaccatatcaatgcaagttacacaggatgggagataaagaaacactcagagaaatgtgaggtcttggcattcctcttgaagaccaccttgagagtcaagaaaacctctaactttctgacacagggaaaaaaacgcacatcaataaaaagcatcatgtataatttctgagcttttataaatcccctaaaatctactcatgaagttcccgaatatatagacccaatcctaggtatttttttaaagtcaaatgagtcctaaaaatcatggacattagctgggtgcaaaggctcatgcctggaatcccagaactttgggagactgaggcgggagaatctcttgaggccaggagttcaagaccagtctaggcaacaaagtaagaccctgtatgtacagattttttttttaattagctgggtgcagtggcacacacctgtggtcccagctacttgagaggctgaggtgggagaactgtatgagtccaggaggttgaggctgcaatgagccatgattgtaccactgtactacagcctgggtgacagagcaagaccctgtctcaaaaacaacagcaaaaatcatggacattaataggtgacattctgaagacaagagggcaatccaggctggggagaatatataaccaagacaaggagttacacattaatgatgtgtatgtgcattattagagaatcgttatcctctttaggtttgaaagttcacaatattatattttcttcttcggactatactcttgttttatgttattataatgcagttgtttatggtgacccttagtagatgttatgccagcatacagaggttcagacatgggtagcttaagaagaaaaaaaaaaaaaaaaagaaaatctccaggtaaatataacatttgtatttaaatttataaggtaaatatttatttagaataagaaaacaaatgagtggattcacttatgaaacacaaataaataaacaatagcaaacaaagcaaatggaaaaaaccttagacaataacagtatactctctctcctcaaagattctgctttgatctttataaaaggaaggtgctaatgtaattgagtttggccccatataaagcaggtagtagctgtcaactttgcaaggatgccagcccaagacgctccctaattttcaaagtactagagaatctaggtttttattggaaattctcagatttttaaaagaccaatagtgtgttcgtcaaacatactgaggaacagtttcaatatatgagctgccagtctttgattcttattttggagaatgtggaaaaatcaatagattacaccttccattctttattaaatatttgaaatctctgacaattacctgaaatacgatttttaaatgttattggttgagctcatactacaggctataaaagtcagatgagccaaggtatgttttgttttgttttcaacgaaagttaagtagaaggaaagaagaaaaaaagccctttcattgctgcatggaagctgggctcttcaccatagagtgatgcacagagctgattgggccttggaggtctatctgagttgtctcttttcttcttcctgaatattgaactaatgtaggagtttcaagttatagcctaggcttaaagacttcacaatatcttgtttatgaaaccagtcccaaaataattctttacaactgtagtagctatgtcatacagtcattcctccatatacactggggattggtttcaggaccctgaagatatcaaaattcaagaatgctcaagtttcttatatgaaatgatgtagtgcttgcatataacctatgcacatcctcccataatatactttaaatcatctctgtattatgtataatacctaatacaatgtaaatatgatatagttatactatattgttgactgatttttctttttattgttgcattcctatttcttgttttctttttccagatattttctaaatacatttgtttgaatcattgaatatatttctatatagagcactctgcagacactaaataaatatggtgggaaattgctatatcacattttatatatatctcccccttgtgcacagactttaccatctttattaattgtgtgtgattgattgtgtgtgtgcaaaccaagtattttatctaaccataaagatggtatgttcaaagtgagaatgaattagatagctagaatactagaaaaataaagtttttgattttggaggggatttaaagaaagccaaaactcaatgctttattattgcatgtgttcttagcagtggtcacttttgaaaattagtcctagtggttttctattacaattcatgtttttgaccaatggaacttctttacccttgcttccacagggttgtttctccttggttatttattagttcagcattactgcacaagcaatatttaggatgtatggtcaagtccatcttgaacatctttataatattgtatcacctgacagattataattgctgaacgtctttaaataaagaaaaaataaagaactaaaccatttatattatagaaaataacagcaacaaaactttgtagttgaattaatcctttatagatatctaatttaattctcacatcaaccctgttgatgcattctcactgaacaaatagaggtctcaaaagagtaagtgactgctttggtgatatcactgttattaggaactttgacattagattaaccttaatttataaccatagatatctaccaaaccagtgtaataaataatgagaaattcacttgaacctgcttcaaattaatcataattatatatatcaattgctgctataggtagcttatacattaattgctagatagagctatgcaagatacacaataaatttgttacattaaaactttggtctaaaaatatctactaaaatatctatttactgtaatatttggaaatacagattaatatatctcattagatcttaaaacaaattttaataagctgcagattagtcatgtaattcaattgttaaactgccaaacatctgtatcccaacatttatattttcttacttttatttatgtttacctgcagaatttatcctatatttttaatcatcagatttggggcaataatgttacctggtcattgttatgaattattaattgataaatttgaatgtctagtatttcaattcttatatttaagtgtctattctgattctagaattgaaatcctttgtccagaagttacatttattacctgtttttttgtatctatttctcaaatttttgaatgctattcttcaaagattttgttagaaagtacttactagtttttggttatttgcttcttaataatttgaaagaaattacccagagaaagataagagaataagtcaaggtcttatcattaagattagaatgtataacctaatttatgtgtcttagagaaaagcctttaaagatttcatcctttaggcatgagtacaaaccacaacagaatatccgcaaattatcttacttcttcttttctaatgtacatagtactttcagaaattttaggggaggcaagaaacatcattttatcggactattaatgttatttaaatgaattagaaaatactagagtatatttatacttattaaccatctaaagtaaaaatgtattctctctagcattataataatgcctgaagaaagaaaaaaatgtgaaataaaaactaccaacaagtaaaatcataatttctctcctgtcttgcccccctctgcttctctcttcctcatttcaaattaagagattcattctcctgctggttgtaacggaaatgaatttcagtgccaccctgatggtaattgcgttcctgatttgtggcgctgtgatggagaaaaagactgtgaagatggtagtgatgaaaaaggttgcaatggtaccatacgattgtgtgaccacaaaaccaagttttcctgttggagtacaggtaagtgaacattgcttttggcttctattgggtctccctgagtgtggagtccttttggctcaggctgaatctgtatctcacctttgtaaaaagtaatcttatatttttggcagatgtgctcatgtataataatagtagttaacatttagggagaactatcaatggggctagcataattctatgaatgttctccgcattggattcatgaggcaaggagaagtttttaacttgcttacgctcacagagccaacatgtcagacttaggatttaatttaattaattaattaatttatttgtttatttatttctgagatttgggatttttaaaccaggcaatctggaatacagaatctggaaattcagaatcgagagagataagcatgccaaaccagctggcagcatttctctttccgtagataaggcctcaccctaaaatttaaatgaagatgacttagaaaagaaagatagaattatatgtatttattttcaactaatttcctaaatgttactgtactattgcttatttctattatgaggaggatgctgactgccatttaaagctttgatttgagggtcattggggctgttattgtgttatataaatataccctattactatgactgttccattttggtttcgtgtgtgtgcgtgtgtgtgcgtgtgtgcgtgtgtgtgtgtgtgtatacaaataggaaaccaaaatggaaaagttatagtaatagaatgtcttatattctactatattttattacatatactgggtaccagttgaaatgataaacttattttcttcccgctttatgccagatgatgtgttgaagtttagagaaaagtagattacgatgagctattgtggtttaatttgtgaaatggttggtatcatcctcccaataatccatggaaataattttctgtagatgtcatgataacatctctgcaatctctctttgatgtgaaattgtttttcaattgcttaatcatgagctcttagtgatttcttttgctccctataattacatattctaacaaaaagtacaaataagaagttgtaaaaggtgtaagaaaacactgtgaaagccacgggggctgatgtacatttaaaggtataaaaaagcactgtctttcttttcttaaacatgcctcttggttacagttaaatattccaataagaaaaaagaaaaataaatgcaagctaacataggtatagataaatacatactcctgaagccttttcctagcaaggaaattgtgtttccaaaacatttttttccaacaatatttttcacaattatgtgactctcttcaattgttacataaagagtcataattttagggttatttgttagaaaaatgtgattttaagtttagaaatggtctttttggaacatgtattaattgaaaattagcagacgaattattgtaaaatgaatgaattattgatggcataaatagatttcatttaataggggaattctaatgccaaagagccaattatttgactcgagttaacatacttcaaagcatatattgtgtatattttctccatataacttctggcattttcctgattgtattaacttaaaatacagcaggtaacagtttttaaaacatatatgaaaaagaaactggcaaagcttggttaaaacaaaatataaaccaatatggaaaatcctgagtttcaattacttgaatatgctgttaaagcaaattgagatgcgaaacataaaaccaggctgcaatttctctatacagaaataaattataaggagattcacagtaatgtaaattctcaaagctatgtattaataaaaactagtttgaactttcagttgagaaaaaaaatttgcagacaaagcatgtaaataataaatagtacgattaagtaaatttaacagaatattctaagtgcttgtaatttattttaaaatgtgtattgatattttgcaatgaacacttataaaacaacttcctgtgaatatggttcaacatcaaaataaatctgaagtatgatgaggaaagctggctatctttagagaactgaattttctggaacacttttatatgtgttgacttgagatttggattatcgatttaataatgcttttaattaaacatccgatgtttctaccaaatagtttttaggtaagcaaaagattaatgtaaaaaaaatctgtgataaaacatatgtttcactttaaaaggaaaaagtgaaaggtaataatttatccatctgcttctaatctgatctgtgttttggatatagtaaaccacaatttattcaacttcagaagagttgcacaattacaaagtcacatttatgacagacttcaatgaacattgcagtcattaaaatgaaccacaaatataagcaatgatttaaaatatgtattcatctacaaaccttttgatattttttcatttactttaaattctcagttttacaagctataagacctttaaactacccacaatgtttaatccaaagttcatgattattttcaaagttttttaaaatgttagctgaacattgaaaagtttcaggctaattaatttatatatggtaattagaatagctttcttatacataaattgtcatctattggtgttcaaaacgtaggcacagtaggtttttaaattcctattatatgagaatgagagctaacttcaagtacaatataacagtcaggacttaagaacttctaatctcaaaggacctatttttgaccaagaagtgcattgtgccgcatctgttctcttacactccagactaacaaatagcagttgtattataagtggggaaaagggaagtgaattttcagtcactctgtcgtggaaaagaaactcagaaatgcctttcttcatagtgatcgcaaggtaccgggaaaataggccctccagctacttgtaggaatgtaaatttaatccttctgtcctacttgtagaaattcgtgtaaagaaaagtaggattgtataaggttatatatgcacaaatatattcaatgagtcattttatttttaatagtaaaaaattagaaacaatatattgcttatcaatagggatggtaataaatggttgtgtattcacgcaagtattctaatgtcattaaaacaataaaaaaggaattcatgtgaaggtgagacttcaagtttacactctgaagtttctgcttctctgttttcacttctcaacacacagaagtgatgataaaatataacaggataaaataaaggagatactgcctgatgaacaaaaaatatgtatctctgagtaacagaaatatagcacagtatcaagtggtgtgctgagctaaagctgagtaccttactgagttgggtatgtaggctagcagaaatgaatgggtgctcagatcttagggtcaatagaaataaagctgtcccacatgaagctgggatctggaggcaggcattactggaaatcagaacctggaaagaaattccatttgcttttgaaaggagagttgaaaaactatacatatcactgctagttgctgccagtggtagttacttgaatgaagtcatgtgcctaaagagatgggaggacacaggcactgcaattgagctgaacttctgtctggcttggagattgaatctgataaaatccaatattgttttaggatagaatctcacacaaaaaatataagttgtatttctgaaccaagattgctggaaataatggagtgggccaaagtccaagcagcaatgcttgtagataggcacaagtaaactcataaagtcagagaggaaaatgaaggttgtgatccaagatgagattacaaaccagaattttaacatatgtgaagaaaactttctcatcaaaatcagtcattacaaaataaattattcatgactaaatgaaaataagctatatgtctgaaaaataagtttacaataagtatgttgagaccctcgaaaagaaaaagaaaaaatattactcccaaaatgactaagaattcagcacagatatgacaagcagaatagttgcaataggaaaaggtggaaaatgagactatcttagttcaggctgctgtaacaaattatcataaactgggttgtttaaacaacaaacatttatttctcacagttctagagactgagaagtccaagatcaagaactgggaaacctggtgtgtgtctgaggcactcttcctggtttgcagatggcaatcttcttatgatatgccaactctactctcgtaactgattacctcccaaacctcccaataccatcacactggggattaggatttcaacatgaatttggtctggacacaaacattcggtctataacacctataagaaaaatgtggttcaaaaccacagtgggattgcattctttcgacatcagttgattgataataaacaagcccagtaatacccatgctggtgagagtacaggaagcagacactttgctttcagggagattggtgaacctctatggaaagcaatatatttcaatgtttacaatgtgtctccaattttacccacaattccacctctaggaatttatcacacagatatattcatgcatttgaggagtgagatgtacaaagatatttatttaaagctttattaaatgtgtttaataaacttaaaccaatacatatatactcttccatgtacaccaaagttatagaaaactctttcaaatttgaccatatgttaggttccaaagaagtcttaaaagtatttcaaataattggcaatttacaaaaagcattctctacacacacacacacacacacacacacacacacaaaatagaaatctacagcagaatgatttttaaaaatgtatttggaaactaggatcatacttcaaaataatctggattaactaagaaatcatacatatatttaaatatttagaactgaataaaatgggtaatatatatcaaaatgtttatgacttctaaaaaaatagactttatattttagacaaattttaggttcacagcaaaattaagcagaaagtacagagacttcctgtatactcccaccgccctcacatgcacagctttctttactgtcaatatactgcaccaaagtggtacatttgttataatcaatgcacctatagtgacacatctttctcatccaaagtctatggtttacatgacggtttactttatttagatgttgtatattctatgggtcttgacaaatatatgatgacatgtatccatcattatagtatcaaggagaataatttcactgctctaaaaatctttcgtaccctgcctgtttattcttccctcccccttagctcctggaagctactgatctttttactgtctctatggttttgccttttccagagtgtcatgtcactgaaatcacatcatatgtagacttgccatattgacttctttcaccttgtaatatgcatttgagtttccttcatgccttttcacgggttggtagttgaaatctttaagctttgaataatattccattgtgccacaattttttaatctgtttacccactgaaggacatctttgttgtttccaagttctggcaattatgaataaagctgttgtaaatatctacatgcaggcttttgggtggacataagttgtcaattcatttgggtaaagaccagggagtccatttacaggatagtagggtcagagtatgttcagtatttgtaagcaatggctgcactgtctttcaaagtggctgtaccattttgtattcattcacttgagatgaatgaaaatttctgctgctctatatccttgaacacctttagtgttgttactgttccagattttcatcattctgataggtatacagttgtatctcattattgttttaatttgcattttcctaatgacatattattttgagtatattttcaaatgttcatttgccattaaattgcttttaatagttaaaggtcccaaacaacctaaataggccagaataggacacttaggtgcaaacatgatatttctgtatagtagaatgccttgcagatttggaagtcattataatgcactgacatgtacacttctctgtgattacatgttgagtgaaaagtgcaggagtgcaagagtgggcatagcatgtaatattgtttaagtggtgaaaagaaaataaaagtatattctttctataataaaaacatttctgttttcattcacaagaaactattgtcattgtttgtctctaagtatggggaaaagtggctaggaagaatgactgagaaggtatcacaacttttactgtgtccttttttaattgactacctttctttgactacctttctaagagttgtgatagtttggtgctgactcatctaccttcccctctagattccattggaataagcaacatacattttgaaatcaagttccagagtagtgttattagttaatgacaagtgatcttttagcagaagaatgtaacagaactgactggcatagagaactgactggcacacatgtggatttaactttaacagtggcatcatactctgttctgatctgctatgtaatgaaaattctctatgggcttctgtgaatggcaaaacattattcttgtctatttttggattgttttgttttctttcccctattgttgtatcagtgaatacagaataaaatgatgaatttaatcattgtggaaaaccaatctggattattagaaccaaaaatatcctataatggtacagtgattttgttagaattatatgatgggttatatatgaaatatttctgaacacatccctttttttctttctggaaccagccctatggaatacttctgattatttctgatgaaaataatatggcaagctgttcattgtttatgtgccagaaagctaataaaatattttgcatttttctttttatgagcctcctatatttttccttgattcctcccagtgactttttttgtttgttttttttcttgagacagagtctcgctctgtcacccgggctggagtgcagtggcgagatctcggctcactgcaaactctgtctcctgggttcacaccattctcttgcctcagcctcccaagtagctgggagtacaggcgcctgccccctcacccggctaattttttgtattttcagtagagacggggtttcaccatgttccccaggatggtctcgatctcctgacctcgtgagctgacagttttaaaccttttgttgtatgcctactctagttgtttcccttcagtcctgtctataaagaagaataaacaattctcctttttgtccaggagggcccttttttagatttattttatttatttatttatttatttatttatttatttttgagacaaagtcttgctctgttgcccaggtaggagtgcagtggtgcgacctcagctcactgcaacctccaacccccaggttcaagcaatatctgcctcagcctcctgagtagctgggattataggcatgcatcaccacacctgactaaatttttttttttctttttagtagagatgcgttttcaccatgttggccaggctgttctcgaactccttacttcaagtgattcacccacctcggcttcccaaagtgctgggattagaggtgtgagccagcgcccccaaacccttctttagatattgatcctgtggcctcctaatccttgtgggagcttagtcacttttcttgtttggtcttctatttctttctccacactaatttttctttctctatataactatatttagtccaataacctgaaaaacacttctttgattttattaccttttccctgtcttccttcttcatttcattaaatcaccttatataagtacctcgatgtcttatgtctcactaattcctccaccccttgcaatctaacatccaatggcttcccttgatggaaatggctgtttcgatggtcaccaggaaagatttcttagtttatgctcttctgtgttttgagtcctactctgccattcagtaactgcatgagtgcagataagttactaaacctctctacattatcgctttctgatctgtagaatagatatgatagtaataactggtagaatgtacaaagagtgcctagaacacagtagaagcttaatgaatgacacttttcactactagtactgcacctcggcttctttctctgcaacacttaaccctgctgcatttcctctccttttaatattttcttatgaattctcacattggattgttctctttagccacatggcatttagagtcctctttttatttcactttcccttgcccattttcctctacctgtccctcatatttaattttaaaatataattgttgagcacgtaatatgtgtccagcattgtagatattcttctcttaatttttttgctccttctcatctttctgcaaagtcttcatagcaatctattctgtccccagttttaaccatcacctctaggactccaaaatttccgccactgacatttacttcccacttccaacccattttttcccgatgcattgctgaacattctactttctcttcaaagtcagaaaggagtaagaatatatcatttctgttagaatatgtaatcccctgtatgctcagatttaaagcagaaagcaccctttgacacttctaacttgaaatcattttccaagtcctagtcctactgaggttacttatgcaatatctccaacataacccattccattctctactcacatctcataacctaaggttaagctttcattatctctcactcagatccttgtgtggccaactgtgttttcctctgacagtcattagcttcaatccactctatccacagttttggcttcctcttacctcaagatgtgacctgaacacatactttaaaaaaatctttcagtcgttcaaatttgctgaatcttatagacaatctccattgctaattcaaaaagtgtctcaattttcttaaccataatcagattaagaaacgcttcttgaattaggggccccaaactgcttcattattgctttttgaacaggtcccattctttcctgcttttatacctttagataacagtttcatcttttgtgtgaattcgattaaacaaataaggttgaatattcagcatgtaaaactgcgttatgttcaaaattacctcccaaaaatcacacattaaacttaatatacatggttctatgtatatagctcaggataatttgtacctataactctattataaacaaggtaatgcttagcataaaataaaaagcaaatataaaaattagaattttataatgaattcacttagagatggaacaaagatcagcataagaaagaactgattctcttctactatctatgccctaacacattcctattgagtagcaagagtagtcactatgctattaaatttttatttctttcacctgttccatttacttgctttttgattttacatggggtatatattcgaatgttaagactatacgcataaggcagctgtctatattaaatgcttttttccttacgtaaaattttctaccatccttcaaaacgctgttcaaaagaatagtttggtaaagcttgtttctcatccttccaatcatacatattttccacctccttgaaaatccatagcactctctgatggttatatggctttcatcttattctactttatatgttcaatattagaacatttgtcattactagagttattgctccacaaggtcaggaatttgtcttccccatctttctacactcttcagtagaaaaccaagcatataatactcaaaaaacatttgtcaaattgaattgaaaccaaacactgttagagaaataaatatgtaggtaacactaaaggttagtagtataaacattttataaaatattatagaccagtgttcaaaaaggcattataataatatagtttcaagtaaatccatttagactttctcaaagatttacttcatattaatattattattcttaatataaactgccagtcatatcccagaacagaaattatcccattacaacatttgttatctttttattaaactaaaaacaagtccgtttacaaaaaggtagatctatttcagaacatggtcaagagtttaacacagaaaagagaaactctagaagagattgtatcaatttattttgggaagctagcatgttttctacagtcatacaaacttaagtttttctatacctgttgactttgtagttgtgtttaaccaaatttctgggttttggggattttttttaaaaaatttgctgttattgttgttacttatctattcttattttcttttctcaaaggacaaaaccacagttaccaaaatagagtctttgacatgtagttatcaagttgaaaacatcattataaataaatgagaaaatattttgtagagctcaacttcatactaattatctaatatggttttcggcatcttctaaaaaagaattagtaaacacaaaatgatttacttggttacttgaattactcatgcacatttaaaaaactttattttaaagatttttggatattctatctattggatagttataatgtctataatatgttttactattattaataactacttatttcttatatataaagaagggagtttaagcaaagaaatctgtgatatttgttcattcaagattttatgtccaatgacttgattaggtacttgattaggtgaggatttatcttgatatgaatcaagtaaaaatcaatatgtttaaagtatttttactgaggccatttgcttttgggttttacctaattcatgtgcatgagttagacattcattaaacttatcatacttggttcgccttcttatctacattttggtaagaactaaaaccaaacacaaatagagagaagcaattaagcttcaaacagcccctaaaaaatcaataggaagaggggggctatttaagcttatacaattcatttaatctatgtattcatatttattcatatctctggtgacattatttgttttaaagttttacagtcatctgaatattatttttgtttaccttttccaagcagtatttatgtcagggatggcaaatagccttactgctattctgactctaaaagattgatattgatttatagatatatctgttgaaacaattctaaggtcattttggagtcagtggttgggaatgccatcatggattggtgatgtgtctgggaaaaaacaaacaaaaaaaggaagttgcattttgataaaccaaactaaaaatgggaatttgtatattcttgaactcttgcaaatgacttcatacaatttaatgcttaagtatagaatgtcatattttagactacaatgatatattatgcattgatcttttctttctaactagattataagccccttggtgacaaggatcaggctttatgcttgcttatatttctgaaagcccttaggaaagggtaaggcacagagtaaattcaacatataattttttacaagaaggctgttgaatctgttaggcttcactgcatatgtgtgtacataatcatttttttaaaataagctaatatattttggaaaagttaccgaagtatacggtagaagaaaaataaagcagcacaagagtattcaatgaaaagtatctcttcctcctacaatgggtttccagtaactaattctttccagaggcaaccaatttgaactatttcttgtgtatccctccagaaagaattcaaatagagacaagtctatccatgtactgatattgataaatgtatggaaatataatcatagatatttataaatagctaactccctttcaacacatcaaaagcctacatacactgagttctatgccttttttaaattaattaagcttgaaaattagttttcattcacttatgtagattgacacattcttcttcactcaagcatatacctttaatgtatggatgcattgtaattgatgtcaccaggcttgcagtaattatttaaattgttactttcctttccctaatatatacaaaacagcagtagatatcctagtatctttgtgcacttgtgcaaagatatttatgaaaacattttctaaaattagaattactgtggtgaagagttgacacatgtttcatttgctggatttcttgacattgccctagagagaggttatcacaattttcaacatttgtgctgtttcttacattattgtcaaatctagttttgtactatccaactttttgatctttatctaatagagtaggaaggatgtcaactagttattttagtttaccttttttaattgaaagggatattgaatatcttatgtttctgaaccattacaatttctttatgaatcttgcacttggattgattgttatcttattgatttaaaagaacccttgtattttttaaaaatatgctttttgtcatataatgaaatatttttgaaaatatgattaaatgtttttttctggcttattgactgtccagtgactttgtctatggagtttattgttgcaatatggaataaaatatgtttataaaattcagcttcatgtttgtatttttatcatccttattttaaaatgattacctctttgatatgtctggaatatattatagcataagaagccaagtagagattcagctttattgtttatcctccagattggcaaatgaggtgatactgcatcattaattttgttctctgctatttagattgccaactgtttcatatataaaatccatatacataaatagacctattcctaatgtctctgtgctctttaattattaatatctttattgatatttataaaaagtattttaactactattacattaaattacttctaaatagttggaatatatacagtttctactcattaagattcctctgttttgttttttgttttggtaagattctgaatgatttttctggttttattttttaacttaaaataagcttttagggttgcattgatgttactattttgaaaggattgtttaagagaaaattattatctgtactaatccaagaccaaataatatctatattcaaggctttttttcagattttttgtagaattttggatttgtataagtgttgtatagttcttgtacattttaacccaaaatacattttttatgataaaattttaattggccttttcttctagtatatgctctctatagatatgaaatctgtttttctgttaattttgaaactagctacctattttttgaattcttagtttatgtaattttaattgattttataattatatgattatattaacaacgtgtaatgacactcttttctaatgttattcctcatttctaatattatacctcatttctttctattacctaattgtcctaggtagtatttacagaacaacattattggttttatttatgatgttaatgcaaaagtttataatgtttctctatttatatcaaatctaatgaagtatgtcaattcttattttaagagtatttttatcaatgttgaatatcaaatgtattttagttaactatggaactgattatattttatttgacataatagtgtgaagaattattgatatatttttataaataaaacatttttgcacctatattttaattattttaaaatttacttataagacttaagaagacatttaaatacctaatgacttttggatatatacaatgtaatattttccatttcccttgtatttgccccacttatttttataagatgctggtatgtagtcagtcaataactagtattatctttaggtacatttaaaaaatgtatattacacctgaacattgcataatctggaaaagataattaataagaagtcagtgaaagactgtttcgaaaggaggaataatttgcagtgaaacatttacatagacgacaatgccagtcatggtggctcatgcctgtaatcccagtactttgggaggttgaggcagtggatcacctgaggtcaagagtttgagaccagcctgaccaacatggtgaaaccccatctctactaaaaatacaaaattagctgggcatagtggcacatgcctgtaatcccagttacttgggaggctgaggcaggagaattgcttgaacctgggaggcggaggttgtagtgaatggagattgcaccattgcactccagcctgggcaacaagagtgcaactccatcacaaaacaaaacaaaacaaaaataacaatgaacattgatctctttgtgtttctcactgttactgttgaatcatgctggctaaacaataattatttttttcttctagaaacaataaaaaaattctataaattccgtctatacatgttagtcgccaaaatgtttgatatcatttgatattctcttatgaaagggcatgtacatatgtctggagtggggagttggggtgttgatgttataaatgtaaatagaaggacaacctctcttgctaaaatgaggcatttacctgaatttgagtttctgacaggcaccgatagcattcacctaaatttagggatctaaaaggcactaatatacaaatgtatctttaaagtttgcttttaacagttttgcaattaaactttcaattagtcacagaaaccttctttttatatatatatatatatatatatatattatataaatataaatatatgtatatatatatagagagagagagagcagagcaatgacttgaatctaaagaaaatatcaaagctcaaacaataagagcactttaagaccagggcaagaaatattcaaatgctgtcatgaaaataaactgtcaaataataagcaaatagattttgttttcttttgctaaagacaagtaattctgcctgtgactgaagacaataatggccactcattatcataatgacctaatcacaaaaatcaaactgacactatttctgttttcttaagggagatgcatcaacaaagcatgggtgtgtgatggagatattgattgcgaagatcagtcagatgaagatgactgtgacagtttcttgtgtggaccacccaagcatccttgtgctaatgacacctcagtctgcctgcagccagagaaactctgcaatgggaaaaaggattgtcctgatggctctgatgaaggctatctctgtggtattgcatgtttaattgtactgacttctccatgaaaactacaaccttttagttcagttgctgttacttaatatagtagcattcattcctttcattcattccctttaaatgtagcttttagcattgaaccttgtctacatttctcagacactctaaggctacagtaaaagtcttcaatgtgatcagaaatttctgaaaataagataggaaaagctagcctatatcgaagttacttaattatagagctgtgttcatcatttagatctctggatggccagtgatgttcccgcagttgaactgattatttgttgatccctcagaacaaggaaaacttgttgttcctcatctacggatggaactcaccaccaccctatatattttgataagccttctaatcattacaatagaaactgatttttaggaagggaaagagactggataataaagccaattgaatatgacccaatttaacataattttccttcaaatttttagtcctcatacaacagctttctttagtatgccttatctagttaaaatgatgatttcaatgagctttgaaatcacgttgactagcaatctttcttaccaaccagcacatacaaaagaaaattacatttccttctcttccgggagatcagagatttagtaaagagattttttaaaagtgttttctagataatactgaaggtgacatcaatagataatgaagaacagtttacagaatgataagaacaataatgagatgacttgaggctgtgagaaaatgactttaggaaataatgaagctgactgattgaaagtaggaaagacaactacattgaagcccaaagttatattttgacctcaaatgagcattaatagcatactgaatgatataaaaaaggaagttttttttttttttaccatatgtggtaaaatgtctttttttaagtcatgattttataaaataaccttgaaacagtgaatgcaacagtcttcattcgatgaggctaaaattacacacaaaaaaattaagaacaaataaaagaacttaagttgagcaacaaaaaggttataaataaaagatgataaacttcattcttctgtattcatttctttcttgcccagcttattctttgtagtggagtaggttggtgagaggtttgctcatgaaggttgtaaatacaattctaaaagaaattattaatactcttaaagaatgtaattatggaaaaactagacttcaacaagcttaaattcttttcttcaattaagtctttaggtgatttaatttcttaaaatcttggttttcttataattaaaatagaggcaatggtatctatcaggtaatcatggtaataatgcctgatgccctgcagttattgaaaaatattagtacttttctccctcttccccatctttcaagttaaatgaaataaataaaaggcaaaagacagaaagtacacccattgagaaaaatgaagaaaatgataagaaaaaacaacctcattttcctattcttcacttcccaaattggaaaagtaaaagagtaatgagagaatttcttcttaattcatttctttgtctacttcagaattgaaaagcacttcttatctagccatatggtcattacttaaagagctttgcccaaacatttcaaaaaattatagagactgaaatagattataaggaggaatctggtgtggaagtaccagagaaaataaaaagacaattttgtcatgattgcagcattgtggcatattgaactacacaccgcactctttcagaggtgaagtcatgaagacttagaacaatgaaaacagaaagcaaatactggccaaaggattagattgccttttctatggttatagcaatgtatataaggaaaaggagaacccaagaatgtgaatctactgattctagtgaagagatttttttttagggaaatttttaaataatttcaaaagaaacggatttgcacttaagaaacaaacgaaaatagattttaattactctaaaatggagttatagtgatccttgttacaataatatgtcaaagccagatgctaactagtaaaacagtaagtaaagattttactcattagtaactcttgtgatagtccactgtgaactgagctcaacttcatgaaactaaaaactggaaactttgaaggtcggggtgtgctaaggaaaaggcactaagggggttaaaggggctgctccacaagattacgccacctgggttagataactggtgcttaacaggaggggaaaacaggcttctcttatctttgtgacaagaggcagtggcagcaagtaagagtaagacccccactgggctgggagggagaatgagaggcagagttcccttcccaggtgtttgcacttcaaagagaacgctctcagctccttagaaggtagttctgggtagtagaagatttacacctcaaaaaggcacagaaaggatttataattgcaagctttctaaagcaactactctaagaggaggttcagggcctatctgcctatcatcatgagcgttctcaggcagacaatttaatgtgggagctggggtcattcaagggacgtagacttaagctgttggacaatgtgctagggattgttcaagtctgttagtatgtatttgtggcccaggggcttggggaggggggcggtggaggtgagggcagcaggatgaaatcatttgtgctgagagtctgcagtttttattggccaaggctgaagtctagtcagaagaggacttagaggatcctgactagtgtttggtcaaggacagagtctttgtcaggtaataaaaagttttaaaagaagttgcaggattaatgacaggtttagggctaagaatcaacaggttctaatcatgcaaatattggcattatatattcaatttcagatttcaatgtgaatttcatttaacctaaaatctgtgacttcattccacagataggattagaaagagacacttcagtactgagaaaaccgtgacacttgaaataagctaaaagcattgtaacaatttttttttctttacctcctgggcacaatgacatttctttacagtaattctctggaaaaagaatgtcagttgaactaaaatggggcaaatactttgaaatgactgctgttttaagatgcttatgattatgggtgaacaaacatatttggaggaaccaagagctgaatctattttttttcttcaaaataataccaaacttgaattgaattgttagagaaaacagttcatacaatcattttccttttcttattactgtagcttctttgatggtgacaaattatatgaagaagagttgacccatataaagcttttaaaaatgtagaaatgtttttaaaagccttacatttcaggccaattttcatactggatacattttcatagacaaccagaaatatttgcattatataaatattgcttcaatttactgattattagacaatagtctttttagcacatctcaaaacatacacaattaaatagggtttgaaatccacttgaaaatatttttaaagccaagaaagacaaagcttctttcagccttatttctatgtacctaatggtacacagtggtagataatgatgtggtttcaaagacaattatctgccattttcttcaaggttgtaagcatgtcatattgaaattttctcaagtagacaattctgagtaaattttaggacaatgtgtgcttttatacaatttttctactttaaaaaattcatcaaatatttttaacttgttactcaatgttaggtatacactggtaaacagaagagatattttctgtaccctcatggagcttacaatttggtaatgaagtagaataataaataaatatatttaaaggacagctgtatatttaaatgctatttaaaaagctaatcttttttacaagctaatcacattatatatgtaatcatatgtgtaatcacattatatatgtaatcatatgtaatcatgtaattatatatgtaatcgattatctatgtaatcaatactattgctcattatttcagacaaaataccaggacaacttttttttttttttttagtgttttgcttatgatgtttccatggcgtcattgaatgaatcataataaccaatatatgaggcacaatgtataattcacctaacttaaaaataaatgcctacagctggtaaaggataaagtaatccattctgcattttaactccaaaatggactgtacaagtgttgcaaaagatatatagacacatatattcacatatgtgtatatggatatacttgttaatttattaacatcaagatatgtctaatattaagatcatcatggtatgtacatcttttttggaagacctctacaaattattttgcaccactgctaaaaggctcagcataatctttccagtcataatagaaacattgagctcactttacatctgtggggcaaagcaaactatactcccaagttttatagaaatgaaaatcttccatttacaatttctataatatagaattaaatttgacctttggttaaatcctatcatcatttctataccaacccctgaagcaaaaataagccaaagagggctttcttatattcatttgtagtatcctggctaattgtaggcttagagaattgagttcaatgattagtatttaactgaggaaagcaattgataagacctataatctgttcccccctttttatagatgagtgttcgctgaacaatggaggctgtagcaaccactgttctgttgttcctggaagaggaattgtctgttcctgccctgaaggacttcaactcaacaaagacaataaaacatgtgaaattgtggattattgtagcaatcatctaaagtgcagccaagtatgtgagcagcacaagcacacagtcaagtgctcatgttatgaaggttggaagctggatgtagacggtgaaagttgtacaagtgttggtaagtaactattttgtgtgtgttgctatatttaagaatagatcttgaaagaaacaaatcccaaaactgcttcagaaaattaatgaaaggattcaactcattttagataaagcatttaactataatgtgttattttagacctactataaaatttctagagagaaaatataataatccttacttttgctatccattgaattgttaccatcagattattctttttcccgaaacattgattttattatcatatcccggatgggctcgtttttgcataggcaaaagcagttgctttgtttctctgtgtatgcttttttagggggtcctgccccacattcccaattgttatttctaatgctcttgaaaacaatttcttgctctggctgtgttcatcttctaaccacttatctaaaacattctgcggattctctaggtggtttttcacagtgggaaaggcaaacaagggctttagattatgatatttcaactctaattgtgtaacttacattcattctttatgtgaccctaggcaggttacataacactgtggagcttcagttttctcatttttcaagtaatgttgcccattttaaccatttcttgcttatagcatgttgtaagagtagcgtgaaagacttgttactgtgccgcacatccattgggtgtttaaagaagtatcgcttcccatccacttttctagattcttagtctgagtccacaggaaacttagaagtctatggatagaattgaagagattcaggaactttgtttgggaaaatattatagcattattttaacttctaactgaaagttagcatatctttccattgtgaatgtatggcacagaccaccaaagtcattagcagcaactatgaatttgctgatagaagtaatagatatattcatatcacattatagttgccgcacatatctcaaaatatcacatgttcaggcttggaaacccgctactaattcaataatgggatccattagacccactgctggatcttattattgaatacactaataaaatcctctctgtgggggaatatctcttcaactttttccaagacaaaaaggaattagaataggaattaaaatatgctatcaaataaagtttgaatttcatgacatcaaaataaatatataataaatacatttatgatcatattcaaaaattatttaatttcaataagtgcacttcaatatgttttctcatctatactttttgaaacactttattcttattgtttttgcactttaaaaaaattttctaatctagcacaacagggtgactgtagtcaaaaataatgtaattgtacattttaaaataactaagagtataattggattgtttgtaacacaaggataaatgcttgaggtgatggatatcccatttaccctgatgtgattattctgcatcacatgcctgtatcaaaatatttcatgtaacctgtcataggtagcaactaactggggccattggcacagggggtaaaagaatttaccaagacagttgtaggtaatgaaaggcagatttgttagaggaagtatgaaaatacattgcaaggttgcaacaggcagcacagcagagacagggctgtctgcaaagaggcaggggctggaaggacagtttatatggtggtgctggagggagctacttgcagattgaggtcattgtgtccacaggacaaggaggtcgttgtttatgatgagattagccacctgtccaatcgattgttcattgttcttccccacttggagccctcccccacctggagccccttccacattgttgcttacttatctatcaggcctccacataacctataaatatactactactataacccctactatgtactcacaaaaataaaaattaaaaattattttaaaaaaagcacgactttctgaggagtccacatgcttcatcagactgataagaacccatatattatgaacctctattcattttgtttctttcacttagactatactttcctcacttcatctccagaaatcctggatattctttgagacgtgctggctcaagtcttttttcatcaattaaatcttcttccaaatatccttgctttccatttattttttctttttatgtctaggacatattgttcttgaatatatgtgatcacatttttaaatggctgttttatattcttagatatcttcttatttctttacaataaaataatacaaactttgaagttagaattcaggttacagacttttctcttgtgttttacataatatccagcccacttctgggaaaataatatgcagttaatagatactatattctttcagatattattgtattattttaatcttttactttaaattttcttttgttttgtgattatttttgtagtagttttcttctgaccattaaaatttgagtcccagagcataagtttagcagacatttattctatatttcttcttcaatattctcacacaaagtaattggcttgagaggctgaaaaacagcaatttgttgtaatggtaatagtcatttcattcacctatgtgttttgaatgaaaaagcaatagatcaaatattgacctcagacacatttgtgatcatatttcacatgagaattggctccagatgtttgttttggatacagataacaaaatgattcagtgtcttagagtggttatataccatatgaaataaataacaacttatgtttaatgttagaataattcaacatttaaatacaggtgaccagggacagagataactctcctaatggaattgactcctctgctctcagctcagaatggaactgtaggggcagaaaggaggtgttccctttcctccccataataagggtcatagatgactgtcctataacaaagaccagttaacaagagaaaatcatagcaaatttatttgatcatagttttttgtttttttttcttgttttaaaatattatagcaatagtttattgataggtaatttgattagtagagttataaatacaaaaaggaggaaagattaccagaaagaagacattatttctaacaaatcttcaagaaaatattgattattaaaatgacttttatcttataagtgttgcatacacagttttagctcttcagagccctctatcgataagttgcctgaaatagtaaagaatttgctactgcagccttggggaacattttttagtgttgtattggtgcttctctgacaaagcatacttttattcaagacaaacagtcccatatttatgtaagtcctaaattccaagtataaacactgcaattgaactgacggactggaacaaaataataaatccttagattaaccataccagcctctcacaaattacttgaatttcatacaaatatgaagtgttaacatagaaatgaaatggcaactgactttttgaaagctcacacattgaaactgaatgaaatctcaagctgtggtatggagttattctgttaccaggcagcactccctcaccataaaaatagcagctagctactggtttcttaatgccaaactaatgatgattttgaagaccaaccttgctcattgtcatacccatgactcaaatggagaacttttcctgtctcctggtttcctttcttttagcttagttgagaagagccctgaaaaggaaaagaaaaaggatcattgagtaaaacataatgtcctggagtatcatcttctcattgcagatacccttgacaacaacaggagcctttgaatcagcagcactccaacaggtcccaagtcagtatgctgcaaggttcccatagacctggagaacttcatgcaacttcttggtggccatgaacctctccatgtacttattgaagtttattttaaaaagattaccttccatatcaagtggacagatctggcaatcactgcagatgctctgtgaaagcatgctgagctcaagacagttctcttccaggtgaagaattttaaggcaaggacagccagatatctttattgagacctgagatatcttcttccagttgaggatgagtttgatgacctgcagctctcctactatgtcaggtatacttcagatctggttcttggaaagatccaccacatccggtggcctaggctacaaagttgggtgatagcgctcccagttggttcccagagaggctcagggtcttgagggtagagagttgcccaaaggtagatggcagctctctcaggtgactgccatttaggcgtagcatctctagaatttttttaggattgcataatctcattaggcagaccagtttatgttgttcagggggaggttcttcaacagagtgaacttttgtatcagcaaaagtggtaggttgtccatcttgttgttggacaaatcgatggtcctgggattgctcattagtgtctacaattctaaggagaacttggtcagcccacggtccttaaactgggagacaccagtttagtgtgcccattccacttgagtaccgagggcaccatttcctattttagtgcttcagtctacatccctgctatggctcagctgccagatggttcagcaggggaagccccaggacccacactaactaggttgtgttccccagacttagtcctggataggaacctggtgatagttttatgtgacacagaaaccttcagaatgaagacccaaagacccaggaaaagctgtccatttttaatacttaggctcaatgaagtatggacagacatgtagaaatatgattggacaaaaagtgtatgatctaatgcttatagatggttgtggggaaccagcacagcctgtctgctctgattcttctgaacttctctgggcagcattgcttcccccaggttatggggcagaccctttctggaatgagcatcttcaatttctttatggccagctcctaaaccgaaaagttggtgtcttcatcagggttctctaaaaggacagaactaataggatagatgaatacatgaagtggggtttattaggagaacagactcacacaatcatagggtgaagtcccacaataggctgtctgcaagctgaggagcccggaaaccagtctgagtcccaaaacctcaaaagtagggaagccgatagcgcagccttcagtctgtgactgaaggtgcgagagcccctggcaaatcactggtgtaggtacaagagttcaaaagctgaagaactagaagtctgatgtttgagggcaggaagcatccagcatgagagaaagatagaggccagaagacttagcaaatctagtctttccacattcctctgcctgcttttatcctagctgtgctggcaactgattagatggtacccatccagattaaaggttggtctgcctctcccagtccactgactcaaatgttaatctcctttggcaacagcctcacagacacaccccggaacaatactttgcatccttcagtccaattaagttgatcctcaatattaactattacagtctgggaaggttagaataatatttttaggctttatggctggctttggggaaaggggctgctagtgtctatgactcgctctgggaaagacaggttatggttactgtggcttgcctaaggagagaatgaggcatgaaaaacaggaaggtaggagagggtcagggagagactttgcttctgaggtagcttcttagggcttcactttgtggtgctgttttctgagccccaacaaaactctagcagtaccatatgatttctcactgttaagattgctatattttccatctggttttgttcataattttatagaaaagtaaaagtatatttcatcttttaaagttacaatgaaacatttttaagtggataatttaatcttctggtaattaatctcttcctgaaatgtatagtgcactttgtgcatctgaagaaaaaaggctttattctgtattttgttcaccccttttagaaaagcagcaaattcacagtccaataaaaatgaattgactagttactactggactttaaaaatagaaatttcttctttcttgctcattttctgttttccatcatcttctgttgattctcccttttaaaatgttttctttctattgaatgcaatacctgtccttatccctcttgacattaaaaagaaaaaaaaatgatgatagcaggcttttggctgggcatggtggctcacacctgtaatctcaacactttggagggctgagacaggaggatctattgagcccaggcattcaagacagcctggtcaacataaggataccccctacctacaaataatttaaaaattagccagtcatggtggtgcatgtctgtggtcccagctactcaggtgactgaggcaggagcattggctgagcccaggagattgagactgcagtgagccatgactatgccactgcacttcagcctgagcatttgaaaaactatttttgttttttcaaattatagccatgattgttccattccttttttctcttgagttttcctccgtagttctctcatcttttttttatttctctacactcttcccttctctgattctttacaatctggcttttgctgaattgcagaactgattctgttttctctaagttcactcctaatatcttattatataaaatgatatttcataaatgctacttttataatttttattttctatttaatatatctcaaatctcagttttctcatatctcaatattcagttacattttccctctttaattcatttattaattcatttattaataattataattcaattattaatcacccttctctgaagtattgatttcttttaggaccacctaaaatatgatactgattgtgatatggacaggaggcagggaaatactgggtagaacagataggttccccgtgaggtccccaccctcaagcttggacccgtggcccaaagtgagaactttacatccctgttttcttgctcaaatgttgccttttccaaaaccaccttggcccaccctgccccccacctccatcctgtactcatgaaaaccccaggctccacgggcagcagagcagcagagaagaagagaaaaaaacagcttggcgttgttgagaagcagcttgacttcagagggatggcttgacggtgggaccttggagaagagtttggcctgggacagcagaactccaggggaagaccaccttcctgctccatccccttttcagctctccatcccactgagagccattttcatcagcaataaaatcccctgcatttaccatcttcagttcgttgtgtgacctgattcttcctgacacccagtaagagctcaggttacagggggttgtcacactgagctgttaaacacttaagccacccagggacagcaaagtaaaagagcgcacggtaacatgccttctgaggctctaggggccacacggagttctgctcctgccggtgaggtgacctgaagcattccttctggcccctgcgagcactcacctgccttctccccttcccacgaggggttgagagccgcaggctgagtaaacgagccacccccttcccaagtcctgtgaaggggtcagggaaaatttcctgtttcaattgcattttcttctggctccattgctgtttgttcggcagcccactggcaaatttgcagcatatttatagtaacattgcaaataacattatataatttttttatctcagcctgaatcagattgtattttcacatttttttgttcttattctctatttttttcattattaggcctttgaaattattttttaattaaaatcatttctaggaaagagattgtgaatataagcacaaaaatgcataaatataatggctgtgttttggtatactgtgtccactacccaaagtttaattttcacattcctctatgtgtatttccttggacaactcctttccactctgaaccttcccttttcaccccagatctgattactgtggcatttacatctccaactgtatcaattttttttttttttttgaggcagagtctcattctggcacccaggctggagtgcagtggcacgattttgtctcactacaacctctgcctcccaggttcaagtgattctcgtccttcagcctcctgagtagcttacaggcaggcgccaccatgcccagctaatttttgtatttttgtagagacggggtttcaccatgttggccaggctgttctcaaactcctgatctcaggtgatcctcctgtctcggcttcccaaagtgctgggattacaggtgtaagcgtccgtgcccggcctatcatttttcttactatctaattctacttccccggatatcatcaggtcacctcaagattagttggctaaatgtaccctttctcttctccctcaattatctgtaattctgtcaatagctgcagtattttttttttggtcttcagggctcacaacctcaacttatctttgattttttcagttccttgctgccttctctctccatgtcttaattttttttcttcacagtgtttcttggattcagatctctttctacaattaagcagcatctgcaccacagcacaggccaagagatacatatgttctaatgataatggcaatcttctctccagcaaatttgtttttatcttcttgtttctccagtttttgaggaggaggatactgaaactggaaaaaaacatagtatttttactgacagagggaggaaaatccagatccaggaagatgaaaattaatagaaaggggtcaagataaaaaataaagtgataagcagatttgctgccttggggagtagtgagtgataaaggtgaagccaccaggggaatgaagctatgggggacttaaaatccagtcatccattcttttatttctctttaaaaaatgacacatttacatatcagtttccatccggattttaatagtatctctctattttctgtgaaattaacctcaaacctttctgtctgctattcagagccttcttcatttttgctcattttccctctccaccctgatgtttcatcatcatccactgtgggtttcgactttaggcacattattgctattttcatcatgagtaatgatagtatatgcatgactaagaatgtgtaaagcactttcacatatgtcgcttcatttagtcatcttcttcacatattccgttcactatcatctatgacttaataacaatatctttcacattctccctggaaatttgaatcctttacactcttcaaaactcccttatctacaaggaatttcttcaagttaattattataatgttattaatagctaccatttacccaacacctaaaatacgatcatgtatttattactcccaagaaaccagataaatagtcttaaaactctgattttatacctacggaaatgaagacccagaaaggttacttgatttgctcagggtgagaggttgtggctaagagatgttagggcaaaggttttgaactttattcttcctgacctcaaagcaggagcatttacataatactgcaaagacccaggcagtttatctgtgctgtgagcccacacattcctatgatgcctttgaatagtcaacattttcatgaccttacttttgttacttgcatccactttcataaaagttgagattgaatcaaaatattttatatcccttatgaaacatatgaacattttgcagcaaatgattattgaatgtaagagctttctctgttttaagtagttggaccctttctcttttcttcaattactctcatatttatgatctctcttcctctctttatcttttgaaggtcaggcaggaagtgttgagttgattacactcctcacttcctggcacagcattataattggatctaggtaaggctttttattttcctcatgccctcccttgggtctctctttctttctttacttttatttcgaaagcctacccctcttcctttcctctgtctctagaggaagtcatttcaatgtagttcatatattctcttataaaaatctatgtttctttgcatacatttttaattatgtaattggtattatacatattacagtctgtcatttaccttttttagtcagcactgtctttatgaactgtgcacctactctgttacttctaatcactagatagtgtcgtagagcatgcacacatcttttatgcttttccattctaccatatcaatacactcaagttgcccctaactttctgtacaaatgataattccatagacatacatttaccggcattcttatagatgtggataaaaattcctttaggaccagtaacaatcatggaatgtacttctacttacaatgactaagtagaaccagttcctcttcagagtggttgcactgtctacatctataccaacagttcactaagttcccgcatccttcgcagctctcaaaattatccactctgtcattttctccctaatatgtaggagtaacatgatatatcattgcttttgtttgcgtttgttttatttctcatgagtttgagcacctctccatatactcactagccttaatttcctttggtcattctcctattaagattactgccttttcttattaatttgtagaaatcaacactatgttctaaactttagacatttccgatactgcctccgttcagtcacccatctatgaacttcatccacggtgacctctgttgaacaagtcctgtttgtctgcttctgtcacttactcctttgtttgattcatttctttgcatatttcttcttcctcccataatcattttcatcatatttagggtcttctaggcttgttattcattcattgatttttataattatttattcatttatgcaatcaaaaatatttcttaaatacaatctagtaaaagacactggactgtatcctagaaatgcaggttttgttgttgttccacctctcacctgagtgagtgctcttctctctcactctgcctctcacacacacacaccccaaaggaggattcttacaacttgttaatgaaaagaattggtgagttaagcaaatcacgaacttgacatacaaagcagatatattttaaaaatccagaaatacttgggaaagtgattactaagagagaaacaaaaaattggttcttaaaaaaatgtcaagagacagctgatgacatcatcatgtatatgtacaagtttgaacaatacttgaaagttcaccctggccttcattctattgattctattccctctgcctacctgtatattatacttcagaaatatttaaccatcattcattcccaatatgcctatagctggagaaatggagggaagcaagtcatgatatatattgggccagataaataatataccatttaccacttcataagttgctactgtgtaaaataaatgtatctgatgatgggacagaaaagttcaaataaattcctaaatgtaagaacataaaatacagtaaaaactccgaagtagcaggagagaaaacattgtaacagtaatatcactttttgtttgattatatcatatatatggtaaagaatcaggggatttcacatagaattgctagttgtatggttgtaatagcagtttaccctgaaaggatctgaagaaggactctttttcctaggcaactcatctgctgctttcatagtctgtctgataaaaatcattctgcaaatctgtagtgggactaaaagaaaaacaaagaagataattgtacataggagataacagtcttctgagtgttttctaaaagcttcttgtaaagcactagatttataaaaatgaaatttgtcacttacaaaaagtataaattgtgacctcctttattttgtacatatctcatctcttataatatgctaaaggagaaagatttcaggccacttctctattaagaggatagtatgctgatttgagctgttaaattcagtcgtttatgagatagaagctagtatactggaagaattgttagaaaacagtaaaaatggatggctacttcacatattatttatattcattctaaattgagttgccacaaaagatgttaatatagttatgtcaagattaaaacaaactagaaaattcttcatttattttatctccaaatacttttttacaaggtttcatttaattaaagtaaaaaccattgtaagatgggattttaaaattctatcttcatgatttcccactggtttatgaaataacacattggactattcattacaactttattttctcagaggggaaataataatctaataagtcaacatagatctttagaggcacttgagggagatatctagattaagagttcaaatagaaaatcatttgaaaatttatactttgatttttgatctttggtaaactagtttattttgtttgtttattttatttcagtcaagcataattcagtaaatatttatcaaacaaatgttttctcaacataaaatgactataaagaatacaagaacatgaaaagattgtgagcagttttaataagatactcaatgtaaaggtcattgttcaaagaaaacatgtgcttttaattacttttcattttataaactcaaacatgtttgaaaatagtgggaataatgtattcaacagccaatatttttaaatatttagaataagtcattcacaatttaaatgattttctgaaagtaataaaacattagataactttgaagccctctgtgtatgcatttctccatctccagagacagccccttttgagagcctggtgtatctgttctatccttacagtttgtgtttttaagcaacatttaacactgtgcttttatatatacacaagttatatacattatgtacccatctggaactagggttttttttttttaactaataaatatgattttgagatttaactgctctataacattctactccatagaaagattacagtttgtcattcctctgtttgtggcctttaaggttctttctaggagtttgctatatcaaactatgttgtagtaaatggccttatgatgtctacatatgaaaatgtacacaagttgaactacatattcaagtgtatgcacatcttcatttacacgtgttcaagtctattatagccaaatatgtctccaaaatagttgtagaaatacaaactaccattgacactttatgaaagtgcctcagtctccaaatcattgctaacactagctaccatcatgggtcaaattgcttctcctccacttacgagctgtgtgactttggcatggtggttatataatttctctgtacctctgtttcttcctgtgtaaaatgggggtaacaacatcacccacctcataaggctttgtgaggactgtgtaaattgggatttataaatgtttaagaatggctgggccaggtggcttacgtctgtaatcccagcactttaggaggccaaggcaggtgaatcacttgaggggcaggagttcaagaccatcctggccaacatggagaaaccctgtctctactaaaaatacaaaaattaactgggtatggtagcacatgcctgtaatcacagctattcaggtggctgaggcatgagaatttcttaaggctgggaggcagaggtttcaatgagtcaagatcatgccactgtactccagcctgggcaacagagtgagactctgtctcaaaaagaaaagtttaagaataattacagtatataggaagcactccatgtgtgatgttttgataattcttggacttccaattatgccccataaaatgggtgtggtcttgctgttttaattggtgtaaacttttcttaatattctcaattactatgtgacttcactatggactagtaacaaagtctgtggactggcagcagtctatgtagataacttgagtaccactttgttaaattacttttagtcttgtaggttttactttttttcacattagatcggaaggtataattttactattaaatcaatgtttgtaatgcttatatatcatttcaagttttttttttttttttttttgagacagactcactttattgcgcaggctggagtgcagtggcatgatctaggctcactgcaacctctgcctcccaggttcaagtgattctcctgcctcagcctcctgagtagctgggattacaggcacatgccaccatgtctggataattttgtatttttagtagagacggggtttcaccatgttggccaggctggtctcaaactcctgacctcaggtgatccacgagccttggcttcccaaagtgctgggattacaggcacgagccaccgcacctgtccttctatttctttttaagtcaattttgctaacacatttctctaagaattgacttattttacatattttcaagtgtattattaaaatgcatatcttactcatctgttttttattttctatattttctatttttactcttcctgttgttaatttatatatgtatgtatatttatatgtataagtatatatatataaaatcaagtctgccataggtcatctatctatattttgttattcttttaaacaaatggctttgggtttgctagtaatatcttttgttgtattttatcaatttctgtagttatatttgttattattttcaaatttgagttaattcatttttattttctgaattctttgagttgaaatattattccattaatttttctaataatagtttctctattcaactaactcaaatgcacagaaaagaaacagaactaaattgttggcattctttgttttctttatgtagatagaaaatttttcagatctgaggagggttataggaatgactctaaatgagtaaaaaattaatgatatatggaacctggactgttaacagtgagctaaaggtagtatttgtacagttttatgccctttacaagttcttacagtcattaccacattttttaaataacagatgtattgagatataatttacataccataagattcactcttttaaagtgcacaattcagtttaactattacaactatttaattttgagcactttaatcaccccaaaacaaaccccatgcccatttgcaatcacttcctgttaatacctaccctcggccctagaaaccactgatctattttctaccactaaagatttgcctattctggacatttcatataaatgtaatcatgcaatatgtgttttatgactagcttctttcacttggtgtaatgttttcatttgttttagcatacacaagtaattcttttctttgtattgatgaataatatatctatcatgtggatagacagcatttttttattcatcagttgatgagcatatgaattatatccatttttggttattatgaataatgctgccatgaatatgcaccagtttttgtgtgaacatgcatttttaattatctggggtgttcaactagaactggaatttttgctgctcttacatttaagtctataatacagtttgagttagtttttgtctatggtatgaaataagtttgaatatgagtggaggaaaaatcatctttccaagaaataatgctctgggaggactagattttcacatgcaattgaatgatatctgaacctatctcataccatatgcaaaaattaattcaaattgtatcaaagacctaacataagagctaatccaaaattaggtaatttttcttttaaacaactgtgcatccaacacaaacattttctttattttaaaaatgctaaatcctggatattaaattttaagagtatttgttttattgggagctatttggaactattctgtacctgtttttgatatattgtttcagttagctcttgtcacaataatgtcatacagcaaaaacaatactgtgcaataaataactgcaatatctaagtgatcacaacaatatacatcagtatgtctcacagtaattagtttagggttgatacatttttgaaataacataattttagtaactttcagatactgaaacattcttttaagcacaaaaaataatactaaaagaaactttaatctcatatccgttttcaaagcttctttcctttctccctacccaggcctgtttcaggctaaaaaacaccaagtgaggaatgatatagttatgatttttttggactctgcaggaagccgccatcttgtctcttaatggaagcactccctaactataagtccaacaacttcttcacagatctctttttctttgttgttggatagttctcctctatggatctgttagtatgggatagttagttaagagtgtagcaaagttagttttagccaaatcttagcaatttctatggtgacttttctgagcattaagttgtcagctgaaattctaaaaaaaaaaacagaaaatcctccattttgtctttgcgtggcaataattcttctattctttaatcagtatcaggtatatgtaaatccaaggaataaaaactccctaatacctattctagtgaatacacataaacctaagttttgcaagtttctgttaaattttggattaaaagaaattgctgttttaagacagagaattatgtaataaattatacttttaaataatatattttgatcccaagcatttcattaccagagtttacattttcataagcctattaaaaataaatttaatttcagatccttttgaagcattcatcatcttttctattcgtcatgagatcagaaggattgatcttcacaaaagagactatagtctacttgttcctggattgagaaacacaatagcacttgattttcacttcaatcaaagtttactttattggacagatgttgtagaagacagaatataccggggaaagctttctgaaagtggaggtacatatattataatttttcttaatgtttagattacttttttaagtgaaaattcaaagaacacgttataactagaagaaattttgattattctttgacctttggtcctttatcccctccctcatatatgtaaaatcagggatattgagcatctgtgtgagcacctgttgggggcaggaagtggtgacgctcgtgctgttcacaccatttgccactgtggacttttccatggactgatggcaaagaaatgcatttacaagaaaaaaaaaaagactggttgttacataccattagtcacatttttaggagttacaataacttgttttttttttttttttaattttgctaccatctttcaacataattcaaaaaaatgaagaaagtattacaaagatgactaatatgagctaaatatttttgccataatttgacttatctcttttggctaagctaaccctttcttaagtagaaagtctttgatataaatagccgggtgtggtggctcacacctataatcccagcacattgggaggccgaggcaggcagatcacgtgaggtcaggagatccagaccagcctggcccatatgatgaaaccccatctctactataaatacaaaaaatagctggacgtggtggtgcatgcctgtattcccagctgctcgggaggctgaggtaggagaattgcgtgaacctgggaggcggaggttgcagtgagcctagatcatttcattgtactccagcctgggcaacagaatactttatctcaaaaaaaaaaaaaaaggaagccgttgacataaatatatatttcttttgaaatgttgcacccatgtaccattccaaggacaaggtatctctgtcaaattgttaattccattgtaaatcacctttgcaattttgaaaaatggtcatatttaagcacataatataattatgatatgtaaacttatatcctatgtcatatactgatttaaaatgatggatttagattcataggattaattggttagctacttcataaaacacattgttaatatgtctaacaaaaagcactgctgtggtagcaatgttacaaactacaaggatttatcatatcagaaaaggtatttaaaaatgaaagttttggctggccagcacagtggctcatgcttgtaaccccagcactttgggaggctgagacagacagatgtttaagcccatgagtttgagaccagcctggacaacatggcaaaaccccatctctaccaaaaatacaaagaattagctgggtgtggttgtgtgcacctgtagtccttgctactcaggaggctgaagtaggagaatcatctgagccctggaagttgaggctgcaatgagccgtgatcacaccattgcattccagcctgggcaaaccaaagtgagaccctgtctcaaaaagtagaaaaaaagatttttttttaaattgtgaaagaaattcaatagtggataaataagaatattggtaggcatcactgaaatgcttatttttattcagacctttttctcttatttacatttttgttacatcttgcaagtcttagggtcccaggtggggaagagggtcatctggggttgatctttgttaaggttaaatatagtagtagctattatctgttatccttctaaaaagagaaaaagagtgagtgctgattagccagaatgcatcttagctctggtgggctttttcttttgattttattctactcttgaagatcaacatttgagttaagttgcactgattttaaccagaatatcattattgtttccaaaatcctttgctctgtataaaaaagtcaggaacaagaaataactttttttttgcaacctcaacgttgttattagcctcagagctgcttaaaaactttattccactgataccaaaaggatttactagattaaagatttctggcaaggaagatcggtaatgctaaatttgagtctacttggttttacctgtgctaggtagcacttttgcaatctctcaaagttgaaatcacattgaaataatttgtactgctgatcacaggcacaaaggccttttcctttgtgcttaacacaatccttgaatgggtgcacatgttggttttccttcttttgtaggtgtcagtgccattgaagtggttgtggagcatggcctggctactccagaaggcctgacagtcgactggatagcaggaaacatatactggatagacagcaatctggaccaaatcgaagtggccaaactagatggctccctaagaactacactaatagcaggagccatggaacaccccagggccattgctttggacccaagatatgggtaaagaagtttgccttttatagattgattttggcataaaaaatagtctttcaatttaacattgaatttaattatctcatcaattatgagtcaaagtggttattttgtgcccatgtatgtgtgtgtgtggcgggggcggggaggtgggggtaggtatgtgagttgtacatacagcaactagtttattaccacaagtttggtgataggattgcttacataggtacttttagaggctcaaaatgtctttttttttttttctaaatgtgggcattaggccctattggaagctattgcaactctttttcaaaacagtaatttaatgaatttctctttgccctgccaaagagatgttgtaattgtttctaatggttggaaactacagggccagtctttgttctaaatagtcacagatgttagccacttcaccctttatttattttttatgttcttggagtcagtttaaaagaaaatttaaataagcttgaaggagtccagtggtgagatattgactgttaggaggtttgaaagacaaagcatatgattctggaaaacaaggttcaatgttgagtaactcaggttactgccctcttcccttttgtgttccgttgtgaaggagcagaagagaggcactggatttccagccagaacatatgggttcccgttcctgcccagtcacttatactctgggtgtatcaagtgtatctttttcccttagatttcaggtttctattctatgaattggggataataacatcttcctccttcagttgtttttaaggagatgatatacatgggagataatatgcaactgataggtgagaatgctttgttattcctgttgattttgacctttgtaattgttttgtaaatcaaaggtcattgtcaagcctaaaggctagcagaaaggaattctttaggaggtttgtacctttaggtaatatcaagtccagggagcaccaatgagtgcttcaatgagagaggagctccaatgagcagggagtgagccaaaagggagttcaacgagataagagagaaaagccaggcgatgtctaagtcggcctcctggccacaccttctgacttttactcttgtctatgcctaagactcagaagtcaatagattgggaagtatgtttgtgtctcttttcctcaattttgactcagaaatgaaaggggcagaaaccatttatctagagcaaggattccaaattggccaccctcatttatgtgtttgctttattttccacagtgttttaaatttacttgaattagttgtcaaaatttaaaatattgagagattttacataagaccctggatttctgccttcttttgtaaaatagggagatttggtaacaactagctgagtagtagctgtttctcttagcctggaagtatattctctagtttatgtagtctacgttttacctatttcacccattacttcctgtaataacaattgatcatgaaaaagcctgctatgtttaataagacttacctttatttttcaatattttattcctgaggtacaagtagattgctgatactgaccctacacttcccacaaagttgctagctcattatcagctagggccttatctccagtaccaacaactactgatgtaagggttttacctatcagacctaagttgtgtcagcaagggaaactttctgaataaaagaaaagtaatattttggaaaagattgtagtcctagcatgtataccaacatgagaagaaaaacatgaataattccaaaattataaatgacacagaaaacaaacaaaaaaccaggtgtatgaaagtttaaaaatggtctctccaaacaagatagattttgcagttgatgcttccttttccactgatattgtattgacaatgctaggatcaacttatttatctcagttttgtaaatatccaacctgagagtaaagaaagaaaacaaaaacacaaaggacatacaatctacaagtactatttaagtgaaaataccaaatatgatttcagtgtgaaatatcctcgaagagttgaaagttaatacagaaagctagcctgaaagtaggggaaagtcaaaaatgcttctgggggagttgataccttccatcactaattgctgctatgaaacagtgaggctaattaagataattacattgataataaaataatacttttttttaaaatagggtaacaaaataatgcttatacaatcatttctagaataaatgactagagtttggataactactaattcattaaactctaagtgttaactggaaggttgacagatttttgtgtcatgatttgataggcttttattgttaaaagttattttatagaggttaatatgattaagatataaagtttatataaacatcataaagcacattttaaaatatacatttttagatttaataatgtaatgtgaatattaaaatattttcaagtttattggctattttgataaacagttctgaggttagtttaatatattggacctttcacaaggtaggcttaaaacatagcaacaataagcagacacacacgcacacacacacacacacacacacttacagcaaagccaagccaagcacaagaaaagcaacattgaaatataattttatttaaactcagcttactatcttagtgctatgtacaatataaacataagattttccccaatttctcaaactattaataaaatatataaggaagctgagaatcagcattgatatgagcttcaaagtaatttaaacttcttttgaaatttttaattttagataaaattcactaattattgagaaatatgatttatataaatactgttatattttctactaaatcttaagctttttggtggcaagggaagttgttttcagtctgtaaaatccttctaagcctctttgaatatatacttgtgctaagtaaatgttaaacaaatgaatgcatgcatagaaatggaatttgtttatatgtaacttacaggaactcaaggatatatttaaaatgggaagtatacagtaaaggacagacagctaatgggaaaactatgaactttgtttacaataacaaatgaaaagaaaggtttgcaactagccacttttctcccttaacacagctgagaaaacaaacaggccctaacactagcctcacaaaacacatttacttcatgtgaggtttctacagcaatcaaggtctttgtgacctttttttttacagatgccaatgtgaagtgtttttaattgacgactttgcttccccagcataaaatccaccaacattcactttgggttataaaacatatctgtcatcatgccatattccttcagtcttctggattttgacctgatctcccaggtgacaaactattccaagatggtaaattgagagtcttagggaggagctatttttctttcattccattttaaggtaatacacttattgctaaggtgacctgaaagagaccatgaatcccgttttaaacattaagcttattattagagagtaacaagcaccagggtgtgcagaatctacaaggtactcacttcagttcttgaactttcattgcctttatttttacgctactgcatggcatcttcctgatctattgctaaagctagtatttagttttcctttgtcataataactgaactaaaaattcagcttttaactaaaactgaatttagttaaactaaatttttaactgccataaaaatttcgttggtgaaagtagaagtagtaattgtgaagattagtgagacatctaaataatattttaatcctatctaggaatattcttaaatggaactaataaaggttttgttggttttagaactgaatattacagataagtaacctcttttttttttttttaaccaggatcatttatttttaccttctgctgcttgatctgataggtgataacagcctttttatgcctataatgctacaagttgttcatgtcttttgacccagtttaatccagacacttactaatccatgaatggaggaactgcagcatctgtagactgtagtttctttttttaaaagttattgtgactgaacatttccatacatcctataaggagacatattaagtctttgtatacttgaggatataatgcaattattgaaatgctaatgcattttaaccatctaaagagaaagtaataggaaaaaaatgattctgttaaaatagcacattatcaagtatatgaaggagtacctagaatgttatgaaacgatgatcattgaaatcagctcttaagattgttttgaactatgttatggcaaggttaagaacacttctagggtgactaattctataacatgttatttataaaaagtgttggaatttctcacttaaatcgacaaaattttagtctcatagtgatcaccatagaagtatactaacactgctaggtttaatgaagaaatgaagggatcacttattttagtgaatcaaagtgtcccaagccatatttttcccccactagaaaaacgtttcagagttcacagtgcctatttctggtaaatataaatatagagaatacagaattacagtgtcactgatggatagttggactctccacaactattcaaagtataactggatagaaagttacaaggtagacaccaatttcccaattgttatacaggcaaaagatgatgcatcagaagtctttgtgttatcattgcagagtgggaagtacagccttatctacatctattggtggcttatccacaaatactcagagactgcctataacttccaaattcatagtttgttttcagggattattttttcttttctttttcttttttttttttttttggaaacagagttttgctctgtcacccaggctgcagtacagtggcatgatctcagctcactgcaaactctgcctcccgggttcaagcaattctgtagttgggattacagatgcgtgccaccacgcccagccaatgtttctatttttagtagagacagggtttcaccatgttggccaggctggtctcaaactcctgacctcgcatgatccatctgcctcaacctcccaaaatgctaggattacaagcatgagccaccacacctggcctcttatttttttaagcttgcaaatctctctactggcccttgtttgtggagataacactacaaattagattgatgctatcttcgtgttctttctatttaaatatttttgtttttaatgctaagtttaaaagcaactgacaaataacaacctgttgtctatgaaagatctgtgcactcaaaattaaattgaagtgagatttaatttatttcatattcattatttttaagaaaggcattttactatttaaatagcctatcagctttatattaacctttgttccattttctatttaactggcaacatattgtattattttgtgattaattttgtttataaataatttcgtgctaatattttcagataattaatatttttatacaaaacaatcttatctttaaacataaattttttgggaaaataggccccaatattgaaattttataaatgtcctctggtacatttttaaaaatttgtacctatttatttgagttgtttacacttttgaacttttattacagaaatattaaagtacacaaactagtagggattgtgtaataaactctcttgtacccattatctagcttaaacaattatcagtacattgtcctctggtatatgaatgttcatttttatcctttcccaatggtcttattcacatatttcattatcgaacaataaacaatttggatattgtttttctgaatatgcttccacaaccatagctgtgaaagccttgaaactaaaattaaagccatatacatagaactaaagctgtctgtgaaccccataaacctgagacaggtctcagttaatctagaaagtttatttggccaaggttgaggatatgtgcccatgacacagcttcaggaggtcctgatgacatgtgccaaaggtggtcggaggacagtttgattttgtacattttagtgagacatgagacatcaatccacatatgtaagatgaacattggtgggacaactcgaagcaaaggtgggaagatttgaaatggagtgagggggcctccaggtcaaggtagataagacacaaatggttgcctgcttctgagtttctgattagcctctgtaaagaaggcaaatgcattgatctcagtgagcagaggggtgactttgaactgatgggaggcaggttggccctaagcaggtcccagcttgaattttccctttagcttagtgatttgggggcctcaatatttatttttctttcacatttcccgccttttctttttaaaatctttcagagaaagcattttagaagaacatgagtctctggtttcaggttttatctgatctcttatggctatgatgttttattcctaggtggctaagtcttgatttattaggaaagctcatttttagcaggttgtgaagtctcatgtcctgtgacaagaaaataaggggaagaagggagagaaacaacaacaaacaaaagaataatcctggaaaatcagtataggccacattactctgaagtccatgcatcagtaggcagcttcgaaagtcgtttatatatgtggctttaaataggttgctgttatattcttctgaagtttaagttgtctatcttcagttcagagggctttacaaaagcacagcttagtttttgatgactccaaattagaaaaaaatggagaaaaaaggaaaaaggaaaaaaaatgaaagcattattttgcccacttgtaaccaagaaaaaatagaatttggtccaaatggtagaaaacaataaaaaaagaaaaacattaggcaagattagaatctaacaacaggtgtactatagtttttgaaacattattattctttctccagtttcccattttcactaaagacaaatcctcgtaggactgatttgctttattatacttggcctgattatttgtatacagtgcagcaagaaaaaaaaatatttttcacataggcttttaaattggctttgatggaattttgttccatagaaggaatctcagataagactattttaaagttgagcccagccatggatttgtactatcaaatacctatgagttgggtggattccttttctcttgaggttccaagataaacttggagctcctgggcctgttataaaaatgatgttctttactcaccccaggtcaggaaccctgtacagggatggtatagacaaggtatgaggtcagtttttgcaaggggcttttattgacttcataagtcaagtctgattccttagaggaaagcacaccactgcagtcaaagccttgataaaataaccagtttctccaattgtgtcctattacaaatgaaaacaaatttttattgcacttatgcaaataactgtattgccataagctaacaatactcacaaatagtttcaaaattctgtagaaatcaggtagagagaaacaaacatgctccaaattgtgttcataggagtatataccaagttgttaaaagctgtcaatagctcaaagcaaagtttctctgactctgaaaagaaaaaaaggattagcaatgtttcaagcaaaaagtcaaaaggattacttcaatcttctattaattcagtccatgcagttaatttctgttctgcttgatactcataaacatttcagctctccatgagttctgaaagcttttcctctattctgatatcgcaacctccaaagttatcagaaaactggattcaagagcatctgttagagttttatagctgattataaaaccaccttctaaagagaaccaaaacaaaataactgtccgtggaagacaaaaattttagggcagtcatagtcaaagacaccattgacaaggaaatttgttacctctgtggcacacaataatttaatataacaattataattattactgataatgtacacaaagtcatattagaattataggagtttcccataatttttgaacacataccaataacatatacaaatacagcccaaagaaaactgaacaccatttcacaattgacaatgcttcctgtataatttttataacaaataagccaaattatgtcatttttggactttagggaaactaacaccttaaaggattaattaggtcagaaaagacatactttctaatttgatttttaaaagtgtcaaataccaaaacacatattaaaacacttgataattgcaggtctttgaaaattagtcattcatttgaccaaagtgataactcaaggatttcaaaaaagaggtgaaggccttcattatttgagagaggagacttaattttaaaaacaataagcccaaataaaagcaggaagctaattaaatttgtttttcaaaatcttataagcaatctataaaattttaatcttgaccataagatataacttccataagccttttataacctttattaagtagttaactaatgcttcaagaaaaccctgttaatctgacacaagggcccatatactggtcttgcattagtatgcctttgactttagtgattaatttatagagaaactggacttactttatctctcaaaatctgcctttacaatatcacaggcccacctcttctgtgatagttcctgggctttgaggagttgaatagttttaatttctgtccctgggtttcaggaatgcaatttatttttattgtcatcttctcccaggacaaaatatgaggctttaattgctgtcaccatttaagatttagcaggacttggtgtccttttttttttttttattgagacagagttttgcttttgttgcacagggtatagggcaatggcacgatctcagctcactgcaacctctgctcctgggttcaagcaattctcccgcctcagcctcctgagtagctgggattacaggtgcctgccaccacgccccgctattttttttatttttagtagagatgagatttcaccatgttggtcaggctggccttgaactcctgacctcagttgatccatccacctcagcctcccaaagtgctgggattacaggcatgagccaccacgcccagcctggtgtcctttttagacccaggagtccaagccctgtaatttaatatcacaagtactttaaaagcacgtacagaaagataaacggatgtagtaaccttaatttaaaaaaaaaagaaaaattaatcttagtttttttcctaagcaaaccaaaacttaataataatgacataggagttgttttgataaaccataaaaatctgttagactggttaccaaaggcaaaagaaaagaccttctgcactgcacagaatattattttggaagaaaacatttcctttagacctttaagaaaacattgttaccatcaggccacaacaaacaaaagttaatgaaaaaaacttatatgagctgaaaatgagttgaaggagagcattactatcttgctccctttaaaaggggagagaaaatcaaaaacagtgagatgcaatacatttgaactttgtgttaaaaaaaaatctgttacaatttactaagaataaatcaatcccttaagtaaatgtcactgttctaaccaattatttattgtgtgttttttaatatcaagccccaatctatagaaagaccattatagtttctctttaattatagacagcttgatcatataaaagttgtttttttaaaaataaattcttattttgacttacacagatcattcatgtcatgcttggactttctggtttgttctgaacatctgtgtttcttaaacaaccagtcattttgttctaggactaaatctactatacaagactctttctcatataaaaattatttctctttaagctttcttaccaaaaaaaaacctctttatttttataactttctttacatttctcttatttccccattccttttatcttttttatacataacctttaaataagctttgaattagagaaaaatttttcacctgtttaaaaaggacatactttttttgaaagaatgttttcctaccaatatacttttattgaaaaatacctaaataatgaaatatatattatttaatataactttaggatctaaattatgatgagtttgtttacaagtatttatcccattacatttacctaattattttattttaatcatttacctgcattatttataaaaactgtgctagtcatcatttaaaattatggaactaccattgcaaaattataactgagacagtgaaaaatatctgaactaactggctccatcctgtttctaacctccaagctgtccttgttcatttctgggtgtagaccaaactaactttgtatttgtattacttagtttatagtttatagtttataatttagctttgaaacaaagacaattacattcccttcccaaaacaaaccttactgcctgtggactagactgcctaaagccgcaagattagaagttatggtaatcttactaaatttaagatgcagctgtttttattaaaataatattaatgtcttatttattaaagatcatgcaagcaaagatcattccgtcttgggctgggtttatacttttgtaacccctatggcaaattttgacaccttataatattcggcagggataagtaagaaattgcttgattaataaatgcaaacaaaaatgtattctggcaattcttaacacatttctaaagtcttaactactttaccaaaaattttaaagctagcttatttattaaagattttacttgttatgtaaactggaaaaaatatttgactagtctttttttcctgataaagtatttgatttaagtacttttattttcttaaaccaattaattagagctcttgtatatatttttagtggtgaaacattgtgtacatgcacataaatacataaacatattatgcttgctgatagaaatatatcttatagattcataaagaccttttttttttcttgtcttagactttcagattcatgataacttgtttcacaaccctaggcagttgtcagctaaatagccttaatttttcatattaaaggaaacaactaaggtgaaaatcaaatagcaaaatttacatcataaggtacagagagaaaaagtctggtggtgctagaggaagattagagatggatgccaaatcaaacataaaattaaacaaatctatcatagggttatataaggagaccacatttatttagatagagactatctatctttaactggacctttgaactctgggtagagaccacactgaatcctgggtctccaaaaggggaaaattattaaaaggttaaaccatgtgatgtgcttacagttcattacaaaaataaataaataaagacatttctaagtgtctaaactacactcttccttacaaaaccaagagtagcctctgttgcaatagctactttagtaaaaaaaaaaaaaaaaaaaaaaaaaaaatcaggtgacacaatacaaaagcaagcagcttaagagctgagatgaacttgtctgttcacactcttgagattctgtaaggaaaaacagacggttttccccgaaagggagcctggtgccttctctgttttctttgaggaactccagactattataaactattttaggtccctcatgcagcagggggtgaaagagaagggaaagacagcagaagtaaataaagaaaacagaattcagtaaactgagaataaaaaaacttttgctcaaaaaaaaaaaaaaaatacaaggtcctaggagagaaaaaaaaaaaaacatgaaggacttttaaatacaaacacacacacacacacaaatagacacacatagacacatacacatacaaacacacacacctcttggatgttagcttttaattcagctggcttctaaccattgagctccttaaaaaatcttttaaaatgtcattaccatatttcagctaggataaattgctgctatttcagaagtaccaagtatcaaacaagaaaaggcttgatataggaacaaaacccaggctgtcatggtggaaaaaaaagaaggcagacccttagctatcaaactgcagcatggggtgacagccattgctctttcagtttggcctggctggcaaaatgttggccttgttatgtaaataaagcccctatagtagtcaaaataaaaaatctccaaaatgtattttcctttcacatctccatgaaactgaaattattttaaaaaataactaatagaaaccaattgtttgaaagaaattctatgagatgaatctactcctatgatctcttgccctgaatcatattttcatggctttgattcacgtttgcttcataaaattaatctactttcacatagacactgttgtagcatttaaacatagatattagtattttctctatccctttttctctccctttctctgtttccttaacagttagcaagactgtgaaaattttcctttaaaaaatatttattctctatcaatatgtgtgtgagcatgcatgtacaaacacaaatcttttctctgtgctaatcattctgtgtgctaaattgtttacatccattttctcacctaatgttcccaacaaatgtgtactataatagtttttattttcagatgagaaaatggggtttgagattaagtatgcagaagtaattgagaaattccaactttgatccaagtttgttttacacaaaagcacacactaccactatttaatattgacacagttatctaataacacttaccaaatgtcagtgttttaatttatataggaagttccactctcatctttcttccctttttgccatactcttttagcatatgtaattactatgtttataaacataatgttttgaactgtcctctaatcatttcatatttgtaatttctgttttctgtaacagactatattcttttcaaaaatagaagtcatggtgaatatatcatttcacattttcttaaatagacataaattttttttaaaaggaagtggattaattgaattttaaattttgtaaaggattgtttcattttacaaggtaatttagcaaattgctattttcaaggattatacagaataatagaagtcaaaaataataaaactatatataattaaatgaagagaaaatttatttttttaccatttcataattttaccatttatcaacaaaatattgtcagacctgatagaaaaatgtactgcaacattactttctctttttgattactactgtaagagcaaagggaatttttcactccctctctgaaggttcaagtgtcctgaaataaactggcagcaaattagcagaagaaaaggcatacaggattactaacatgcaagtgtacatgggagccatataaaataaagaatcagaggaccagatggttgaggcttatataccctcttcatatgggagagggaaatggggaatgtaaggcattttgaggagtggtatataattttcaggggaattgaatgagctcaaacaatagacaacgtcctgggccaatgttcctctgacctctgagtggggtggctataatttccagaaaggtgaagggcagaacctcacagtcaacaaacattgccttatgcaaataaagcctctcagaaaatctctcagagcttccttcagaacaatagatgaaaagtctgtctgggtgtggtgatgagtctttttttgtctttgttgtttaatcattcctggatatttattgagattccaagggaggggttttcagacagttgcatttcttttgaaagaagttttcttcagtcaaataagggtacttccagaaagagagtccctcccttgtgtttggggcaaagaagagagaaacaagagaaggttagaatgttcttgaaaggcagcttccatgaacttgcaatttcctttaattcaaaaaagtgcttagcatgccaaagtaccatactttggcatattattctctgagccccaacattgtctacacccatcaacgttaaattttaagctcctgaaatttgttccttttccatttttccctttcacttagtggaacccctatacacaatatccttccctcaatctgagattgctgaaacaagaaactgatggtctcctgagattctgttttttatctcattttttacacccagtccatcagctagtcctgacaattctaccttcaaattatattttgaatcaattcacttctctcctttattgccaccaccatactctagaccactatcatcttttctggtcttttatataaccacttaacatgcttgtactcttgcctcactattatctattctctgtataatagccacagtgattagacagtatatctgttttatctggtacagtatatcctgtgtatatactgattagacagatatactgtctcatcactattgttgtgggttttttattcccctaatttggcaggcaggagtgttacagctcttttcctcctgccgcatgtagcttggcaagcaggagcattacagctctttcactcctgcagttcagcgaactccaggctcttgtcccatgaccaaaaggaataaagtacatgcatactagagagggagtaaggcggagtaaaatttattgaatgaatgaaaagctctcaacagcaagaggggatttgaaagtgggtagccttctctgaggctgagtctggggtttttatgggcttcaaatgggggaattcttgctgattggtttatgggtgggcttggaaaaggaatcattcaataggttaaaggcatcattcagaaataaccaattaagagagagtgggtaagacatggatggaagttcttactctggttcatggattcgacccagaactggtagcctggttttcaggctttagactgccctggcttgaaggttcagttttaccggggacccatttctggctgcttgggaatttgtctgtctcctgtcgctgtcactatgtctgtatatatttactatacatagagaataacatttctcctctacttaaaagccaccaaaggcctatgcacttcttattcccttaatataaaatccagaataattctcttaccctacaagacccataagatcacctatttgtcatcctattcctcccctctcttcctcactcactatgcttctaatacattggccttatttctgttcctcaaatagcccacattcttttccctgttagggccttagcatatgttgtttattctacttgccatgctctttatactgctctcctcattcttcagttttagtataaatatcactcctcaaagtgcttttttctgatcaccttctctaagtaggtcagtcacctgctattctctctcatagcaatttttttcaaaatattttatgagtcataattatatatttatgcacttatttagtctggctcctccactggaccataagccccacgaggatagataatacatctgtttctcttgtgacttatcacctatccagtgcctagcatatggtaggcactcaataaatatctgtgaaatgaatgactgaaacaatagtattatttctttttttttttttttttttagaattcttttctggacagactgggatgcaaattttcctcgcattgaatctgcctctatgagtggtgctgggagaaaaaccatctataaagacatgaaaactggggcttggcctaatggactaactgtggaccactttgagaaaaggatagtgtggacagacgccaggtttaaaaaatcatctcttttctgtatttttttttttacttagataatatttacaacattggaaagtgtcctaacatgtcagtatcatgtatacatatattaaaattggaggtgtattttttttttgcttgccccaaatcagatacagacccataaaaatatttataaaataccttttttgtcatttagctgagttacatgattatgtctctggactagttgaatgagttttgacaaactactcatgtatttatctttctgtaggtcagatgctatttattcagccctctatgatggaacaaacatgatagaaatcatccgaggtcatgaatacctttcccatccctttgctgtgtctctatatgggagtgaagtctactggacagactggaggaccaacacattgtccaaagccaataagtggacagggcagaatgtcagtgtgattcagaaaaccagtgcacagccatttgaccttcagatataccatcccagtcgccagccacagggtaagtgcttgttcacttatggattaaccacccagaaagtattatcatcttaatcatataatatttgaagtataaaataacttctataagttaaaagttattgacattttacgcatactctatgagggaagtggtttcaacctttattttaactggtttagaatttttttctctttccctttttattttatttacatataaatatttaggggcatcttaattcctaagatgcccctgtatatttattttaaactaaatcccctaatttttagattattaccatgtagcatattgggaagagagggggtggtacatgagaaagggtgaaccatttgcctgagttcctctattttaggagaagtgagttcacaggcccatatgtgctacctctccccatgtattccgtatttcaccttttggttcaacagtgaaccccatcttggttttgtgattgtgtttcctccactcaatgtttgccaagtgttcctatcctaattctcactttttgccccactgggataccatgaggtatcccatttggtgtaacgtcagctcatccttttatactttttcctcattatatgtgatataacccttggaaatctcatttgaatgcaaacaatgacccctttattagcatgttttcattttagattcatgattcttagatgacaagctctctcttgcatcttctccttctctttctttttcagtgtggaataagcagaccttctaactcattggcatgtagggcatttgttccacacatcgagccttatttttaaaatttgtattatagtatcttttagacttgactaaaaccaattacctctctggttgacaatatcacatggctctcctttgtctttcttcagtgtgttgcgttcattctcccttgatactatttattctaccaaaatctcatctgcaaaattttctgtgtcctttctctgacaatctgattgaatctagttattttcccagatactctcaatttctcagtttctattttcttacataattgatccttctttgctacatgggagtttctatacatatggtttctatatctactgcttacataggtgagcaataactttaatttttttcttctactcttgacttctttcaccttataagctaaaaagcatgaggacattatagaaaaaagtatatagattagtcatttttgcatttaataatgatttagtagatatattgaatttgattaaatttaaataaggcaagaagttattattctgaccagcaatgtgccactagtataatgaaaaaatacgcttctctagaatttccttcaacagaggaatgcttagctgtaagcaaacactgtagatgacaagcacttataagatatgaatggttttgattatttcaagtgcaaaattatttacacaactgtatttttgtccctcagattgtttggcattttgtagtaataataatttgtatgttcagtgcaatctaaatgaactggaccatgaaaaatggccttcatctatgtattgcatcatctatgtattgcatcattcctcctcacccaaaataggatcaatgtccttctccttcatttactaactgcactgtctaattcgcctgcattggcatgacccttagtaaattcatagaacaggaagaaccacgatactctcaagctttcctgatatttatgcatatataggaaagaaacgagacattcattgtcattttttggtggggggaggcatccttgacatctttccttaactcaaaatatgatttatatatgatttttcctctttacataaaataagcaagattttactatgtggatgtaatttaacatattttcccaggattcagggcaaatattctagtctttaaatacatttagagaatatcacctatgaaaagaacttgctatttcctaaatgaaattcagtcagtttgcaattttgagagtgatcagagaacattctacctttccccattataaggatcactgagcatataataatcattatctgtcctgtttatctgcttcagtgaagtaacacttccactgctagggaaaaaagatgcaggaacatatcgactattttattaccgaggatagaattaaaatgaaaatggtgacaaaggctcagcattaacacaaatacaataataatagcccgtattctggtgaataataacatgatgttcatgaaacaaataataaatttaaaaaatacatgacattcagtactataaaattgaaatatatctttcacaaattaaagaaataaaggttacaaatactatttgccattatctaatcctccaagtaggaaattaataaaagtttcagcaccagttttcttacaagtaagcattcattatgcacacaaagttccaaattggttattggatatttaagcagaatattttagaaatatattttagatctctttggtttttaatgttgttgttatatgggattaggaagaaacaaaccacagcttaaacatatgcaatatgaaggagcagtagtgggtattttaaatattaattagaaaaatttacagcatgagggagccaagcttagaattaatggcatggcctgggttcaaatcctaaacatatgatttattaattgcgtgatgtacccttcatcattagcatagttttatttcagattcatgagtctcagctattaatgtgttattggacattattggcaagttatttaacttctctgtatctgctttttcaaactggagataatgtatctaaatcataggatcttgtaaacgttgagtttaatcaccatttaacacaatgtaggtttttctttaagttaaaaatatataattcacgaagccatctaatctaactatatttttatcagtaaaatacaactattaattaagtttcaggtatattaaaaaataatagcaacaataacactcatttacaataaacactttttgggtcatgtgttagtttttctttggataatgagatctgggattatataatgaagcattaaataaaaatggttttgtgattatgactttgtaatataaatgtgcacttatatcatttttattagtactttacagttgttagtctcaatgtgtgcaaagacttgcaggaacaattctccatctaagactccttctcacacataccaattataaattcttatactagctcaaattttacctcctctacattcatagttaacaccataaggactcagcatttaaagcttgtatggttatttatttatttattcattaatcatttcctaactctgtcttacctactcgcctagattataaaatatttaaggaacagtgtttcatttatttctttgtgtcaactatagagtctagctaagtccttgataacaatatcgataattataatagcagctaacttgattatcattgcatttccgtgagaaaaattgttagccatccagtttcacagatgaggaacctaagacagagaaatactaagtaaattgctcaaggtctaacagccaggggataatcgttctgttatctgaacagaagtctgaagccaagcttttgttttactcactgcattctgcaagcagaagacattaaatgcacatatattcctcttggaattgttgcatcatatcaccagatggcagtagagagtcatgttttcttgacattctccttggacaaacttccttaccttcctggagtttatagtctaagaggaggaacagactaaattaacaattaggatagatacaatcattgttatgatagatggattttgaatgtaagagtatagtaaatgaaatttaaaagtagcagggtgtggtactaaaaacgaaacaaaccttgggattagctaagtttaattcttccctcatgtcagtcactagccatgttacctgaggcaaattactaacttggaggggttgcattttcacatttgcagatcgaagcagcaagtgaggaaagaataaatcagagacaagattgggcaggggtcagatcatgctcacactcaaataatatccccacaaagaaatacacagttttttcctctgggataaatggttccaatgatgttaaacataagtgtgcattaaaattaatggagggcttattaaaacacatattggggggcgttacccagagattctgattcagtaggtcttaggtggggtttgacattttgcatctttaacaaattcccaggggatatgatgctgccttcagaaccattcctctaagaaaaggagagaaacaattttttaaaaaatggtcaaaggagtaaaaagaacagatttgcatgatagaaatttgtaaaggattgattggagagacaggattgaagtgtatatgtgtgtgtatgtatgtatagaatatatatgtgtgtgtgtgtaacacatatatatatatacacacacacagacacacagagatagagagattgattttagaaagtaactcatatgcttatggaggccaagaagttccacaacctactgtaggcaaacaggagaaccaggaaaaccagtggtgtaactcaatccaaatctgaaggcctaaaaaccaggaagggtaggtggataatggcataagtccaggtccaggagttcacaggcccaggaaccaggagtgccaattatggagtgtaggataagatatatgtcgtagctcaaacaggaaacaaacttgcctttcctctacctttttattctatttcggccttcaacagattggatgatgcttccctgtaatggcaagggcaggaaacttctaacccagtatactaattcatatactcatctcttccagaaacacacccagaaataacattttaccagctatctagacattctctagactagtcaaatttacatataaagataaccattacaggaagctacttcagtagatcaggaggtggctgatgccaaaatctgggagatgcttgtaggtgaaatggtctctgatgagatatacttagagttgaaatcattaaaaagtggtgatagagatttgagtgggaaacctggggaaaggaggaagaatatgggatggctttaagagagagggtcagcaaatgtattctgtgaaaggccaaataataataatgaatatttgaggacttgtgggccatgtgttctctgttgcagttactctgctgcagttgtaatgtgaaagcagtcatatgggaaatgaataagtgtggctgtgtgccaataaaacttaatttctggacactgaaatttgaatttcatacaagttttatgtgccatgaaatagtattcttcatttggtttttttttccaaccgtacaaacaagttgctcaccggccagtattagcctttaggccatcatttgcagacacttcacttaaaggattatctgaaaaattaaactttgaaatgtgctgaatttgagatacttctgggatacagttgaatatttaaggctaaaaaggaaggaagctttggtctaaaactagaactttcatagttattcaattgtagattgaaggcaaaatgtagataagatttcttaagagtattacagaaaatgaaaaagggcaatgatagagccttggaaactgcaacactaaaaaggaaggcaaagaagaatgctcagaaaaagggcaccaacagatttcaggacaaaaagagaaagcgtgtgcatgcgcacacacacacacaaaaggaacagtttcaagctaacactagccaacagtatttgcttttgtagaaaagccaataaaaataaagacataaatgcattcattggatttggcaacctggaaaaaggtcagtgataattttagtgagagcaatttcagtgggtttgtttgcatatgtcctcgtgatcctaaataggtctgacattagctattagtataactttcaactctttttactacaaaatataatttactaaatagaactagattgttcagtcaaacagtaaattccaaaaaaaataccttcatagcaatcagcttagtctagagccagattgcttgggttcaaattccaaatttgtcaaatcctgacttcttgtgcattagtattagtttgtttctctacattagtatttgtttgtttgcttgtttgtaaatctgtaaaatggaattgttataaagattaaatacatcagtctttctctttgttttttgagatggaatctcactctgtctctcaggctggagtgcagtggcacgatcttggctcactgcaacctccgcctcccaggttcaagcgattctccagcctctgcctcccaagtagcttggattacagtcacgtgccaccttgtccagctaatttttgtaattttagtagagatgaggtttccccatgttggctaggctgatattgatctcctgacctcaggtgatctgccctcctcggcttcccaaagttctgggattacaggcgtgagccactgcgcccggccacattagtctcttttaggcagttagaagatacctggcaagtactaagcactttaaaagtgtttgttaaataacttaaatagataaattagataaattagatagatagatagatagatagatagatagatagatagatagatagatagatgcacaattctcttacttcgttttacacattgccgccaaactctcctcccccaccctgtaagggagttgtctgtaaccatggagaaagtgaaatctaactcttcttttgtatgcttcttctctaccacccatctaccatgtcatttttctctgtgtcctcactcagcccaaaggtgttttcttcatcaccactccaggtgcagggttaaattttctcataaacccagcaagaatctaccaccctgggtttttctgttttcttttgtgtttctttccttagctgctctaattggaattaaaaaaaaaaaatctttcaagaatgtgattgttattttaattacagagtgctgcaaaccctttatctgttagattttcaccaattatgtttttctctttttgtagaaacttatttttcatgtaaacagaacttggtttaaaggggtcttaaatgtttgttgataaaaatagtactatttttgcaggaacattttagtttactttcaaagtcaggctactgactcaactgctccttttaaattttattttgaaaacatagcaactagtaaatatacaaactgttttagataataatatgacttccttttaaaaaagaatcaaaacccagaaaaagagagaatgagtaagacattgagaggtttctccacagttacaacaataattagatcaaatgtaatcataccagttatactctaactcagtctccatttcacatccctgttttataagacatccatcaattggcccatgaatgaacgagtgaataaatcagaatgaattgcttcacatagagaggttgtgtactgtagtagttaaaacctggactctggaacctgaatctttctgttctccttttaatacttgtgtgatcttgactgagtcttttttaccttctcaaagttaagtttagcctttgcaaaatgaaggcaatttttttttaatttttatttattatttattttttgagatggagtctcgctctttcacccaggctggagtgcaggggtgcgatctccgctcactgcaagctccgcctcccgggttcacaccattctcctgcctcagcctcccgagtagctgggactacaggtgtccgccgccacactcggctaatttttttgtatttttagtagagatggggtttcaccgtgttagccaggatggtctcgatctcctgacctcatgatccgcccacctcggcctcccaaagtgctaggattacagtcgggagccaccgcacacggccaggcaatttattttcataaacaaaggttaccattaagaggaataaataaaataatgcttataaaacacttggcacattttctagcataatataataaaataaattatttctttaacttttaaaatcattttttttaaaatcccactgtccattataggaaaattgcaagctgtttctcaaaaagtagtttaacatcgaaatgatttaagtgcctccaattgcatcagaaaaatatgtctatagaaaattaaacttttcttgacaacatctataagaaaacaggataagcttatttcacaataaaaaatgttatattttaagaatattattgatactccctcactaattcactccttagaggacaaagtatcacttacaaaacctgaaggatgagggatttcatataggactattaatattttcaattagaattatggggaatacttttcacatgattaataaaaggttttttttttcttttttgtcaaaaagaaataccctcaaaaacatgttgcagcatggtggaggtgaatctcaaatacttgcaggttgcttaaattatttgcttccacaatttactatattaagatctaggccagtcccgatggctgacactggtaaacccagcactttgggaggccgaagcaggcaaatcacttgagctcacaagttcaagagcagcctgggcaacatggtgaaaccctgtattttcagaaaaaaagaaaatctaactaggctggataaagataatgtggtacatatacaccatggaatactatgcagccataaaaaggaatgagattatgctctctgcagggacatggatggagctggaagccattattctcagcaaactaaagcaggaacagaaaactaaacaccacatattcgcacttataagtgggagctgaacattgagaacacatggacacatggtggggaacaacacacactggggcctgtcgaggggtggggataggggagagagagcatcaggaaaaatcgctaatggatactaggtttaaaacctaggtgatgggttgatctgtgcagcaaaccaccatggcacatgtttacctatgtaacaaacctgcacatcctacacatgtaccctggaacttaaaaagaaaaagaaagatctaactacttgtcatataaattaaatttctctttctctttcctttctctctctctctctctctctctctctccatatatataaaatatatattatatataaaataatttttttagcagagttgataatgtaggatagaggttatacacgtacatacatacatacatacataatacattgtattgttctcctcactgttaactcgtatctagcatctctttatttcatatatttatatactatcggtatgagatttatgtgatctaacatgtatcctattttaaaatgcagaatccctagttctactccaaaatcagggcttctcagtgtctgcacattacatattttgggccagataattctttgctagttgtgggctagatagttctcagctacacttcctgtgaattgtacaatgtttattagatccttcacctctgttcactaagatgccaacagtactccaagtcataacaaccaaaaatgtctcaatttattcccaaatgtttcttgggaggcaaaatcaccaccatctccaaggattgagaaccactgtcctagatggttttttaaaatattgtgaatatagaatcattgtaaaaatagaaacttccctgatatgtttttttttctttcaaagcatgtaacaagtgacattaacagagaataaattaagataccagatagacatgtcatctctttagaacgactgaaagttagttggtattttaagacacatttcccctataaatgtaacattatattgcatatatattttcatccttttacaccaaaagctgcatacagatagaaatgttttttgtggtttttaaaaactctctctgtagagatacctgtaaaagatcagatgaaatttttagacatgttatattctactttatacagtacagtataaaattaattcataaagtatgacataatttgaggaacattgctccctcataaataatactgttagaatctggtgaaagtaaagcatgctttacttgcacatattttaggtgtatatattttaaataaggaattcactcaagttcttcaatgtgaaatgttaaacttatcacttgaagatgtctgtcatagggaaaataggatttcagattagtggttaattgcaaagtacttctgaaaattcctttctttaaaactaataagtcctttcctaaaggaaaattactaataaacattattttattacaagagtaattgttctcatacaaataaggttcattaacaggatgaatattagttactatcaaaaatgactacatgggagggagaaaaatctttctctacctaacaaattggatcctggcattctgctttgagcatgattttattaggtaaacaaatatacatattttatattgcatgaacatttatgtgtattttatttgaatttattggaaaaactggttgtttggatttaaagtgtttttttcttttccctggtgagaaacggactataattaaatacagtttgaatcaaatgtgaaattatatttaatgatattatttttcttcccagagcacacatcagtcttgtgtgattgcacaattaacacatttctcctatgaagtattgtagttatgcattatttaatcttttcacctgaagctatgatgtgctttagaaaattaactttctagatttttagattgctgcaattttagaatatatacccacatacatttacgtacatgcatatgaatccaaatgtccctacctctaacacaataatagataccatagaaattttaggaaaaaacaatgtgtgtgtgtgtgtgtgtgtgtgtgtgtgtgtgtgtgtgtgtatctctcttagttcccgccagcgtatcacctgtctagctcagagagtgacaaagtacaaccctcaggctaaattcagccctctgtcttgtaaataaagttttattttcacacagtcacacctcttcattcacgtattgttttgtggctgcttttgtgttatagtagcagagttgaataattactatggagaacataaagcctgcaaaagtccaaatatctaccatctggcctttaatagaaaaagcttgccaaccactggtttagctagaaagaccaacacatactaatacaaaatatatgaacaaatgtcactaattagaaaataggacagcaagcaataaattgtctaattgctgtgtaaaagcaataattataaccaatatttcgtgatgaaagaaatcagcattagctggcttcattagaaaatgttttacggcagaaagatgaattgagctgagacatgaaggaaggttaatgtaaagatactgatgatgaaattctaggggaagaaaagtacatcatgtggaggtggaaaagaatatagatatttagggaatagtgacgaatacattttagtgtgtacacaatgtgtatgtagaaggaaagtggtagatgaggcttggaagatagatttgtgtttttgaaagagaggtgggtatatttgggacagtatcacaatgtaccagatacatagccatagcaatcattcaaaggtgaggaaatgaatttggaaacatgttggaggagtagaggtaaaaagaaaggaaacacgtattagagaaaatctgtacaatacttgagaaaggattaaatttggcagtgaaaatgaaataaaaaaatgctttggagtaaaaattttgtgtttttggaaggtttatgatttctgttttgttttttgtttacctgcttttagagacagtctcgctctgtgggccaggctggagtgcagtggtatgatcatagctcactgcaacttcaaaatcctgggctcaagggatcctcttatcttggcctcccaaagccctgggattacagatgtgagccaccatacctggccttgataacttctttaacaaaaataaacaagagagtggatcagaataaagagctggagggtaaatggtagtagcagggaaaccagtctgactagtgctgaggattcttgggggaaacattaatagtaggagataaagccgacactttgtgaggtagactgtgggaagccattcaaattttttttttttcccagtagagatgggacctacctgtcttgcctaggctggtctctagctactgggcttaagcaatcctcccacttcagcctcccaaagtgctgggattattggcgtgcctggccccaaatttttaaagaaaccagatataatcaagtatgtgttctacaaagacaacaactgtatgtaatgcagggatactagatatcaaagattagttaggagtttagcgcaacaatccatgcaggaaatggagaaaacctaaattgagccagtgaccatagaattgaagagagttgagtaccaggttagtgtatagaaccttaagcaccttggggtaagaactcgtccactattgtatctcagctttttttcacagtgttttaaacaactagatacttcataatgttttatttaatgcataaataaaaggtgggggttattacaggtatatctctaaggttctatatttcatcagtttgagtttagacaatatgagctatcagtgaacccagtctgcccagctgtatttatatttcatctgttaagatttattatagcactccattgatcaatggctttcccatcttttgaatacaaatacatggaataggcttggctttggtagaagtttatagcctctgtaatcatactggattttgcagtagtgtctcttataaaatagctacttactatctaattataataggtacatattataaggctttgtgggccatgtggtttttattgaagctgttcaattctactattgcagtatgataacagccatggctaatatgtaaaccaatgcacgtggttatgtttcaataaaactttatttacaaaaacagtcagtggaccagatttgtctcatgggttcgtgtctgctaatccctgctttctataaaaatgtgagtattatgaacagtatttttaaatttggtaattggaatagaataggtagctgtgttcaagcacttgtttggaaagaaactttgaaataatattgttaaatccttgaaagtgagaagagatgaaaatgaaaagtaagaattctttgtggatttttcaatctatgaagcacaaaatattgtgaattatacattacagtgttatcattgataagatattgggctacaaagtcaatgcaatttttaattttagtatgtacatagaaacttaatatctctgccttcaaaaatatatattttttcataattgtagggtgttaagggttggtatgattctggcctaaaaataatgatgttcaaagtgaaattcaagtacctaccattagactgttatggattatgcttttaattttcctgagaaatagcatttcctatgctagtgtttttgaacaaacttttttttccttcttgtcttcccttttactcctctcttttttcttttctccttcattttcttcttttttttttttttttattcagatatgggggaatttgagttttctctttctatctacctgactaggtaaacttgacttgatatatgacacttaacactgcctcttactcactcctcctcctgtcctgcaacacctttctgccttcccttcccacctactttcttgcttctctaacttgcgattccttagggacttcaattattataacagacaaaatcaaaagataacaaagaacaaaataagaactacttactctgtgtgacaaaagaagtgcagtagaaaggaatctctggaacaaaagcttctactcttttctattatcttttgttcttaattttcttaggagaatgagttttttgtgagtctcttattctcctttatttatttattgtttttaacaaatacaaagacactattacttttatcatcttgatgtaaggaatgttaaaaattgccaaaagctgcattgaatatttatcaaattcagttcatttctcatatcctctacctttttattatctcttttttattctttgtgttttaaaacaccacaggactgctatttacttctgtaagagggaggaaataccttttctctacccatctcaggttcatggctgaggtctgtaacgaaagacagattacccaaaaaagtacacaaacttaatacaagtattatatgacataggagccttctgaggaaataaagacctgaagaaatggttaaaatctcggtagttttatgctaggaggtatgatctaatggtaataaactggggaaacttagcaaggcctgttgttcagattcttttctgtgtccctgtgtcttcagagacaaggatattcctttcctcagggcttaggaagggcacctctacatgagagtttgtgacctgcttcaggggaggtcagaaaatcctttctagctttcatgacctgtttcaggaaagaggggtggagggaaggtcacagagaccttcctgcttctgtcattttctaatgggcaaaggtggcatattgggcatgtctcaaccctatcactactttgagcaaggggacatggttggaagataccactcatgagttgaaagctaacattttcttgatggggctacaagaataacgcttttttgccttcaatttcgtagcctagttctagtgacttttttctactagataggttctataaaaataagattaaagatactagataaattaaaatcttatccaaaagacatgatgacagaacaaggaacataaaattcaaaatgtcccaagacattcagtgctgtcacagaatgacattgagctgcaaaatttaatattctgttctcaatttgaaaaatcataagtcatttatacaagggaattgagtaagtatgtacatgtggagcaatccttagccatggaattagttaatacagaaaaagtaacaaagaagtagatgacttaatcatgaaggcagacagacatttcttcacataggcctcatttgaagaagagcacgtgtttgaaggaaaggtatatatgtaccagtagtttcctagggaagcctctaaaagtggtgtgccaaggcaagaagggaaccttcatggttggttaagaaaataacaacatctattgcaacttccaatgtctgggttatagtctatcttagtttattttatattaaattcactaattattcctggttgctcctcaaactaactccttaaaaagtcttgacgtctttttttgtttgtttctttttgagatggagtctcactctgtcacccaggttggagtgtggtggcgcagtcttggctaactgcaacctccgcctcccgggttcaagtgattctcctgcctcagcctcctgactagctgggactagaggtgtgtgtcaccacgctcggcaaattttttgtatttttagtagagatggggtttcatggtgttagccaggatggtcccaatctcctgacctcgtgatctgcctgccttggcctcccaaagtgctgggatgacaggcgtgagcaaccacatccggccactacctcgaagcaataggatgcatgccatttgtctaagagagaattgatggagttttcttagttatctttgaaataatgtttttttattaatgtaattgctgtgtatgattgtctattattgtcatattaatcaccctactaatgggttctatgtaggaaactttactttgaatcattaggtgaataacccctgtcaacctcagagcttccctaatacattcttccttcttcactgttcatatttcactgtgtaattacagctcccaatccttgtgcagctaatgatggcaaaggcccctgctctcacatgtgtctaatcaatcacaataggagtgctgcctgtgcgtgcccccacttgatgaagctttcttcagacaagaagacctgctatggtaaatttcttacagttctaatcgaaaataaaaacaaaattgaattctctcaaattatattagcattcagattttactcatattaaagcagaggaagtttttttttctgttttcaaaaatattttaggtggtggtgctatttccatccactattgatgattcatctgctctggggaagactgacaaattctttaaatatgtgatatgttgtactttgttatttgttaccttattgattttttttcctgctactttcttatttggtacgttagcagagtttatctctgcaaaacaggaagatttttaagtgaaagtgcattatcagaaaatgatgatgtaggtaacctgcataacaaagaggcgcttaacagctttaatctgctcttctaaagtcactctagcatcatttggtacaggattatcaacttgaaagggggaaaagtgaaataaaatatataacttggaaagatttgtaaaaaaaactccacacatttaaacaatgcatttgaactaaaaaagataaattttgtgaataaaattttttgctttctattaataattttatttatttgcaaaatattacttaattttaaggacagaaaaaaagtactcaccaaaatttaaaagtcaggagtttaggtacatgtagctttaatttacaccataataacatatctcaacaccaataacctgaaagacaacaacaacaaaatagaatatctgtaactactatttctattggctctgatattttacaaatgtagtgcaaggaagtaaagtgatataacgcctcacaatgttagttactacaaatttacaaaaaaaatacactaaaagcacgctttaaattatttgaaccctaatttttataggaaaaatatatacaagatttctaatagcgtgtttaattttatcttattcaaagacagtatagaaaaaagttgttagattccctcaaaatcttgtaatgcaatacaatattgtagtaattacgtacaaagtacaaatatggtatccgacactcgtagtttatgtagtttagcaacttcgaaattctaaggtcagtgagaattgattactgagaatgtttgggtgtttctagctaaagaaaaatgatgatgtaaggcttctaactcatttcatatttgtttctattaaataccttaatttaaaatagataaattgttactgcattgtttccatcaaatattgattgtgatttttgggagttaacatgtattaaatcaagtaatattttagaatttctagactttcaagcttgccaacttcataagagaaaagaatttctatttcttttttagaaatgaaaaaatttcttctttatgcaagacgttctgaaatcagaggagtggatattgacaatccatactttaacttcatcacggcatttacagtccctgatattgatgacgttactgtgatagacttcgatgcatctgaggaacgtttatactggacagatattaaaacacaaaccattaaacgagcttttattaacggaactgggttagaaactgttatttcaagaggtaaaagattcgtacatgttacaactttaaaagtgtttgttattcagtttgtaataatcacaaatcttttatattctttctcttttattcaactttatgctgttaattgaaagttagaattgattagagatttaataatatgctacatccttactattgtagaatggtataattaaattgcacagagcagactgataattagaaatttacattcatgtgaagaaaaacttcaggacagatcaccttaaaatttagatttctcggctgggcacggtggctcacagcggtaatcccggcactttgggaggccgaggcgggtggatcacttgaggtcaggagttcgagaccagcctgaaccaacacggtgaaaccctgtctctactaaaaatacaaaattagccaaatgtggtggtgcacacatgtaatcccagctacttgggagactgaggcaggaaaatcacttgaacctggcaggcggaggttgcagtgaaccaagatcatgtcattgtgctccagcatgggcaagaagagcaaaactccatctctccaaaaaaataaaaattaaaaaaaaatttacatgtctaaataaatagacttaaagtgtctttttttctgatggaggaatagttacatttgcatagagaaaatataggatattaggaaggactggcttccctgtttttttttttttggattttgttttttgttttttgttttttgttttttttttgagacagagtctcattctgtcacccaggctgcagcgcagtggcacgatctcggctcactgcaacctccatctaccaggttcaagcaattctctgcctcagcctcttgagtagctgggattacaggcacccaccaccacacctggctattttttttttttttttttttttttgtatttttagtagatacagggtttcagcatcttggccaggctagtcttgaactcctgacctcgcaatccacccgccttggcctcccaaagtgctgggattacagctgtgagccaccatgcccggcctccctcccctacttaagcttataagcaacttccctttgcacatatttttacagacctagactaacatataaaacaggaaaactgttcctatttcctgatccagcaggttgaattataggttctaagagaatgctgtacaactaaccattacaaaaataggagtaacttgtcccaacactgagaacatatatgaagtgagacatacatgtacatgtcatggtggagttctaaatttttagcattgaattatcctaatatttgcttaaagtttggcacattgtgatttcagggtcagttattattttattgaatgtgtctttattgagcacttactatttgccatgactgaatatccaaagacgcagtttctcttcaacctaaatttggtagaaggatttggaggggaatggagaaaagagtaatcagtaatccatataaatgcatcaaacacctatgctttcaagtctattgaaaatttaaagtcagacatatttgagcaatggtaaatgtcataatgaaggcaataggaagtgtagattttattcactatccttttcaatactagaaggctagcttgagtaccattaatagatctgagagtatttgaccactgaaatacagttgtatttaagctagctcttttctgatctcaggttagcactgtttaaaaaaatttattgaatggtttggctataagcttgttcaaatatttatttcgaacttgctgaaaaacaagaatttttataaaaaagcaaatgcaaagatttcctctttgttcagaatttttttacaagggcaggggcaaatgtggttggataagcattgttagactggattaaaaagaacaataatgactgatgaaatgtcattaaattccttgaaagaccaagtaaaggacattaggtgtctctgaagattgacaatcagttaggtggtcttccctcaagaaattcaccaaagtctgacagaaaaatgttcaagtactttattataaatatttaatattatccaaaaggctctgtgaattataaagagcaaaagatgttatatcttaaaaaaaaataggagacaattttctgtctttaattatgaactggtatctggtagtaatttggtgagtttatctttgagaaaatcatcaagacttacttctatttagcagactctattcacaattatcaaccaaaatttgagcaaaaatgttttctcactaataattaatacatatactcattaggagcaataattacagattcagtcattttgaaaaatattggaacattttcttttctttcttctttttttttttttagatgcagtctcactctgtcccaggctggagtgcagtggtgctatcttggcttactgcaaactctgcctccagggttcaagctattctcctacctcagcctcctgagtagctgggattataggtgcacaccaccatgcctggctaatttttgtgtttttagtagagatggggtttcaccacattggccaggctggtctcaaactcctgaccacatgatccacccacctctgtctcccaaagtgctgggattacaggcgtgaaccactgcgcccagcctgaacattttctatatagtaagaaacttaaggagagccaagacagactgaatggtatggagcacagaatgagagggatgtatctgtacaagctgaaagatctaatgaaatagacgccaaattatgtcaacctttataagataagtttttaatgtttatgttaattctgaaaataatgggaattaaggaagtgcttcagggagggtatgacaacatgaagagctttgcctttggaagaggccactttagctactgtgtttagtagagagttctatgggttgggagtagatgagcagtgaactctgagagacagattagttggctgttacagtggctctagtaagagatatcagaagcctagactaggctggggaaaacacagatggaggaacatgcacaaattatagagatatcaaagagtaagaacataaaggaacttaacaatcaattggacataaagtttgaggaataggcattgtcaaggatgattccatttctgacttactccacaggctgaataatgttgcctttcaattttttccagaatgaaactttgttaaagatggatatatctttccattagcagaaaaacttgagataaacttttgacagtttagcatctgaactcatcaaaggatctcaaattccaccagtaattgtactttgttttatcctttcatcttttagaaattccatgaatgactctgtggaaacctttctcttcttgcactgtgggtctctgtattttctcacttagctctcgtctctctattgggcttcttcttgagagactttattttcttaccttccttagtctaaatataatgtggggtcagcttcaaaaattgggccccaaataaattcactgtgcctatcatctcccattattttcttctcaagtgggccattttctttctttcttttttattttagaagtagttttgctcttatttcccaggctggagtgtagtggcacaatctgggctcactgcaaactcctcctcctgggttcaagtgattttccttcctcagcctcccgagtagctgggattacaggcacccgccaccatgcccagctaattttctgagacaaacactagctccttggttcaggctttcgtgaggggaggtagaaatagtttgccagccttttcattctacatgtcctgaaacaccaagctgttcttaatgtatatattgctcacatgagctatttgctgtaagtagcttggagcaaatagtttcaaaataattttcttcagtacaaaactccaagttgagagctattttctatcattcctttgtagatagtatcccactatcttttgacttcccctattgctattgagaatccacttgtttttctaattgtcattcttttggtgatgtctctttgctctctagctacttgtaacatctttgctttttcctcattataatatctatattttgctacctagagttgtatcttccatggggccctgtctttcatcaatccaggggaaagaaatcctcaaaatcctctgttttctctaactcagtctttgtactctataatttgtaaactctaatttatgtgttggactttaataaatgtgttggactattcattctgccttccaactcgcttaatttctttgtttctctgtgctaactctgttaacttctttcaatttgttttgtagttcactagttgaactgtgcctaaactgctattttacacattcaaaaattacttttttatattatattttttaatatcacaagatatttttggttctcatgcttccaaaagaatcttttaaaaggaatcattgtgcttattattattcaaagcatcatttattccattaagatattccaccttgtctttatcctacatataataatttatgaatatgtagattttggaggattggaccttttgtttttttttcttttaactgttctcgtatatctcatttctttgtgtgtgttttaattttttttgttctgttacgaggatgaacttaatgggaagtgtgagtcttgggttgaataaattttttcttttacagaagacttgaattttttattgatggagagaaaagtagacactataaaccaggaatcagtttaactttatttttccctttctttggttttgcagttaggacaaatagtaggttctcaatgaagactcattcaataaaataatagctgacccagaaatcaccagtggatttcttatggctactaatctttactagcacagtggatttctcatatataagctagtagtttctagtagcacagtagagacctgttcttaggaattcaggtgtttgtgtttgtgtgtttttgtttgtttgtttgtttgttttttgccagtgaaaggacagaaaaaaagttttgtttttattttttaattgttctcctttataagcaggtatcttttttctctcactcatctttcactagggtgtgtctatacccagaagatcactcttacttagctcacccattctttgtaagtttaaggattgaacccttttacactgagcaattcatactccatgaagctctcaattctcagcacaagtatttgtctctataattgcacccacttctataatcccattttgttttccttgatagttttagctaatgtgtgagtgtgtgttagcatgttgagtttttcctgtcttatgagctcgacaatgcatttgaaaattacaatttttcatgcatcagtgttgtggcaataaaggacttttcagattatacttcatgattagtcttagttcaagaaatgagagaccccagaactggaaaattaaacttcctgagaaacttactcagagatcttgttctgatttacttaaaaacaaaagttaaaacctagaatttattatttcaatattttatcaaaaagaaaaatattattaaatatataacgatttttattccacccccacccccatatgcttatgatgagtttaccagagcactctgcaacaaccagatgtgggaattagtgattgatagtcaaaaagaagagtattcttttagacataaagatgataattagaaagttcaatctggtgggagaaaaatgttaagcataaaaaattagaattaggctgggcgcctaattaggctcatgcctgtaatcccagcactttgggaggccgaggtgggtggatcacctgaggtcaggactttgggaccagcctgatcaacatggagaaacccaacctctactaaaaatacaaaaaaattagctgggcgtggtggcgcatgcctgtaatcccagctactcgggaggctgaggcaggagaattgcttgaactcaggaggcagaggttgtggtgaggcgagatcttgccattgcactccagcctgggcaacaagagtgaaacttcatctcaaaaaaaaaaaaagttagaattaagattgcttgagtacgtatttaaatacatactcctcaacatagacatatttgacttattttagctcagttcacatactcttaaaattttagattttatagttcatgaattcattaattcattaaaaatatttacgttgaaggcaatgttgtatgcaactggggagaggggccaaaaagacacattagcaaggagcctgccctcaaaacacatatgtgaaagtagttatatattagcaaagtaatgactacattaggtaaaaagagattgaccaggtacggttctattgaattaggcaggtggagaaactctttccagctgagatacacaagagacatgattaggtttttgtggttgaagggatgatgttgttgatcagctagcctattatgaataaaattcaggcaagtggagatgggggtaggttatgaaatctaaatagtttccctatagtgtggaaagatcaggtaatatctggaaatctgaaaacatattaatatggttaaagtgtaaagtatttggttaaaaatagtgagaaataagactgggaaagaactgtagctatagtcacgctatatggaaaagcaggctaagaaatttagacatcacattctgggtggctagaagctgttgaataccttggggcaagtgaaggtcatgattcaaagctctgtagtcagaaaaataacctggcagcaaataaatcaattgcttagaggaggaaatgctggatactattgtaatattaaagctggaaagagatttgagagagcatgaactatagaattgacaaagactagatagatatttatagctttcatttggctatgctttacaatttaggagtggaatatattctccaggccatattattaagagtctatcagaaatgaataaaaggatttcgagcagcagagacaatgcttacccctcaccccccaccaccaaaaaaaaaacaaaaaaaaaaaaaacaaacaaaaaaaaaaaaacaaaaaaaaaaccactttggagaacatgtattttagggtaaatagaaacttattatttttgccaataccaagaaatccaaggtaaaatgcagaaaagattaagttcttagactgacaaaatattcttcagccccatatcaggctgcataaatacacattatctaatgtattataatattcataacaatcctctgtgttatctatagcccatttcacaggtaagaaaaaagactaaaagacatttaagtgacttgattaatgacaaaaataggcagtcaacctgaacatcaacccaaatattcttattacatcaatacagcctctcagcaaccaattaactccagagaatgaaagaaggggaagaaggaataaagattctgagtgagggaaataaatatgtataagacgtggcaggtttaactttaaggaggtggtatattacttttgtctaaaaaaaaaaagatgaaattggttgaggataactaaaaataagaagaaatgtgaagtttaagattgagaaacaagtttacatttgaaattcaccaactcacctgtaaattaatcacgaaaagtaatttgcagagtgagagggttcttgatttgaagagaactggaaccacgagtagtatcttctaaggcaactgtgattattagttacttagaaatactaaaaggatttttgagcagcaaggtaggctcccttgagattctggcatggaaatgtaagctggaagcctaccattcaaatactgcactttaaggctgactcagaactgccaggcccccacatcttgttttgctgtcttacattttgaactagttggcatactttacagatctggagtttccactttcacattaaaaaatctagctttctggcttcttttgaaaagaataaaaagggaagttatagcaattcgactagaggtaggtagcagctgctcagaagttttgattggaatcaccaaccttgagcagtaacagaatcttgggcctctccccagaactactgaattagaatctttattttaacagtttccaggtgtcttgtaagtttgagaaatagtagtctagagaactctataagtacagaatgctagaaaatactaaaattttttaaagtaaaaccaaaatcaaggtaatcaaatgctataaattgggcactaaactggcctactttatatgttaatatttcttaaaagattttctgcatttatcctttataacacctcattttttttcttgaaaaggtgcagtttttaagtggaagttgcaatgtgcaattatatttaagcctaaattccataattgttttaaaagatgtctaattcaataataaatgaataacaaccaaaatatttatattggctgtaacaaatccaaacttaattcgatttcagaattttctgcagaatccacgttgaagggatgttaaaataattttagtggattttctcttctcagtcaattcctcttaattatctattttgaaatatattcaactctggtgattcttttaggaaagttgaattgttttatttcattttagtaacaaattggcacttaaaacataaaatagcccatttgttgatggcccacaagtactttctcgtaactagaaagatgtgctatcaactggagaagctattactctaatttgaattttggttaccttggctcataagactgctgcctgtgtttgctcctaagtgtttattagtgaatcattgacggttagtgtaatttcaatgctaattgttgcttcaggttttcaaatagctcagcagtaagacattaatgattattcatgccttaagaagggctgataagggaatgagattacaatcttgtgcgattttagctaacaaattaaagtataaattaaattttcccttagatagaaaataactacttgcagagccagtacaatgaaaaacttcattcacctttaaatcttctctttcctgttttatagatattcagagtatcagagggctagcagtggattgggtgtcacgtaatttatactggattagctcagaatttgatgaaacgcaaattaatgtggcaaggctagatggctctttgaaaacctcaattatccatggaatcgataagccacagtgtcttgcagctcacccagtcagggggtaaagtatgattttttttttaaagtttttccaaaatttcatagacttttgccctgattttatataaaaacattgcttaattcagaggatatatatataacagccataagagttaaaaaaaaagtaaatatggaaactgtaaaagagattcctggttagagttttattatctgtagattatatatatcctacaccaacatatatctgtgacatatgtaagatctcattaatttatatttctaagaagtgacagttctgaataaaaagagatgtaggagaaagtggttgctttcattttgaaagccagtggttaaaaatgcatgtgctacatgttggtatcatggtcactgctttgtagatcagattcttcaatcatttggatagtcaccttgtacccttaagggagcttgcatagagctaaaagagatgtttttctccctagtgctttcaacagcaatggaagaaatgagtttgttaccctctatggcatctgatttcttcacagccaagaggattcaatcttgatgaattacttaacaaagaaaataatttactatagtcttagctaaatattcagtcttgtatgtaggaggaaaaaggaagtgagatattttttcttcactaacaggaaaaagcaagagtggtgctttcttttcaggcaaatatgtaggttattgctggcaaatggctggacaattttggagttttctgaaaagaattaatcctgagtcaagaatatattttgatgtttactttgttttttagtgtatatttcttctcagtgagtaggtctacatctaatattttcaatccatatgtcttttgaattaagaaaactctactggaccgatggaaacacaattaacatggcaaatatggatggcagtaatagcaagattctgtttcagaatcagaaggagccagttggtaagtattttttttaatagtcaccaagttttcaatgtgacaaacctgtacttgtacaatatacctttgatctagatcctgaaagaaaatattaaagattagtaaaataagtaaattcaggaactgaccaatttcattgaatccattgggtttctgttaggtttattagtcaaggttctctaaagggacagaactaataggataaatgaacatacaaagtgggagttattaggagaattgactcacaggatcacaaggtgaagtcccacaataggccatctgcaaattgaggagctgcaaactagtccgagtcctaaaacctcaaaagtaggaaagccgacagcgcagtcttcagtctgtagccaaaggcctgagagccccttgcaaatcactggttaagtccaagagtctaaaagctgaagaacttgaagtgtgacgtttgagggcaggaagtatccagcatgggataaagatggaggccagaagactcaccaagtctgctgtttctctgcctgcttttacgctagcagctgattaggtggtgcccacccagattgagggtgggtctgcttcttccagtgcactgactcaaatgttaatctcctttggcaacagcttcacagacacaccgaggaacaatactttgcatcctgcaatccaaacaagttgacactcaatattaaccatcatattaggcaaggaggaaacattctttatctgaataggaagattaattttttaacatgataatttttgcaatgtattaaataatgaagttacattaatttaatttaattaatcaatctcttattttcactggtgaaatatctgatacaatgctacagtggcagtataactactgagtcttttcctgatcatcattattgtgtcattattgataattacaaggttttgggttttggtatttagtatttagtctttattcactctgttcatttagtttcttattctacctttgccaaccattgcaaatcatcagctataacgtgatggcactgacagggaaccttgacttgttcccaagaaacatctttgaaaatattaagtataaaaattctcttagaatataatattttacccatatgcatgtagatgtctatattataatactgtttcgaaccttaatcactttttcctcatgttttctttcatacctttgagaagcaaaaattgttacagggcctatttgtcatttcagaataccttttaaaaatttagtaagcctcaattttgatattattatcataaagatgcaaatgatgggatatacaatagaaaattcattattttgtttcaattgaatactatacattttttgaatctgggaaaagaatcaatatatcatgaagcttgtcgattttttcttagttttagaaatttagggctacttgaagtagcacatttttcatagtgatgattcaataaaggtgtagtatcactaagatttgcaataaataattcttttcatgtggtctatagaataaacctctcatataaaatgatactgttaacagctattttcttctttagacagtttgttctaagatttttacataattgaaagtcagggttgtattagaaattaaaggcaaattgaaacgctaatacttctatgtggaaaatgatagaacaaaagaaacaaggggttctacaagattaggacccatacaaaggacttaatttgaactaaggcaattcagttggtacttatctggaattgttcagaatatgtaacattgaaaaatgagtatgatagaaatagcataagcaaatcaagtccttacattgtaatttggcaatcatagtttataccaaaatgttaatttatatgcttatttccataatggtgaaaaccttatcttttctaatactaaatatccagtttcctattcagaatttttttaataaaaggcctaacagcttataataaaaaaaaaaagtttataagagaggtactcatgttacctattcacaatttatagctggcccctcagatgttgttcaccaagtgatatatttttttttaattatactttaagttttcaggtacatgtgcacaacgtgcaggttagttacatgtgtatacacgtgccatgttggtgtgctgcacccagtaactcatcatttagcattaggtatatctccaaatgttatccttcccccctccccccaccccacaacagtccccggtggtgtgtgatgttccccttcctgtgtccatgtgttctcattgttcaattcccacctatgagtgagaatatgcggtgtttggttttttgtccttggtgatagtttgctgagaatgatggtttccagcttcatccatgtccctacaaaggtcatgaactcaccaagtatatttttaactgcataaggatgatgattgaacattcaataatacatgtctactttatgtcagtaattatatttgaaaatttttaaaaaatagattttcaaaatgacactttttaaaagttttaatttgtacaagacatactattttagcataactgactataccttaaatcagcattgaatatggctgtgagtcaaacattcatttattcaataaatagatttttattgagtatcggattttgcactaggcctgttgataaaaatttgacactgtccttttccttaaggggcacaggaacctaaattattttagactccattaaataaatttaactcagtgcccttgagcaagttactgttagcttggtgtccttggtttccttactcatataatcaagacaaaatctcttcttttataaagatctcatgagaactgaatgagaaaaatttatgaagcaagacatctggcccttaataatagaaactgtcagtaatagcggtagtatgtacattaggtccaatagactggaattcaaatcatatgattgtagtattaagactctaagtgagtttagtgaaaataaacagaatagattccgtagcaatgtagtagaggaaatatatgtaaccaagtgggcctctgaaatgaccaaatgtttatacaaatgtggggatttaactctgtactgctttgctgctcatgctaaggggcaaacaagtttaaggttaagcaccttccagtaactttccactttagcttgcaattcctgttaagcaggtgccaagattgatagtctccccaatgcgtaatgaaaagctgtgttgtccatatataaatgcaatactttttttttaaatacttccaaaatatggatgctcctcagcaattccccagcttgctatatactgtcacatctctgtctgccccagaaatccttattttagacacccacaagaagaaagtgagcagatgaagtctcccttgcctctattgtctcccatctccctaccatgagcaatgttcgtagatcactaacatctcctttggtagcattcaccatttggatttgccaatccaaattaagtgaattaaattgttcaaagtctaagtacaagaagaaaaagaaaattcagaaatctagaaattagggacaatgtatagcaattttcacatacacataaaacattctttttgtcgtgtttcagggacaacatggttgggaaaaaaatgttatttgaggaaccgaacaaatctgagtatgaatcactgctttgatgcttattaactctgtgactttaaacaaatctcttaccttttctaaggcacagttgcatatctatacaatggagataatagtatataacttttgtggttatttttagaattaaaggcccatatgcaatatctcatgttctagcaattccatacttatatactctaaagagttcctatatatgtgttcaagaaagtacattaaatcataatattaaaaaaatttagaagagcctacatcttcattaaaagaggaatgagtaaataaatgcaacattttcattgctaaagtatgatatgtacatacagatgtgtgtgtgtctacttacatacgtatatatgtagggaagttcaaactttccctttggaagtttgagtctaagtctgctgaagtaaattaacaataggcagattaacaggacaaaaaaggtattcaactgtattaacgtgcacatggacgcaggagtcctgcaaatataaaactctaaaaataggcatgtggccaggtgcggtggttcacgcctgtaatcccagcattttgggaggctgaggcaggtggatcacctggggtcaggagtttgagaccagccttgccaacatggtgaaaacccatctctactgaaaatacaaaacattagccagacgtggtggcgagcgcctgtaatcccagttacttgggaggctgaggcaggagaatcatttgaacctgggaggcggaggttgcagtaagccaaagtcgtgccattgcactccagcctgtgcaacaagagcgaaacttcatctcaaaataaataaataaataaaaataaaataaaaagagcaatgtgactgaagtttttatactatatagaaaggaatagtgacttggagcctggcggcaggttatgggagggaaaggggagaaaagacgtggcaagtgaaggttgtctttatgcaggtgaagcctcacaggtggcagccctcaaaaagaatagatgggagcctgtggtaaaagtttctctgtcatatctgtaataatgtcagacgtttagtttccttttcctgtgagttaagtttttcctgtctccagataatgcagataagaagacctcagatgaagctcttacgtctgtgttttacttcactaacgtagattttctcaacagatgcaagtcttccctactaaggagagcttttcagaactattcctgtgtctgccgcccctctgagtagtcatctcaaaatagaccaaagaagtatattttggcgtggcatattttcatttccttcacatacatttcaaaaccattgagaaaagttattagcagaatgttacttacatacttatagtatgataccatttgtataatttcaaaatgaaacataaaatattaatatacgttgctcccagatatgcttattttaaaactatagaaaaaaagtgaactggaaatttacacaccaattttataatagcatttgatttagggaagagtcaataatgacatctgaaagagaactttcttctttatcaaaggtaattttaacagtatgagttaaatttagtttatatttaataaaagtattcaaattaggtataatgaaatgttagtagtttcaattctggatggtgaactcatgagtttattttcatcttctttcctctgttggttctggctcctccaagtgttaccaaaacgacccgctgtttagacacagctgactttcttcttgacagtggtaaaagagaacactaactggccaagtcttagtagtatctaagagaggaaagagcaaagccgaaattgtaatttagatttatggccaggcgcgggggctcacgcttgtaatcccagcactttgggaggccaaggtgtgcagatcacgaggtcatgagatccagatcatcctggctaaaatggtgaaacctcgtctctactgaaaatacaaaaattagctgggaatgatggcatgcgcctgtagtcccagctactcgagaggctgaggcaggaggatcgcttgaactcagcaggcagaggttgcaatgagccgagatcgtgccactgtactccagcctgatgacagagtgagcgactccgtctcaaaaaataataataaaaataaaaaacagatggcaattgagattttaaagtctggtttaaggtaggtctttcaaatgaaggtatggttaggattgagtaaggatcattatataaaaatttcagactggttagaacagcaaaaagattctgaggggaagttgtttgaagagccttaagttataaaatgttgttttatgcttttcttgctgaagagttgatgagtctctcaggaagatcttgaaataaacaatagtatcggcaacttttatcttcctgggcaataatttcttgggctagtaatgttatgttattaaaaacagtaaaatagtaaagtcatgttagtgtagacaataaactgtgcttatggttttgattctcatttataaaattaagcctttgtttcagggatttttttaacccctttaaaacatattaaacataacctttgtaaaaaatttgtacactaacatgttcgttcaccagctgactctgaaaaacagacccacaatagtcagagttctaccagagaaagaaagccaattatgggtgtgtatatatgtatatacagtaagtcaccacttaacatcatcaacatgttcttggaaactgtgactttaaagccaaaggacatataaagaaaacaatttcaccataggctcagtaatataaacaagagctgtttctagagcatgtatctggcaacaaaaacattaataaatttctaaataaagacccaaaacacttgtaatattaagcattgaaataaatgtgaggcatacatacatttaagaaacactaataaaaacacgtaagattttaaccaatttttggtgaatcagtgagtgatggtggtcatagttgtggtgggctaagccaagaaataaatgtttgccaagtgacaatggtaaagaacgcctcctactgccacatagtttaaaaccaaacaataacaaatatggcaggcttgctgagtactttcataccacatcattgattgttgtggatttgtgtgattattgtgtactttacaaacttttatttgacaataatttgtattcattcattcattcattctctaacccatttattccagtttaaggtcacaggattactgaagcttatcctgacagctcagagtacaaggtgggaaccaacactggaaaggacactatttcatcacagggcacactcatgcacacacataccctcacttatattgggacaatctttttctaactgatatataatgataatgcatggtgtggaatgcctgtgatattttgatacatgcatataatatgtaaagattaaatcaaggaaattgagatatccattgcctcaaatctgtaacttttctttacattgggaacatctcttctagctattttgaactagacaatacattattgttaactgtagtcattctactgtgctatcaaacactagatcttattctttctaactgtacttttgtaccgattgtccaaattttcttcatccccctactcctttgttccttctccagcctcttgcaaccaccaatcaactctctacccacaagagatctacttttttagcttccatatatgtgggagaacatgtggtatttgtccttctgtgcctcgccaatttctcttaacataatgacctgacactccatgcatgttgccaatgacagaatttcattcttttttatggctgaataatattccattgtgtatatgtacctcattttgtttatccatccagctaatgatagacacttatgattattgtaaatagtgttgcaatagacatgctagtgcaggtatctctttatatactacatttcttacttttgaatatatactcagcagtgagattgctggatcgtatggtagctctatttttagtcttttggagaatcttcatactgttttccatagtggctgtacagtccctcagtatacatgggggattggttccaggaccacccacatataccaaaatccacacatactcagattgtggagtccaccctgaaggagtgggtacacaaaaagttggccctccaaatatgtgggttttgcatcctgtgaataccctgtattttcaatctgtccttctttgaaaaaaaaatcatatataagtgaacccatgcagttcaaaccattgtcgattgaaggtcaactgtattaaattactttcccaccaacaacataggagtgttcccatgtctgtacctcctcactagctactgttacttcttgtctttttgataataaccattccaactggggtgaggtgatatcccattgtagttttgtgtgacattaccctgatggttagtgatgttaaacattttttcatatatctgttggccaattgtgtgtctttttttgagacatgcctactcagatcttttgcccattttaaaatcacattattagttattttgctattgaattgagttccttatatattttggttattgatatcttgtcagatggatagtttgtaaatattttcttccattctgtagatttgttcttctctttgttgattgtttcctttgctgtgcagaaacctttttgtttcatataatcccatttgctatttttgcttttgttgcctgtgcttttgaaagtttagccaaggaatcattgcccagacccatgtcctgaagtgttgcccaaatgttttctttcagtagtttaatagttttacatcttagattcaagctttgattcattttgatttgacttttatatttggcaagagataggaatctagtctcattcttctgcatagggatatctagttttcccagcactatttattgaagatattgtcctttctaccatgtatgttcatggtgcctttgtcaaaaatgtattggctgtaagtgtatggatttatttctgagttctctagcgtgttccactgttctctatgtctgtttttatatcgcaccatgccgttttgtttactatgtctttgtactacattttgaagtcaagtaatgtgatgtctctgtctttatttatttatttgcttaggattgttttggctatttggggtcttttgtggctctgtaacatcattggtttcttgatagagattgcatataatctgtgggtagctttgggtagtgttgacattttaccaattctaattgttctactccatgagcatggaatatctttgcttatttgtgtgtgttcttcaatttctttcatcagtagtttattgttttctttgtagggatcttttatttctttggttaaatttatttctaggcattttatattttttgtagcaattgcatatgggattgtttcttaatctctttttcagtttgctcaccattggctgatataaatgccactgattattgtgtgataaatccggcaacattattgaatttgtttatcagttctaatagatttttggtggggacttttggttttcctaagtataatatcatgcatcttaaaacaaaaataatttgccttcttcctttctagtttgctaggacgtccagtactatgttgaaaataagtagtaatagaaacatccttgtcttgttccagaacttagaggaaaagctctcattttttctccactcagtatgaagttagctttggatttattatatatggccttcattgttttgaggtctgattcttctatacccagtttgctgagaagtactttttatcataaagggatgttgaattttttaaaatgctttttcatctaaggaaatgattatatgtcttttgtccttcattctgttaatgtgatttatcatatttattaatttgcataggttggaccatccttgtatcactggaataattcccacttgattgtggtgaataatcttttcaatatgttgtcgaatttggtttgttagtattttgttgaagatttttgcatctatgtttattagggatatagttttcctagtttttgtcatgtctttggttttaacatcagggaaatgctggcctcttagaatgagtttggaagtattccctccacttcgagttttataaatactttgagtagaattggcattagttcttatttaaatgtgtggtataatttgctagtgaagtcatcaggtaggtcctggggttttttttgatggagtattttttattctcatttaatctcattactcattactggtctgtttggcttttctatttcttcatggttcagtctttgtaggttgtatgtattcagaaatttatccgtttattgtaggttttccaatttgttagtgtttagttgttcgtaatagtccctaatgattatttgtatttatgtggtatcagctgttatgtctcctttttttgtttctgattttgtcttttctttcttttccttaattagtctagctaaaggtttgtcaattttgtcttttaaaaaatagctttttatgtcatttatcttttatattattttttattctcaattgtatttatttctgtttggatccttatcattatttttcttctactacttttgggattggtttattcttgcttgtctagttccttgagtgcctcattgggatgttcatttaaaatcttttaactttttgatgtaggtgttcattgctgtaaacttccctgattttgctttatagcatagttttggtatgttatgtttttctaattttatttgtttcatgaaattttcaaaatttccttcttcatttcttcattgacccattgattattcaggagcatgttgtttaattgtcatgtgtttgtattgtttctaagtttctcttattattgaattctagttttattccattgtggtcagagagaaacttgatacaattttgacttttttgaatttgttgagacttattttgtggcctcacatagatcctattctggaaaatgttccatgtgctgatgagaagaatgtgcattgtgtagctgttggacaaaatactctgtaaatgtcagtttgattcatttggtctagagtgtagtttaacatcactgtttcttggttgattttccatctcaatgatctgtcaattactgagagtgaggtgttaaattcctccattattattgtgttacagtctctctctctccctttagatttattaatatttgctttatatatttcggtgccttggtgttggatgcatatatatttacaattgttaaatcctactactgaattaatctcttttttattatatgttgaccttctttgtctccttttaagtttgatttaaagtctgttttatctactataagaatagttactcttgctctgcttttgatttttatttacatgggctatcttcttccatctctttactttcagccgatgtgtgtctttttgtaggtgaaatgagtttcttacaagtagcatatagcctaaataaaaaagcctgaataaaaaaattattcagctgctttgtgtctttttttttttttttttttttttttgagacggagtctcgctctgtcgcccaggctggagtgcagtggcgcgatctcggttcactgcaagctccgcctcccgggttcacgccattctcctgcctcagcctcctgagtagctgggactacaggcgcccgctaccacgcccggctaattttttgtatttttttttttttttttttttttgagacggagtctcgctctgtcgcccaggctggagtgcagtggcgcgatctcggctcactgcaagctccgcctcccaggttcacgccattctcctgcctcagcctcccgagtagctgggactacaggcgcccgctaccacgcccggctaattttttgtatttttagtagagacggggtttcaccgtgttagccaggatggtctcgatctcctgacctcgtgatccgcctgcctcggcctcccaaagtgctgggattacaggcgtgagccaccgcgcccggccctttgtgtcttttaaaaattggagaatttaatctatttacattcaatgttatttttgataagtaaggacttactactgccattttgttacttatttttggagtattatgaatttgtctttatacttacttttagcaatgagttttagaccttcaattgttttctttttgtatattagcatcttttttttgcatattgaagaattccctttagagtttttttttgtaggatggatctagtgattgcgagttccctcagcttttgtttgtgtgggaaagactgtatttctctttcatgtttgaaggaaagctttctgggtacagtattcttgctcagcagcttttttctttcagtaatttaactatgtcaccccactctctccaggcctatatggtttccattgagaagtctattgccaagtgaattggagctcctttatgtgttatttgcttcttatctcttgatgcttttaggatccttgctttgtctttaacctttcagaacttgattattatatgctttgggatagtcttatttgggttgaatctgtttggtgatctctgatcttcctataactagatatttttatctttaggtttggtatgttttctgttattatttctttgagtaagttttctacccccttgctctttctcaactcccttatatgctaataactcttagatttacacttttgaggttattccctatatcttgcaggtgttcttcatttctttttattatttttcttttttatccttttactgtatgttttctgatagcctctctttaagcttacttattttcttctgcttgatccattctgctgttgcctctagtacattttttagttcaggaaacttgtttctcacttctaagatttctgtttgatttttaaaaattattattttattatttgttactttctctgataagtttctgaattgattttccatgttacctgggagttcagtgagtttcttcagaactaccattttgaattcttgatctgagagctcacaaattgctgtctcactagggttagtcactggctctttgttttgtccatttgaggaggtcttggttccctgtttgctgtagtttcttatggatgtatgtctatagcttttcattgaaggcctttacttgtgtctggcttgtgttggttttctagggtatgtttgcttagagtttctttgcagtcacttgtaaatcaacttaatcctagattgatggcttttttggggggcattagatggcatattaatcccaaatttaccttggctctcacaggtgttcagaacacttctggtcctgaattggagtggggttcctaacgaggataccttggctctgtaggagactggctgggtcttcatgctcagaatactcattgagattgcctcctatggtgtgttgctgctaaatagctacttttatttggtgtccccttggctgagataaagaacagtgtttcacaggctgaggtttctaatcccacctcccctttgtgtctctagctgccctcaggggttttctccctacaggccctcatgattcttcctgtgggtccagacagtaatagttttcttaaaaggggatccaagatgctagggaagctggctctgccttgatctcactttttccagtgcagaaaccatgagtctaggaggaatcattcatgcatggtgcctggcagattgggggaggggcattatgaatcgaaaggcccatttctcttactgtctgttcagagtttttcacttctctatggcttcagggatcatctcagtctcagacttgagttcctggatgttgctggtgatcatcttggcactggataattatttttggttttctcttggggagagtgaagccatctggcttctcttctgcaattttgatggtgtcagtctcttcaactggggcaatttaaacatgccaattaacctaacatgcatatttttgggatgtgggatgaaaccagagcactcagagaaaacccacacagacatggggagaacaggcaaactccatacagatagtggccccaggtgggaatcatttttttcccttgtcaatgttataccaaaatgttattcaaggacctgatgtatatgtatacctacatatatgttatttgttgcaaaattttgacttatgagatcctgaaaactggctagcccttaggcaggctatcactaaagacatgcttgacactctcaggcaggagctgaagctgaagacgacaaaatgagtttctttgtcagggaaacctcaattctgttcataaggcctttcaactgattgaatcaggaccatccagatttttgagtataatctcccttacttaaagtcaactgattgcagatagttatcacatcagcaaaatacttccacagcaacacccaagacagtatttgattgaatgactgggtatcacagcctagccatgttgacacatgaaagtaagcattacatgttttgaacacaaacctttctgtagtttatccactgctgtatatccttgcaagtgtagtagttgtgtttatgttggttcaaatgttgatttccataattgtttacctataatctaaatacgagctctgttaaagaaaaaaaaaattccacaattgatccttctttttaaaatctaaattcatcaaaatacatgaattatgattatgttacgactaatattatacacagctactagcttaatgcgttaaatgcattatgttgggcactatggatgatacagaggactttatgtaatactggctttgcaatgtttacatcccgatgggaagaaaccaaaacaaaacataaggaacatggtgaagatccacatgttggtttgtatgcatgtgggagtcttgaagaaaaaactaaaaaaaaaaaggacttcctataatgtgccagttactgggagacaacatgaccaaaagtgatatgaacagtttcttcaaggagtttagaatctaaaaggaagtgcagtgtgaccgaaacttcccactccagctgtatttcccttctttgatattctcccaatttttaggctcttttcactaatattacattttaacaagttatttctttgcccagaaatgtctcctatctcttcttagtttagttcactcactcctatctaataagccaagtgttgttttccaagaacccttccctgacctctgtgaccaggctgaattcttctaaaacagacacttttaggactgtattttactttttagctctgttatcatttaaatttttaatttgtttgttgaatatatgattacctactgcctcatcaactaaaagagaagcaccacaaagctagggaccgtatctgctttatttactattatatcctcaacgtatagcacaattttggcacataagtagattttcaataaatatttgttgagtgaatactgtttcctgtcctatagcaagagtctctacaggattgactaaacctaagatttattgatatgtctcagttgaataagattaatttttgaatgtgtgatatttagaaagaatatttccactggaagtgcgtacttggtgacctggatatggattcatgttgcatttcatttgatgtatccaaggaataaaaaacatattaaagtgctcccagatttatatttataccattattttctcaaatatagggtacaaatattatgtatatgcacctgggttgctatgtaagtacatgactagctaggaagaaaaagttggaaatgttacacttctaaattttcttctccacttattcctcttgctttttctctagcttatcctgtctaaccctgtggccactgggctctcattagcacctcaatgacagatttctcataaaattaaagaacaggcaaaaataaatatagtcatctacttattgacaaatcttcttagcacagggaataaagatgaaatcaaaaaatttttacagtaatccctcatttatttcaaccctattaattgtaatttttgatctatcccaaaaggcctcatatagattaaaccagattaaaagtacagtgcatagtaacttttttaaaaaaaagagtattttcactgtgcgtgcctcaaccattttcttaaaatatatttaatagcttatgtttcttactaattaagagaaaatactaaagaatttcagattattgtgttttctatttttttttatttttttaaattccttttgctatttttttaacttttgttttaggttcagaggtacatgtgaaggtttgttacataggtaaactcatgtcattgaggtttgttgttcagatcatttcatcacccaggtattaaacctagtacttaatagctatttttttctgctcctctcctaccctcttcccaccttccaccctcaagtagaatccagtgtctgttgttcccttctttgtggtcatgagttcacatcattcagctttcacttataagtgagaacatgtgttatttggttttctgttcctgtagtagtttgctaaggataatattttacttttttttctgtctttctgaataatttaaaactgctatgcaaataattggataaaatatttctgtgttttatatataaactatatttaaactatatatataaactatatttaatatagaatcaaagttgtttcataaggaaacacttgacataggatatttgaaatactctaagtagtccatgtcattgtaacaccactttaaaagattccttcagaactgttccactgagtgatttctaaaatggaattttacagtacagtgaatggatatatgaatgtgtgaaaaaataaatacaaacctattgttgctggcatacatgatcattacaccatgaaatacttaaatacatagggcattaatcactgcattatttactcattgtaatttcatttacttattgcaagcaattattgtaattattatttaatgatgagtctgtgtgagctctggctcaaactgcctacagtattccttaaatttcagtgaagaaaattaaacaattaagaagagccactgttcaattgaatttcttctcgtgcatattgttgtcagattatacattttatttttttttccagaatgtgaggagaaaacactatattctgcctggtaaaaatggagcagcatcaattagctcatagcaattactacttaacaccctttatagtacctgtattctcatcatgaggccacacctttgtgtctgcatgcacttattgagatctttcatatggtttcatatggtagaaccatgatcactctggcaacaaaaataatataatcatagtgactactttttaagcacttgcaatatgtcagccactttcaaaatgctttgcattaatcatctcataacaattatttctggaagaagttcttttccttcctttatagattcagaaactgagtcttgtcgaaagaaggtagtctatgatgaaagctggctttaaaatccaagtttatttgcttctaaaaccatatgaaatcttaaccattatgctgtgcccagagaggctgatttcatatagtaattacttaacctcagcaaagataatggaataaagctgatacttttcaagcatggaatgtgggaaagggaaaaatccagaactggcttactcctaagaaatgtggacccagttaggacacagcagttgacttttctaagcagccaggagtatccaagaaccaatttcacctcttagccaattgtgcctcacaattaattatttctgaatctttaattgctttgaaatggcaatgccactgatacactagactttctagtttgaggaattgtttttatgttgtaattcactgacttcgcttgcttgtttgctgttaaatccacatgtgacatacttaaaatagaagtgtatcataatcatatgaaaatgctcaacttggcattttatgagtatgtgtcactaaagactgagtaattgcagccttcaggcaatttaggctgaataactttgtttctgttcaatacaaatcaacatcagcattccagttatccattgttgagctaaatattctcaattaagatgtattgctcagtcttggatatattaaatgcttagagcagtttacatatcagaagattttactttactgatgacagtgatttctatggttaaaatgcccttatattatgaattttatcccttaagcctcatataaaggaacttggcttgtcaatcaacattacccttcatggatattcttaggaatcttgtgtactatatatttttatttctttgatgtttcccctttattctttttttttcttttttttttgagacggagtctcactctgtcgcccaggctggagtgcagtggcacaacttgtctcactgcaacttctgcctcccagattcaagcaattctcctgccttagcctcctgagtggctaattttgtattttttgtagcgatggggtttcaccatattggccaggctggtcttgaactcctgacctcgtgatctacccgcctcagcctcacaaagtgctgggattataggcgtgagccatggcgcccggcctcccctttattttcaatgtaatcccaattgaaagttatttgtttacttaaacttgcagtacatcttcttgaaatctaccaggcattttctattactttattccaactcatacactgtatgaagtagagtgtgaattatattcatagataacattcttaagcactttttcccacatcaaaataaaataaggaacctcagtttttagaagtaaattttttaaaaaagtcttggatatgtttccttgttcaatattatgcatttctgttattgatatatacttattactcagcacaatcacttttattatgtaggaagcacattccatttaagactgcacatctcaaaagaaatgttacaaacaggttacaaagaagccggaggaggtgacaaactaagattataattacacatgctaacacacacaaataatttaaatatattacattttcatctgattattcatttactcatttaattcaaatgttattaaattgggggtgcgggggaggtaattttttaaaaaggttatgaagtgtacactaggtactagaccctaaaaacaaaacctggtaccatcctccaggaggacgtagttcagtgaaggaaaaaaatcactgataattaaaagccatttgaatgagatttttagtagagttaaacaaaacaaaaacactcaatgtttttcatgagtactatgctcatcatacagttaagtagacactgaaaataaacaactaatattttgcagggaggaaaattagaaaaaagaattgtaaccaaattgataatattttgaaattgctacaggatcttgaaaaaaaatactttttttttttttttaaagaagcaacagaaagaggaggggctttccttagtatcagcagaaaagaaaagcaggcataaaaggcataaaagaggatgatatgtgtacaaaactgaatttttctatatgcgtagcaaatctaacataaggaaatatttagcattgtgttgtcaggaactacagtttaaaaatatttaagtgacacaatccagtgctttaaaaatattttgttctattttacttatcaagctataaaatatagttttggaaaattataaaactataggtattaaagcttttaaaatgcttttaaaagaaaacacttaaaaaataatttcgttgattctggtttttcctctatttctgtgtgtgttattttcacaaggcacataagatttgctactcatcaagggctcgggatatggataaactgtctgaggcaaaatgagttatgttaggaaggacggaggaaatgttgaaatcttaccttgaataggataagtagtaagggatcagttgactactttagccctgtaactgacagggtgaaatgaaaagggtaatttccaggaaggatttagatcatgttaagataaaggcagtatactcaactagttgttgaataatgtgcttttaaaaaaattaatgtaggccaggtgtggtggctgatgcctgtaattccagtactttgagaggctgagccaggtggatcactttaggccaggagttcaagactagcctggccaatgtggcaaagcctgtctctacaaaaaatatttaatacaaaaaattagcagggcggtatgggaggctgaagcaagagaatctcttgagcccgggaggcagaggttgcagtcagctgaggtcatgccactgcactccagcctgggcgacagagcgagactctgtcttgaaaaaataatagtaatttaaaggtttatatggacattattgtgtgaagattagtttttacttctctgagttaaattcccaggaatgcaatactgggtcatattgcattagtgtgctgaattttataagaaaatgtcaaattgtttcctagagtggttttaccattttacattaccactaacaatgtgtatcagttatccagttctctgtatccttgttggcatttagtgttctcactgcttttttattttagctattgtaatagacatatagtgtatcctattgtcacttaaaaacacttttatttcttctagactttaggttgtttataacaattttcattttaatttgcattttcctatgatattgaacatctttttatgtgtttatttgccatttgtatatattattctgtgaaatatttcttctctgttcttctctgttctcttttctgtgaagttttcttctctgttttagtcatcatgctccatctcttttgcccatttttcaattgcatttttttaactattgagttttgaaagttcttttgttgatacttaccttttgttggatgcatggattgcaaatatttactcccagactaaatcatgtcttttattacttttcacagaccaaaagtttctaattttgatgtgcttgttttataattgaaagaatattgtgattatgaatgaagtacataatctcaacatttttagtaattagattatctccaaattatcagttgtgagattaccagagagatggttgcaagctttagaatagagccttagcttgaaagggaaatataaacatttataccactcataaatatagctaacatttatttcatgctttccatgtgtcagacacaactgtatgaggcattattcttatcattaccacctcacaatggtggagcagcaagggcaaggctgccagaaatacttagacaaggcgactgaaggctaacaccttagatttgtgttcacttcacagagaagccagggatggaacagacaaagacaaagtgcttgggtttcctcagcacattctcttttttttttttttttttttttttgagacagagtctcgctctgttgcccaggctggagtgcagtggcatgatttcagctcactgcaacctctacctcctgggttcaagcgattctcctgcctcagcctcccgagtagctacaactacaggcgtgtgacaccacacctggataatttttttgtgtttttagtagagatggagttttgccatgttggccaggctggtctcgacctcttaactgaaagtaatccacccgtcttggcctcccaaagtgctgggattacaggcatgagccacagtgcccagccagcacatccattctttacccagcaaaacccaaatattctcaggatggataaagcatttcttgagatagcctaatagtgaatccttctccatgtaataactagcctccatcagagctaaagttttaatgtttccaaaacagttctgccccaggaataggaatagtgatgccatttctgatgaagcctgaaaaaatgttcattttggggtatttagaatattataattcttctacagatatagcatgtgatgtaacttattggtatttctctatgttttctgtgtttacaatggtcagtttctagaactttcacagtcccagaagtagaaggagttgttttctactgtctgaagttagtgccagaaaaagaatatttagaagattttgattatatttattatacctgtgtagaggcctggaagttaatcctctacattttaatattcatagtgtgtctatttcccatatctacatctctaccattcccctgtctccaaaagtttcaccattgtgatactctttccagcaaaatttaaaaggcccagttgaatttactaaaatattacatttgaaagcttataaaaatatgcaatgtttaacacaattttttttaaattgtatatcacaaaattacctgcagagatattttaaaaatactgaggcccaggaccagcccaaaccaattaaactgaaattttgtggactggggctctgggatcaatattttaaaataactttccagataattaaaattctcagctagggataagaattttgaagttaaatttgctaagtgatggaaatgtattaaaaatatctattggaagccttaattcttaattttttaaattccttttttatacttttgcaattttttaactccatactgcatagtatatttatttaattttgagccacttagaaaacaaatgagacacataaaatgaactgcctagtcttaattgtaacaacacttaaaacttaacaaacttaattttttcagtaatatatgaaatactgtatgtaggtaaattacattattttaaaaatatttagtttcttacattaatatgtagaatatttctattatgagagaaattacataatttttgcaattttcattgtctcagtaacaattaaactggcctatttaaatcaaaatgttcaaataaagtaatatataaaggaaaattcgggactgataataaggaatgttagaattaaagcatatggattagctgtatttttataaaaatagaaaagataagtaaaaagataaatttttcttttcatatatttttttcttaatttaaatagtgacttatttttttcgtatacttattatgttattggatctagatttcctcttttgatagccagattcagatgatttcaaaaattagttaaatatgtcttataaaaatgagactgtattacaattgatacattcttcagacagattctatagcctttgaagattttcaaatttaagtcacccattctgaggatcctttcatacagacataattatatttctttgcataagttccaggacagttttataaatatgctcacatttgactgttttctcatgggtattgatttagcattctgacatcactgagtagttttaattgcattaaacaattatttgttcactgcctagtgattcatttttttaaatattagcacaacagagaactgattcagaaattattccagcatcatgtataccaattaatcatttagtgttgttgggactttagtgaatgataataacaaaatgaaaaatcttatgatgcaaaaacatttgcattaataaacttcagagatatgtattatacttctatatatatctatattatgaatataaagcatatgtcaccagtttttaaaattcacaataggatttgtaaagctttgcaattctattttatgaacctgagaataaatgcacccaagaacatttaagggttaagctaacatacttaacaggaaagaagatatatggagggagttatgtgatatgcatcatatgcatacatatatatagagagattaatatagaaactttaaatattgtttttgtgaatcttaaaaatattaatttgaagctattcaatattaaaattaatttaaatatttaagtcatactaagtagagatgttgaatcattgctcttcctctatacttgttacagtatctgggtataagtagtacattaaaaaattcagttggggccaggtgctgtggttcatgcctgtaatcccagcagtttgggaggccgaggcaggtggatcatgaggtcaagagatcgagaccatcctggccaacatggtgaaaccccatctctactaaaaatacaaaaattagctgggtgtggtggcacgtgcctatagtcccagccacttgggaggctgaggcaggagaattgcttgaacacaggaggtggaggttgtagtgagccgagatcatgccagttcactccagcctcgtgacacagtgatactctgtctgaaaaaaagaaaaaaaaaaattcagttgagaagataactaaacttttctaggcagaactctttgaaaacaagctatagtttcaagatggaattaactaaatagtctgccatttatttgatgtttattaattttcttgtcaattctagtcatcatgctagacagcaaaataagatgactatgacaaagcctctttcctctaggcacagtctagaagcaaagaagttgaataatagactctggtgaactcagatccaaaaaaaaaaaaaaaagagagacaacattcttccctctgtgaagccccctcttaactaaattgcttggcattgtgtattgcattgatttaggaggttttgttttattttgcttaaacttcccatatactccctagcttcttccctcattttagatgtaaactttatattgtagaatcacgtacatatggaaaagtaaaccatcctaaatatatggcttgacaaatgttgattaaatgagcttgcctatataaccagtgcccagatcaagacacagaatttagttagaaacacagtagccctgtggccagtcactaccttacattccacacatgtcctgactctgagcataagctagctttaccttgttcctatagaatctgcactcactaaaagaaaaagaaaaaaaaatagaactaggcgaggtggctcacacctataattccagcagctcaggaggttgaggtgggaggattgcttgagcccaggatttcaaagctgcagtgagctatgattgtgccactgcattctagccgggcaacagagtgagaccccaactctcaggaaaaaaaaagagggtctaatccatagagataaatgcatttaatgattcacattctttgtcctgggaatccctgtagttgagaattattaggctatatttgaccttttctcagtgcacttgaatctgtgtgtctcttcaatcatctgcccttccttcttttcatctttttttttttttaagggaaggaattatttgtgatttgttcactttattctctgagagagatcccaggaacagttggttgcattgtgtgcttgagtatatgcccacatgtacttttccgtgagtagttatggatcacagaaggtcaacatggttctacagagttattgttaaaatgtggatactgattctgctgagcatgccagtagttaagtagatgtgtgccaaggacctttagcaaacaaaaagtacctaccctgagacctctgacaatgatggccaccactgtaatatgtgaagttgcccataaaatataataaagcctagccttacctccgtgacacactgtgccaggtcgagattagggtcttaagtcattggcttgattcactcacttgccaaatggtttatctcccccatatcaaccaccaaatgagctcaatttaattctgtactttggtaaaattactatttgctgaaaatcttccatttttggatttacttgaagagggatgaaatcaccaatttaaatctgtaactgcctaagtaaattttatggaaaatagatgagtaattataaatttcatcagttaaattagtatcccaaatgagtcattacacattaaaactttctgaggcaaagtggcataatgaagagggcaggcactcaatttggaaacagaaactttcaaaaatatctggaatgtccactaactagctatgaacacagatttcttatctactctaggtactattttttgtatctgtaaaatggagctgtcatttcttggtggcacagattatgttggtaatccatagagatacctgttaagtgcctataaaagtataacgtttctctgtcggttgaaactgtttatgttggctgggtgccatggctcatgcctgttatctcagcagtttgggaggccaaggtgacaggatcgcttgagcccaggagttcaagaccagcctgagcaaaatagtgagccccttttattaaaaaaataaaaataaaaattagctgggcatagtggtgcacatttgtagtcctagctcagcaggaggctgagatgggaggattgcatgagcctgggagtctgaggctgcagtgagctataattgcaccactgcactccagtataaatgacagagtgagaccctgtctctaaaaaattaacaaaataaaaaacccaaaacaccatatgtgtatttccctattagccagatcttatttgtaaagacaaaaatctgaactttcaacttatttttttcccctcaaatccagtggtgctaggtggatattacaatttaagtggctatcattatgtttaagttgtaaaatttaattacaggtctatcgatagactatgtggaaaacaagctttattggatcagttcagggaatggaaccataaatagatgcaacctggatggtggtaatttagaagtaatcgagtcaatgaaagaagaattaacaaaagctacagccctaaccatcatgggtaagtgaaattattctatagcttggttgctttgtattgattgggggttgatttattatgacctgttaaaagcttaggaaagttactgctccactaacaccagaactatattcaaattgaacacttctatgaggttttcttctcttccttcttttcctctttagcaaacagacttataagattatccagatcagaaacttagtgttagcaatactaactttactgttactgattcttggcttactatgacttgtattattttacaattgttattttctgtgttctactccagtcctctaaagtctaagggcctagtgcatttgtcacaataaagtcaaacctggcttatctccatttaataaagaatagcttgatccataggtagaattcaaaagacaagacaacagggtccatttgaccaatgattgaaataatttcccattgaataattcttttcagtattttggagtgagtagagattttacttatttgagtgttatttccattctttgattcaatcttctagggaaaaaaaggtgctaggtaagtaaaatgattaggaagctaaaagggaggtatggcttccatggagcaaataattaacctctactatattggtattagaagctaatttttgaaatgtaagtttcagtttaaaaagatagtttgaatttttcaaaagatgttaagagtggttgcataaaaaagaactctttgttgaggatggctgaatattgatttagtgaatggctggctctaagctgaagtttgtggtaggtgaggggtgtgaggattggctaatctacaaagaatttcagtaattgcatttgcggttacaggatgatactcagaaaattatttaatatttataattctgaatattgtgatatattcagaataatttttaaaaacttatacaatttatgaaaagcccatttgaatacatttttacctttatttatataggtaaaaatttatgccttttaattctatattctaaatcttttagccattttactatttctcaggtttgtgaggtttttttttgatgttgttgttgttttattatttttttggtaatgaattttcatgagtatatgttaataagtaaacagttgttaattgagacagatttggaaattcattttctagataaaaaatatttttatcatctttgattttcaattaaattaaaaatatctagatgaaggtgaacaaggtttaaatattgcaaattttatttaagaatgagtcttcctctctcttgtgaaggaaagagattgttttaacaaaccttaagtgttaagatgatctctatttcaatttttattatagggaaatatagacattaaaatatctgcctatatcacaaagttgtgagaatcacttgaagttctaaatgaatgtactttttgaaaagtagagttctatggaaatgtcaaagttggcatctgatgcctattaatttggtccttaaagcactctctacgtttccctagttgggaatttccagatatgtgatagaatacttcatcagatgtttagtggttttcatttgcttaagcttattcctaaactactgtccttctgctataccttttacttatatattttttctaaattatttcttagaatcaggtttttttaaatagtttttcttcagatgagaaatttaaatgtgtaaaagagaaatcatcttgtatttaagtctccaattttcttttgagtctttgggcaatttctgtgctatttatagagcattatattgacattcttttcattgtatatatccagaagttacatatatataaaacaaaagggttgtacttgacaaataggttattttacagtaggaatttattgacaattgtttcatagtgtctataagatgactttttttaaaaaacagaatatattacttagtattagaaaatgaacaataatattttgtcttatgtctttgtacgtattttaaataaaaataagcagagtttaaattctgaaagtagttgagtaagctgtaacagtctctaaatcatcacccacattatgttttcaaaaacttatttccaatgtactttatgaaacccaaactatcaaatagcataactaaggaactcagtaaattagaggaaaggtgttaaaaatcttgaataatatttcaaggaaagtcggtgacttttaagggaaaaaaatataataaaattgttaccttgtagaaatatttaaggctttatgaaggtttatttctgctaatattgctgctgaccgtgttttgagtagaaaatgaatactaaactaacagagctcaatgctgtaaatatagtatcaaaaaatggagcaggtatctatcttagcaaaaaataaagatgttaggtttgttgactgataaatggaagaaggagaaaatttgaatgagatcgtaatgcccatattgtgtcaatgctgtgaatctgttatgacatcagctttgtagaggaaccccgccttgcagaaattaaaattctcttaacaagtaaattgctgtgtaagtatacccctttttgccactgtaatttgagtagctctgaaacataaagaataaataaaaaaacaaaaaacaaaaacaaaaaaaaacctcttggccgggcacagtggcttacgcctgtaatcccagcactttgtgaggctgggccaggcagatcatgaggtcaggagttcaagaccagcgtggtcaacatagtgaaaccctgtctctactaaaaatacaaaaaattagccagtcatggtagcgggtgcctgtaatcccagctacttgggaggtgaggcaggagaatcgcttgaacctgggaggtggaggttgcagtgagccgagattgcaccattgcactctagcctgggcaacagtgcaagactcagcttcaaaacaaacaacaaaaaacctcgtaatgcctttactggcaatatgttaactggacataccaaaatacacctagcagtctgaggatttaaaatttaaagtacattaccaaagagaatcaggggaagagtctctataacattttctggtttggctttaaacttactcttctcctcagggttctccttctttcaaaacctccaccccttctatttgagaagagaaaaaaaaatgtgatggcctacttgctgctgaggctgaatactatagtcatataaaaaaaaacaatgaaaaagtaaaacacaggaacctcaccaatatccaggggattactgaagactgcagttacaaatgtttaaaaagaaatttgtctacagggatcctgaaattacacacccagaaaacaagtcattgtactatgaagtgattagtatatacaaatgtatgatagttccccaaagaggctacataggtgctgaatgataagtaactgaaagtttgtctttcactaaaaaatttaagagtagtttatactaaagctatgttaaaaaaaatctctttgaacactttgcacaagtttttaaacctcaaggattataaattggaaccgctcgagactcttagttttaattagaatagtacccagatcaaaataaagcaattatttgatgactcagtcaagacctgtaaaccaagatatgtttcataaacactttgctatttctccttttaataagtagagcttagctttctttcctttgagtgtgggtactgtctcatttttaattaagagtataaggcggaagtgatgatatgtggctttggggacaaagtcataaaaagcatgagcttctttgccctctcttggatcactgtccttaggcaaagccagctgacatgttatgaggacactcaagcagcccagtgaagaagtacacgtgggaagaaaggcagtcaagattttagcacaagccaacagctataaagtaacctcaagggatactccaaaccagaaccacccacatggctgctcccagattctagacccacagaaaccatgtgagacaataaatgttttatggtgctaagttttgtagtcactttttgcactgctatagatattaattcatatgtttacccacagggcagtcatttatttatgaatagacttagaagttcaaatcttaatagagttaagcaggttatgaatgagtaaagtatgtcaggggtgataaaaccaaatagctctaacataaatgttaagtaggatctgagtctaggctgcaatatctgaactagcttgggagtggcaggaattatgatggagtgggaaaaatgaaagtcccacttatggtagaacacctctcagctccacttatttttgccataaggaatattaaccatttgtgacatatcttttatttttgaggagaaggaagaaatacagatatttatttaaaatctcacaatttttaattattagcaagtaatcttttttaaaatttttttttaaaaaaataccatgcaaactaacctactatataggctagctatgaaagctgtgaaggctaacactataaaagccaaacactctacaaaaaaacaacaacaaaaatctctacaataaccttctgttgttgcttcagcacagagggcagcaggtgtcacctctggtttggtcatcatttatactggtgacattgagttactgagagaaaaggatggaattaaggcagccaacacccaactgtaccactagaggggactttagtagaaaaaaaaaagtcacctggtagagctggtatagtatacagaggagaataagccccttctgtggagaacaggatacaggattttctacgaaggttttctagtggtgtttgaacagagcttgtattctgcctggggtaaataaaaattaaggacatactaatgtcaggtgtaactattatttgagttaaactcctaacaaggcaatgtaactacttgttgtagaacttgcacccctaacagcaataaatatctattgccattcattctttcattctttcagcaagcatttatcagtgctcactatgtgccagctgctgatatacatggtggcaagaatcccagcttgcatagtaacatggaagacagaccataaagcagataaatgagtaaaacgtatagtatgatagttgaatattaagggaaaaaatagcagatcagggaaaatagataaggaagtttatggggtgaaatttgaggctgagtagccaagagtttgccaagacagtgacttctgagtaaagatctgaagagacagtgagagaagattgaaggaatgctgtgtgaactaacaactgcttaacattttgctgattttacagtttttatattattttttaaatgttttgttttttaaaaaaatataaaacataattacattaaaataaatcttcccaggtgataaggttaattttccaagatagaaatcctctaacattgtcatggctcaaatagtgtattgcctgtgcttctcctattctccagtgacagtgcaatgactgtttaatgaggactgttaacacctttcaagttgctagataaaagctgaccaacctatagctctgaacatcaaattcttctccatttttatttttattttattttattttaatttggagatggagtctcactctgtcacctaggctggaatgcagtggcgtaatcttggctcactgcaacctccacctcccaggttcaaatgattcttgtgcctcagcctccccagtagctgggattacaggcatgcgccattacacccggttaatttttgtattttcagtagagacggggtttcaccatgttggctaggctggtcttgaactcctgaccacaggtgatccacccaccttggcctcccatcttctccatttttaaagatgatcttgtcagttttcctaactgtcagagctggcaaatacaaaagtttctgctttctaatatacagtaataactagttgctctaaaattatattgacaaccttttctcttagatattttttctaagtattttgcaaattttttttatggaattttcttttataaaaatacttctgtttgaccaggagcagtgactcacatctgtaatcccagcactttgtgagctcgaggcaggtggatcacgagatcaggagttcaagaccagcctggccaagatggtgaaaccccatctctactaaaaatacaaaaaaaaaaaaaaaaattagcaaggcgtggtggcgggtgcctgtaatcccagctactcagtaggctgaggcaggagaatcgcttgaacccgggctgcagaggttgcagtgagccaagattgtgccactgcattccagcctgggtgatagagtgagactctgtctaaaaaaaaagtaaataaataaacacaaatttaaaaaaacttctgttttatgagataatgatatggtaaaaacagtttcctacattattttaaacgatttgtgctataaaatagtatacagtcagctatgtaatgttttactattgattacctagtattcagttacagggatttttaatttttatttatctttttcctcacaacttttgacattttcctggtcactaatgcctgcaggagacagtgaggcgaactcaagttaatcaagtcactgttcagtttttagtgcctttatgaggagcaggactttaaaactattgactaaaattaggctttctgggttatttatggattttatttaacatatttctttcccttctgcatatgcagtttgagagcagactgcatatattgtatttacactgaagagaaagttgaacaaatcaattcatggagataagagaaaatacacatgtaaaacaaatattgtcacagaaacaatagtcttatttcttgttgaaaattatgacggaattcacgaaatagaaggatgatagcttatctgtattttgtacttttttagtggggcatgaaagagctggtgtaaatggatcatagctttaaaatagaactgagggtatgaataatatttaaggaaacttgaagtcagtatgtctaaatagagaatcactgacaattatgtacttaatggtcagcatatcatttaatcacagatgctcttgacattgtttatgaaaatgagtcatgtagtaatttgtcaaggtcaagagtttgagccctgggccctataaggggtatgagtttgaatttaccctccacccttcactcacacctatgagctatttattcattattctctgctattctactatatgcacagttgctctcatttatatatcattccgtatatgctttttgttgttgtgttgttttatggcgctaaatgatctttggaagttgtatttgccatgatatttgtaggtaaggaatctaaaattatcatgacatatactacttgagtgtcaaggtgtatgcatatatatatttttatttatatatttgtatgtcttaccttgggctgctatagcaaattaacataggctgagaggctttaaaaacatcagaaatttatttctcacagttctggaggctggaagtctgagatcagggtgccaggatggttgggttctggtgagggcccatttccagattatagattgcttactttttatatcttctcatggaaacaaatgagagagagaaaagagagagagaaagagctctctggggatccttttataagttcactaatttcattcatgaggtctttaccctcatgaccaaattaccttccaaagatcccactcttcaattccatcaaattggggattaggatttcaacatatgaatttttgagggacacaaatattcagtctattatatgtgtgtgtgtatgtatgcatccatatatatatgcacacacatacgtacacaagcacatatataattcttatctatccattatatatatctctttatctatttctctatatgttggtgcaaaagtaattgttattttgccattaaagttttaaccttgcatgatttttatcactaatgtgttgatccatccattagtgatcaaactattagttttaaataaaataggatttagttttaaataaatgattatattggttaaagcaatacaaaagaacataaaaattacaaataaaaaagttcatttgtgaagttatgctaatcagagttcattttaatctgtttcataagttaggcaaaagtatttcaacttttagttaagaatttggtgggagtttacaacataaaactgcttaatttgtcttagaataggtttgtgcttcctataaatatctgagtagctatctccaacaaccatcaaatcttagaatcacttgcaattggctatcctcactatgaactgaaagaaactttgagtcacaggtaaaggcaaaaaaaccaccagcctttaattacacaatttccatagatatttaagctctctgctaaatttttctatttatcacaattttaatatattatactattgacctgtttcaagtggcaattttccaggatgggattaataagtaaacattaaaaagagattaaattttggctactatggggatcagtcaaaaaaggtgggtcctgtgtgtatttgcagactcatgtcacagtctaataatcagaaaaacattggctctgttgatctggttatgcacacaacatttgttttcaatcaatgtgaaccaaatgagctcatcatttgtcttttagggagcccttgaaaggctttagcaaacataacccttaaggacatttgttcatactttctgtgggctcacctcacaaacttgaagttatcacaatagctgctatggagattcaaggcacatgggtagtttacccatgggaaagtcaaggctgtcagattaaaatactttcagacaccatctgcatgtcagagaatgtcatgttcagttgctcaagaatgaatacagtgttcatatttttggggattaaaggtttcaaatgttccctctagacattgtatgataaagtatttacaattgtttaacctctccgataactgaaaaaaatgtgagttacagctaatggcaaaaaaaaaaaaaaaaaaaaaaaaaaaattagtttttacctacactaactcttaagctttttcagctgaattctcaatgataagcttttaaaatgtatgtttatttcttctcagcaaaatatcacttggtataataaataattttagaactttaaaagtaaaaatctaagtgctcaacttgcacactttttatgaattttctaagatatacttaatatgatacacttaaataagagaaaaatttaaaaaatacatacaataaaaaacagtaaaattagcatacagacatcatcaaaagccttttttctacttcttaagataaattattatggctagttatcatggaatctatggaacattataaatgatggcaaatgacaggttctgggattgatgcatttaatcttgttatcctgaaactgaacactcgcagatttacactgaaatctgatttgaaaggagtctatatgctgtcttattataacaaggtggggagtctgataatttgaaaattccttacctcttatagttcaccttaaggagtctcttctgtttcctacaatgcaagtccgctttacatgttgtcaagtgcagatttttttttttcaaagcttactaaatctctcttcccctgaatgtaaaaagcagctgaaacttcaagtttcaaaggaatctttgcttttcagaagaccttccttccttccctccctaccttttcttctctcatttaccccactctgtctgccctaggctctccattgcttttgtcatatctttctttctttcttttttttgggggggttgggggggtgggggaggggtttatttctttcctttatgagagaaaacaaactttcaatttctatatttttattttctgaaagtaatttgagtcaatcagattctgaaatgtcctttacttctacaatttgtaaactatgatctacagaaacctagaaatgttatagaaatacccagaataccacaatcagtgcaggtctgtgtttattgttgatgttttgaggactgggggttactgtgagaggttttgcattatgttttgtctaaaataaaagttccagccaggtgtggtggctcatgcctgtaatcccagcactttgggaggccaaggcgagtggatcacgagatcaggagatggagaccatcctggctaacacagtgaaaccctgtctctactaaaaaaataaataaataaataataaaataaataaaaatagccgggcatggtggcatgtgcctgtagtcccagctactcaggacgctgaggtaggagaatctcttgaacccgggaggtggaggttgcagtgagccaagatcgcgcgccactgcactccagcctgggagacagagggagactccatctcggaaaaaaaaaaaaaaaaaaaaaaaaaaaaaactttcaataggactaatactgaccacttttattcagggcttaagtgcttaagtattatgaaggacagaagagagttgtaagataatgccatggcattagaaatgctgatgaaaggggaaaacagattgatacatataaaactgatccgtgcaaatcattgtataaaaatgcaagtaagacttccaaatgtcttcagagggggacttcatgaggcatgtaggattgaaattggccctggatgaaggctagaatgggaagagacctagaggagagacagcagtgtttgtaagcacgtgaatgtaagagtcagggatggtcccttataaggacagcttgactagattgaatctacttaactaagaattcacatatgcacctctctttccattctgctaaaaaagtgactcgttgaaaactgcacctttgagggtttttaaaaatggtcttgaatttataggattggctctggtcaatgcctcccttttttaagtaacaaataaaatgtaatgccctgactgtaataaaatgagaaataacagcaaagtaatttaaaataaaaaaaatcaattcaatttacaaatgctttgggcatactatatctgaagaaatagctgctttttctcatataaagcatcactagaagtgaaatagctaaaaatgcagactgatgcaggtatgctgtgctgttagctctaaaataacaagtggaattgatgttgatggcttgatttttctgaagtggtgaacaatttttggtaacattttgaacaatataaagaacaattatattcgtggataatttagtatttcttaaacccatgtagaaaatgctttgtctttagatataaaatagagttacattctgggttcagatacctgtaaacaagatttttcatcaatataaatgtccactggggtattcaatgatgacataggaaataggacaatttttattttcagtgctttgtaagatatttatcatccttgactccttctccactaaatgtcagtaatagtccctagtgattttgatagccaaaaatgaccttacaaatttccttaattcccccaagagaatggaaaccttccattgacaaccactggaaaattgcttgttgagtagaatgaaattgaattgtcacttctaaagcagctcctctcgtgattattttttttctatagcggttctatagtttctcccaagtgtttgccttaagctcagagggaactggggccagtttttttccttgatcctcaaatgtatttgtatggctaactttatttttgtatttgatagccctgtctttttgtttgtttcattactgttgttgtcgtttgttttcctttcacactctggttaggaacttaacttcttgtcggagctacagcagttgcctcttaccttcctctcattctctctatctccaatctgcaaactttcaaaatctgctgtattaggacctgctgtggcattacctacttagccactttcaaaggctgaaataaatgagcgttactcagaaatgctcattttctttcattttcatttactaaatcttgttatcacagcattattagtttcaccttataaagaaacttagaatcaataagatttgttaaaatccaaagcattattagcattattagtctcacattatagacaaaaaaaaaaaaaaaattagtaagatttgttaaaaccctgtcctgtaagatgaacgctctgggattgtgactcaagtcaagtactgttttaccataaggaagagccttgctcccgtaactcttcctctcattttgttctcctctatccctacttcagtcatgtgcactacatccgggtaaactgttccttctttatgtaattatgccctacttatttctctttgccttgttgttccttgagtgtgttccctgttcattagctgccctaatgggtgaaacaccatccacgtttcaaggctatgtctgcttaccccagtgtgattggcgatctttctcttctctgaatgcattcgtattttcctaatacagtggagtatttttgtctcctaaaataatcatgtacgaacaggtctcgcttctccataatttgggaccacactttattcatatatgtttcactcataacacacagcaagacactttatatttagtacatctcaataatagtaaaatatatgaataaatagaataatggccacacacacaaacacctgccactgtgaccaaaatatattttcagcacaagcagacaaatgtttatgtaaaatggccattttatgtaaaatgaccatggccataaatatattgtagaatttaagtatttattgaaacacatattaaaataaaaagttaagatattaggatttgaattgaaatggggagaaaatgagtaagaggaaagatgtataaaatatagccaatcatttctggcatgtactacatgtacatatgtatatagaaatgcaaggaaagaaggaatgtattggattgtgtctgttttcatagaaaataaatagcttaatggaaggaaaacaaaaacaaaaatttaaactcacaccaagagtaaaagagttaaacaaaacaaaaactttgtagagagtattgggttcttaaaggtagtctcataaccaggccgaacaacattattatttttaacagtaataattgttagtctaaatttttaaaaaacattctagtatttaatttacaattctatacttgtgtaattctcgcagcaatcccctaagagacgtacccttaacattgcttattctagaaatctcagctgaggctcagctagcctaaattaactgctcagttacatagttaataaatagtgcagcaaacttttttttaattattatacttttaagttctagggtacatgtgcacaatgtgcaggcttgttacgtatatatacatgtgccatgttggtgtgctgtacccatttactcgtcatttacattaggtatatttcctaatgctttccctccccgctcctcctcccctatgacaggccccagtgtgtgatgttccccttcctgtgtccaagtgttctcactgttcaattcccacctatgagtgagaacatgcggtgtttggtattttgtccctgcgatagtttgctgagaatgatggttttcagcttcatccatgtccctacaaaggacatgaactcatccttttttatggcaatatagtattccatggtgtatatgtgccacattttcttaatctagtctatcattgatggacatttgggaattccctgactccttgagtttcctggctgaggcaatgcctcaccctgcttcagctcatgctcggtgggctgcacccactgtcctgcacccactgtccgacaagccccagtgagatgaacctggtacctcagttggaaatgcagaaatcacccgtcttctgcatcactcaggctgggagctgtagactcgagctgttcctatttggccatcttggaacctcttcgtccgcagcaaactttttaatccatgatgtttagatttgaaagcctgcatttcttctaggaatctgtcctatagatatactaagttatatatgcactgagatatatgcaaacattgtcctttgcagtggtatttgtaattgcataagtctggggaaaaatctacatctgcattataaaggactagccaaatgaatcatagaatatctgtaacagtgaaatattatgcaggaattaaaaatggaattgtgttagacagcttgggctgccttaacgaagtaccataaactgggtagattaaacaacagaaatgtattttttcgagctctggaggctggaaagtccaaagtcaaggtgcaggtgaatttggttcctggtgagggctctcttcctgctttatagccttcttgacgggttcttacacatcaagaaggagaaggaaagcaagcattctggtgtctctactaatcccatcatgatggcctcatactcatgacctcatctaaaactaattaccttccaaaggccccatctccttagggcttcaacatgtgaattgggttgggaagggggacataattcagttcatagcagaagtaagactgtatattaatttgtgttacttttaaaatgtattttaattgcaaatatgttttaaaagtctgtatagactgctccagcttttatcatatatatgcgtttatttaaaaaaactttaatatgtataaattaattatatattttttaaccactgtgatgcagaatttatatcagtaactgttatttacagagcatctactttgttccggataacttacacacattagtgctaatagacatagtaactgtgtgatggagataatgcgactgtattacctctgaaaactggattgatcacggtcaaaactgggtctctaacataagtctgtctatttccaaagccagagttcttcccaatacaccagtgatgctcagctccaggagattttgctcaccaggagacatttggcaatgtctgaagacattttaaacaatactaactgtgcagggaaaagggggttgctactgtcatctagcaggttgacaatatgatgctggtaaatatcctacaaggcacagggacaggacagcccccataacaaggaactatttggggtaaaatgccaatagtgctggggttgagaaacctgcactgtacaaaaaataccccttctaaccttcatagccaattgcctctatgaggcctgaaactgtgactctgggcccatcattacaaattttggttaacaaaaaaacccttaaaaaataaatgaaagagagcatttggtgtttataaaacctgatggtataaaagtttcttgtaaagtgggcagagaagggtaggaagagaatatccttcttttctgtttatttttttcttttaaatgtaatttaatcaagagtcaggattttcttcatttttatatttatgtactgttataatactgataacttatttatttgctctaattttgatttgtttactgattcaacaatttatcaagtgactatcatgagccagtcactacttaggttctaggaaaacagcagagtataaaacaggtaacaattccctgtccttaggtagcttatattcccagtgggggaaaatagcatataagcaaataaacaaatcaagtttatcagatggtgaaagatactaatggagaagattcaagcagggcatatgattagggagtgtagagttgggttaggaggaaggagcctgaaaaattagaattttaagtagagaagatatggcagttttcactgagacgtgacagttgagcaaaaatctgaaggaagtccggagtgagtcattcaggtacctgcgggaagaacacataaggaagcgaaaacaggaaatgcaaactgactattttgtcatatttttaaacacctttgcatttagaaggagaggcttatttttttcttttttaagtgccttaggtatagaacttatttccctctctacagaacctttattctagttaaaaaatagcttatgtttcatatggtttcattgctgccattaaagtattatactgaaatagattacataattaatttatgcatatatttacaatgagcaaaaaatagtgatctataacatttattgaaagcttgtatctttcatgtgtataagattattaatgatgaaggaattagttctgcttcatgtgttttgctttatttccaatttattatacccaacgttactattattatgcattttaataagagaaatttctagtaaatatttcaagctgttatagttaatgtttatagaaataataaactataaactagtcatataaataaaataattatagttacttagaacaaacttagctttgaagaagtttgttgtttcaatttcaaatattctaaaattaaagcgtgaattatttatgtttatggaatatagcagttaaaattatctagctgtggagaaattggtaacttaccttctttaaaagaagattgggttttggggggaagaattatctctagacaccagttttctgagatcatatatttatgaaatattactcagtagaaagcattcacggaatatggactataatgcttgagaatagttctcttaattaaatctttaaaataatttagaaaaataatcccagctgctgcctgtctcagggattgaaacattaattttcttagataaatgaataatcatcagtacaattatattaggtattcatataattattataatatttatacctgacttttgtgagaatgtcctacttaagataatacaaataaagagaagcatgacaaataacatatcattttaaaagatttaatggtattctatttacttaaatattgtgtttacaaccacttttcagtgaaagatctagcgattaattgttacacttgtattgcactttcatctgtaatttgatatatacaatccaggttattttaaatgcactataattatgctaaatatcttaggtgattctgctttcaaatcatacttttcaaaagagataagttactttgcagtgcgcactgagcaatgtcacttagttcaaggaccttcaaatacatctacctaaatgttctaagccatcagtcttctaattgccataacactattcattaaagtaacagcaatatatgaagtatatccaggcaatttgcccagcactaagtacagtacatagttgtcttctctaagtactcaaaccaccattaatgaaaagtaattgcctatcaaaatttacatgaaaagtactatgtgaaatctccaaaggactatatgtgatactcgtccagcaatttttgtcactttaaaatactatgttccaacagattgctcctcttaatgctaattacttagcacaatggataaatacaacaatctcaaagtatatcatactactatttttgtaaccagattataattgatgatcagaagatggtcttattaacataaatggaataattaaaccataccagctatttcatacttaaaagcattaaatagtgattgtttcttctttgtaaactgctaaattttaactttatctggaatcattttcagggaaaaatacattgttcactatttatattatttaaaaatgaacgaatttgaaaatgtgtgtatgtacatagaaagatagacatagatagatagatagatagatatagagcagggacataattgttacatattgcccctatgtctcttctttatttaaaaaagaagtagtacagtgtttagagtggaaaataacagagtgttttatattaataaaagatgtttgagttaatataatcacaacagcattttaattagagtaagaatataagaataaatcaagataactgaagagattactcctgaagtctgctcatatactccaggtattatctcatgttggaatgtagtggatatcttggaattgtgtcctcatctggcgagtttaattgtcttaaactgaacttaatcagatagaagccctttttactcagcaattttattcagcccaatctagacttaggtagatggcctcttgttatagaaattttgggggctatatatacctagatttagatatattttaaaaataatgagtgcctgaatatcattgtgtttagacttgtttttctctcttttcataatcagtatcagcgttatctgatatggtgtaagaaaagtattaaacattacaactttgaaatagacatctgtatcaatttaattctgattaatattgttccatatttaaactatagccattcaggaaatattctgagtagtctaggataaaagaagagctcataactatgtgcacattttaaaaatactatgctttaaggtttttaattgtgggtgttattgttcgtagtttttatatagatatatcaaaaatgaacagtactcagaaggccaatgatgagattattttgtgctgagttgactcctaataagattatagatgagaggaaaaaaagattctgttatcttaccatagagataagtgcattgtctaaagctatgtgatgagatttagaaagacaggtaggtgacacagaacctttacaagaaggctctttagttagtataatagtaagacaaataatacttgtggcttggtgaggaccgctaagaaattagatttaaaaaaatcattttttctcttaaggatgtatttgatctcattatctctagtattgtctttaattgagaaatatataagacttttaaaaattgaaaactatttcttatagttccattagaggaacagtagaatatataaaagctccatagttatagaaagtggccggctgggtgcggttgctcatgcctgtaatcccagtgctttgggaggccgaggtgggtggatcaccttaggttgggagtttgagaccagcctgaccaacatggagaaaccccgtctctactaaaaatacaaaattagctgggcgtagtggctcatgcctgtaataccagctacttgggaggctgaggcaggagaagcgcttgaacccaggaggcgggggttgtggtgagccgagattgtaccattgcactccagcctgggcaacaagagcgaaactctgtctcaaaaaaaaaaaagaaagtggctatataacaaataccatgtgagtaaaatttcaatgttatttaaccatattctatgctttggaaattcatctggacagctcccttgaaatatgtgtgtgtgtgtgtgtgtgtgtgtgtgtgtgtgtgtgtgttttaaatagctaatatgcctccaagtcatttctatgcaaattaaatattgtcatttcatttatttttttctcatattttattttaccatcaagatgttttatgaagaattccgtttatgagagatctagtgaaagttgaagaatacttggtgtatttcactgtgtgcctgtctgatattttagctaggtaattacctatgtattcacatttaaattattttccttttcttggaaattatatatattgtgattatccatataaccaaaatgatatttccaaataatttactgccctatctttaaaacaatttttaaatcgttaagatgactatttatctttaaattccaaatacaatgaggaccgtatgtatcttcaaattcagaattatatttcctattcagaaacattatattgtgatttatttctaatgtactgagaacacaactagtagatttccaggtataagcataagggttcaatgaaatgataacataacgttctttcagagtttttaaaaaatggccaggtatgtttttgtttattttataatttacgtataaaacataacattcatggtgaaataaactataaaataaaaaattataggacgatactcactttataaactacatttttttttcattttctgattcaagagtacgcttctagctagcaggtttcctgtccaatttaaagtgctgagttgctatgacataatattttggtaaatgattattgaaataggcaactttttcccatgaaataagctataatgtggaggttttacatgtttttatttttaagtgaatatatcatatcaaattatttgtgaaagatagggacatggcaaatgagaacactaaagatcattcatttgtgacaatattcatactttaacctttttcttagtaatatatttatatttacacccacatatatatttctagtcagtaaattttacagtattatttatttgggagtgtcaggagttgggtagtagtgacagcaaaatgttcatattttaataataaggacagaatagtaaattatctaagataagagcagccatttgaagtagtttttaaaatattgcgataatatatagtgtgctcaaaccagattaaagtgctagtttgtatattctcatctgatatttaaaaagttgtttaagaagcacactgtaaaaggatttagattaatcaaaatcaaagtcgaagtcatataacattaatgctaatgtagtaaattataaaaaatggcaaaataccaacatttaaagatatcagaaacttttattgtagacttatgattctacaataaaaaaagtttaaagccttacttaaaatggctaaaatttatgtcatttaaaaaatatatataaactgcctttcacttttaatttgttataatcattggttttcaggtcagtgaacatttctacaatatcattttaatgtttacgtactactatactgtatgcttatagatattttatttaaataattacctatatgtacacatttattttcctttattttggaaattatagatattgtaattatctttcataaaactagttattttcagagcttggatacaatgatagatgtagcatttctaggtcaaatattttacacatttttaaggctttacatcaatcctcttttgctctctgggttactatacatattctgtcatttaatgaaagcactactattcctccttactctctctccacttgaaatacctggttagacttgaaatatctagagaaacatctggttctttttccttatttttttctttttaaattcagcatgttatgattttcagaaacttctccatcatgactgccatcttctaagaccgtttctcattttttagattcctccaagaactgaaaaccaaaatctgaacacaataataaagacatatttagaacaaggtctactgaagttaatatttcctaggcacgattatatatggaatttagttaccaggagcagtgtgtcttattctggttatctcaaataatgagcaaaagtgtcttgtataaaaatacatatgacccgaagataaaacaggattgtcaacaaaatctaagatgggaaattacagaatggtgtcagggagggaaaacttttcctctaccctcttaggttcaatgtctggtggcttatgaattaaactaacaaaggatagattgacaggagaaaaggcatacgatatttattaatattttatgtgtatagaattcacagaaaagaaggaaatatcaaagaagtagtgagacttgtggcttaaataccattttaacaaagggaagggggtttgggcttgaaaggatgaccactgtgggaaagcgagtgggaaatatatggggggaattaatggaagataagggttattttagtaaagtttgtttatgcacactcatctcagtgcctactgtcagggaatgagtcattctccttttcctggtatgggagagagaacacctacacaagggaaatttatatcaccttcagaaagggaaatttacgccctactttcaggtagaaaaaaggaaggcaaagaattcttccttcatttgctgattctcaattgccttcagctcaaaataattcttttaccaaagtggcatgttttgggaggatatcctgattcccttcaatggctatgttcatagagagagacctggaaggtctgatacaaggcaatctggtacaaggcagctctcagaaacttagcagtaaaaaattatgaatagttggttctgactgactcattgtctattatggctccttctggcccctttggaaatggctagaagttattaaaaaattactaaaaaatatagacatagcacttggttgaatttaaagaggtataaccagagagtgcagagattgccattctatcaggacaaaataacatcatattcattaatattcacattactttgattccaagtcacaacctgcctagaatgccggaaagtccaatcttctcttttctttttaatttaatttaatttttaatttttttagagacagggtctcactctgtcacccaggctagagtgcagttgtgagatcatggctcactgcaacctcaacaccctgggctcaggtgattctcccacctcagtctcctgagtagcttagattacaggggtacaccaccaagcccagctggtttttttgttttgttttgttttgcttttagatggagtctcgatctgtcaccaggctggagtgcagcggtgcaatcttggctcactgcaacctctgcctcctgggttcaaacgattctcctgtctcagcctcccgagtagctgggactacaggcgtgcaccactatgccaagctaatttttgtatttttagtagagatagggtttcaccatgttggccaggatggtctcgatctcttgacctcaggatccaccctcctcggcctcccaaagtcctgggattacaggcatgagccaccatgcctgaccaagcccagataattaaaaaaaaaaaaaaaaaaatttgtagagacagtgtcttgctattttgcctaggctggtctcaaacttatgggctcaagtgatcctcctgccttggcctcccaaagttctgggattacaggtgtgagccattgccttggcccaatcttttcttaaggtaacttgcctcagagattttgcagggtgattaaaattgcttactttgatttaaaattgatcttcccattgtttacaatctccaagaggaaaccaaggctacatcctgaaggaaatcttaatctctgaccttcaggtgctccctcttccagacgggcctcactacctagtagaaggcttgcacccaaactcagaaatgtccccatttaccaaggctgacatagaaggagcagtacaagtctgctccaggtttactgctgaaactcaatgtcagcagctcaaagtgctattggtacttgaggaaaaagtgaggaagttctgttctccagcgtcacacttacttaaggatataaaaatgaaactaaagagaaaaatccatgaaacagctgcccaggctctggcggataataattctaagtggtcagcttttcaattttttctctctctgtcatttacacatagctgtttttgcccaaagcatgccctgggcaccagagtgactaaatatggggcgtattcagtattagccccaattttttccagaccagaatttccaccagaatattgagcagtaattcatcattatatatctatgttatacttttgcagggagctgaagatagaggtgaaaaaggccactctaatccccgccttcatggaggttgcatttggttgaggaagatagtaaatgcataaatatatacaaaaatgtcagacagagaaaaatggtgtgaaataaaataagagagcttcccagaggcttttcctgagaagatgctatttgagcatagatctggatgacaagaaagatcagccgtgtgaaaatttctaaggaagagcttaccaagcagatgaaatagcaaataaaaagtccttggccgggcgcggtggctcacgcctgtaatcccagcactttgggaggccgaggcgggcggatcgcgaggtcaggagatcgagaccatcccggctaaaacggtgaaaccccgtctctactaaaaatacaaaaaattagccgggcgtagtggcgggcgcctgtagtcccagctacttgggaggctgaggcaggagaatggcgtgaacccgggaggcggagcttgcagtgagccgagatcccgccactgcactccagcctgggcgacagagcgagactccgtctcaaaaaaaaaaaaaaaaaaaaaaaaaaaaaagtccttaaagctagatcgtgcttggcatgcctcagctggtatagctagagtgacaggagcttcattcagaaaagaggaggatcaagggagaaaggtcctgaacaatgtacccactatagtaaaaccttagtacttcactttcatagccagttgaagggttaaacagaggagttatagaacctagtttagattttaaaaggagtattcagcactgtgtgccaattgctctgttggggagaactttaggagttcatgggagagactatgatagcttggactagtgtggtagcaggggtaatggaaggcaccaagacccaggtaagtaatttggaggtaggtaattggaatgtattgttaaggtaatattcacactcctgcttcaatgtaaggtgaattttctctcagtggctcccgttttgcttctcagactggacctcaaaaatgtctcagactcttgttaatattttctacagtactttatcctgccctgaataagtaagttgatatgggggagtatattagtctcctagggcccataacagaataccacaagctgggtatcttaaacaatagacattatttttcacagctctggaggcttagaaatccgaaatcaaggtgttagtaggtttggtttcttctgaggtctccatggctagcagatgggcacctttttgttgtgtcctcacagtcttttctgtgtgtacatcactatggtctctttttcttagaaggatatctttcctgttggattaggatccacccatatgacctcattcaacttaattatctcttttaagactcaatctccaaatacagtcacactgaggatagagcttcaacatatacattttgtggggatgcaataaagtctttaacagggagggttatcacctaaactaaccctctttagactttgcttaagcagagtcttcttagcaaagagagaaatgattcattactttcctaaactgagcatatgtaaatgtcaaataaagattaatttttttaacattcttaatgtcggttgttatacaaatagagaggttctaatattgtattgcccctactctaatatcattttactggagaccactgcattacaaggatggccatgagactttgcaagtgattactataggtaatatatattatttttttgccaccaacagtaattacactgttaatctcaaccagcctccatgaaaatgtatgtccctagacacaagagaagtagtgtaaaattatagaaaagttgtgcaaatccatccatgatactgataaataattccacacacattcttattgatagtgggtggaaatatttttccgagttatttatgtagcagaatcagtatagtcatatgtaagttttagttttttgttgttgttgttgttgactcattcatttgtttattccatatagctaccaattattgtccttaccatttgagccatttgactaaataatttacatattaaattaatatggtggaatgtttctcattttacatattagaggactaatattaaagtccaagtaacttactcatgatcatccagagagtaagtgtcacagccaattatcacaccaagtttgtgtgcttccaaactgcattaccttacctaatgtaactttcaaccaaccttgaaaatcacccatgtgcctggttttggagtatgagtggaagataaaataattaataaaggcatatctcctgccctgaagaatcttatgttttaggtcaagtgtggtggctccacacctgtaatcgcagctttttgagaggccaaggcaggaagatcacttgaggccaggagttctaaacaagcctgggcaatataatgagaccctgaccccacagaaaaataaaaaagaaattaactgggcatggtggtgcatgcctgtagtccttgctcttcaggaggctgagctaggaggattgcctgatctcaggaggtggaggctacagtgagccctgattggactacttcattctggcctgaatgacagaatgagaacctgtctcaaaaaaaaaaaaaaaaaaaaaaaaaaaaaatcttctgttttaaacaggaagataggcatgtaaataaataaagtcctttaagactatgaatgctatgatatgattctacacagaccacaaacccataagggatcaggtgaatcctacctcttggggactagtaaactttgcaaataaagataccatttgagctgaatctggaaatatgtgtctattattcagataatgggagtagaagtgagtggagggaatagcagtggagggaaatattccagatagaagaagtaaattgaggccagcacaaaatggcacagagatgtttgggatttatccttttggaaaccagaaatactatcaactctatattaacccattacctgggtagtggaaaataggaggcgagcaaggataaaatgtggttcagacccacttaatcccagtttgtgatttaagatggatatttaatataaatgtattaaattaaaatgtttaaatagtttgctctgttagctgagtagttctttccttcttcttccccatcctgctcttcctcttcttcctttttctaatgaaaataattgtaggtaacatcagttttcattgaatgaactctacattttattttctaaatatcccagcaagcagtcattcagagctgccttgtttctgtcagctaactcctcgctctcactgtcattctccccttcacattgcacaaaactagttcgctggcaacagtcaagccatcagcttgggaattaaattacctgccattctccagttcttctctgtgtaaccctagactgccccttcagctctccatgacacaagtctctcaatataacaatgaatggaaagagtttagggccatatctgtcagttcaaggtcacaaaggcttgaaagcaaattctgggctttgttcttcaatgctctccatcttaccttcattgtcctccaaattctctgcttaagaaaaaaaaatcttaggaaaaggcatagaaaagagacttctattctgtcactgccacaagaaagagatttttccagagagcttcagacaaactgcagagagctgctcccacacagaagagaagctaatagactaacagactgctgtaagcaaacatatccacctctgattgtccaggtggaggggcgttcctgatttgcagtaggtacagtgtaaaaatgtaatggctccaacataattataaatagtaaattcactctcatatatagatatttctctcattccaaatagttttaattattttcccttacaaatatgctgcctttagttattttcttccatgttttgacataacatggttaatctatccctggaaaattgaaagttgactgcaattcaatattcctggaacacagagcactttgggcagtcacagatctggagatggaaaattaagcaggcatctaatcatggatggcctttgtgccatgcctttggcagggggaagccattggagagttttaaacagcagagggacatgctcacatttgcattttagaatgattactccagtgttcacttagcaatggcagtcaggagaatgagaagtgatgagaccctgagctaagcagtttctacggggaagatgaggaagtaaagctttcctgagacaatgaggacaaatagttaagtgggcaatttagactggggtctaggagaagcaatcgaggtggagagggaaaaaacagtgaccgtctggcctcgcctctgatgactgagtgggtaccatttgctgagaaaagtctgctgggaaagactcataattgggaaaaataaattaaattttattttggtaatgtaaagttgaggtggctttgttgtatttaggtagaaatacctactgtacagttaaatacatcaggaggatatttagggataacattgagatttgggagctgttggggcggtatagggggtagttagcgaagtcgtaagtgagaatacttcccacccttcccaaattcctagggtgtcttttgatattggtgatattgattttgatattctaaaaaatatgttgattttttaaaagttgtagatattatttgacttgatactatggaatctcaaaatatggctgtccccttaacttgtatttttcttgaagttctctgatttcttgcttccaaatgccagcttgctctctagatttgctgctgtcctgcctggatctctaatcattgtcacgcaggaaggttctcttttgcctctctctcaatttcctatatatcatatactcttttccagtttactcctttgatgtagtgaagtacagcttccagcagctttctgagaaaggtgcttgtgaagcagatttatcaagacaatgctgtcttttatgtttacatttcattaattgagtatggaaatccagattggaaataatttggtatcaaatcttttcagacattcttgtcttctcaataataagttggagttgagaagtccaatgctattatactataatgtcttttgatcattactccttcactctagaaacttgtagaatcttttttttctctctttattctggcatttcatgacaacatgtgtctgttttgctgggaacttatttggcagtttcaatctaaaaactgatgtccttcagttctgaaaaataatgtcaaattattttttaaatgtttcttttatttgttttacaactatctcttaagatcgtataacttagagggtgaactttcattttctgtttatttccttccttaaaaaaaatttccttgaggattttttcaactttaaactttctatcagcattttaaattcagctatactccttttaatttctcagagttcaatttttttttttaccttttcttcattataacctcctctagcttcatgtatatcatttctgtaatctctctgaggatatttatttgttttcattttattctgtattgttttctatttttgctgctgcttctgtttcttctgagtttttcttttctgtttacttaatttgatttcttgctcatggtgtagtcattctttaattatctggtgtttccgggctgtgtcttcattttcctaaagagatcatcagaaattctgagttcaagcaggagaccttaagtaatgataaacatctttaaaaatagctgcactgagccttttgtgtgtgtgtgtgtgtgtgtgtgtgtgtgtgtgtgtgtgtgtgtggaggcagaatcctccaattatctctttcttcggagcattggtctagacagtttcccccaatagggaaaccttttaatatctcacatggggcatagaaacctggatgtcagcctccccaaaagtcagggtaggggactgaggtctaatttagcagttaggtctgtggttcttaaccctatttgaacattatggtgggagatttgaaaaagtcttatgttcgtgacataggccaaaacaattcagtgacaatctctaggggtggcacccagacatttttaaaaaggtcttccaggtgattctaatgtttgtctcaggtgaagacccactgggccagcagcatcagcacatctgcatcacctgagaacttttcataaatgcaaattgttgggccccacccttgaactactggatcatacagtctggggtggagcccaacaatctactgtttaagtagttctccaggtaattctaattcatgctgaaatttgagaacttctaatgtagattatcacgtaatccttcttctcagtgtcctggggggtaatccttttgggtgaatttctaatctttcaccaggcttgaggaaagacactcccttggcagtgtactctggattctaaccacttttttaatagactaaagcaatcctcctattttcaattgcatcaatctccctatttttagacattttaaggcccacaatttctaatctagtctgagcttctgcagtacaaattaacttgcatctgacctcctcctattgcaggtctagattttcattttatctattaactcatgaccaggtataatctactttcaatccacttctgttttttattgccatggtcttctctcctattcttcatctgtgtagccttatgaattttttattgttttcttataaattttggtttgccaggagagagaagagataaaattggtcagataaaatacaagacacccagttaaaatttaattccaaataaataacaagacttttttttgtatatcctagtaaactactctttatttatctggaattcaaatgtaactaggtatattttctattttagacatgaagggctgattttttagaaaaatctaattttaagtcatggatctcaacaattctggcatagtgcagtaaaaatacatactctgaatatttcaaaaataagttattagttttaatgatacatcttaagaggtaaagcattataaaaaatgtaataattataattctaaaatataattgaaatatgtattgcaacagcctttaatttggattgaaactttaattcaatttatattactcaagttatgtttgcactgagtagtatagtgttattaggtccaatgggagactattttcgaatagggcagtgtagtggaaaaagcattgaaattcaagtagtgctgactgggagttaatgccatactcctgctgtgtgaccttcaggaaggccacctttcacttttccatttgcttatttttaacagtgtgtgtgttaacacatcatatcgcttttatgacaatgaaataagacaattgtatttactcaatttagagacttgcaaagggcctggaacttagtaagtgcttggtaaatattattttccttctctctctctctcttttggagaagattttggagactgtatggtaggatcaatttatatttatgttaattatcaatattaacatatttaacatatgaatattaaaataatccattaattcctgtaatatctctgttagtgaatgtattattttgctagagcttccataacaaagtcccacagactggatggcttgacagaagttggttttctggtagttctggaggcgagaggtctgagatcaaggtgttggcagggcaggattcttctaaggtcactctccttatttgtagatgacggtcttctccctgtggtttcacatggcctttcctcagtgcatatctgtgtcccaatgtcctcttcctataagaaaaccagtcacactggattaagatccgtcctaatggggcctcgtttagacttaattattaaatatctctttaaagactctttctctaaatacagtctcagtctgaagtactgggacttaagaatttagcatatgaattttgggtgggagttaacaatttagcccctaaccatgaagtagatttactcctcattgcttatacacagcttaacccctaccctatattagctccctgcttacgtacagcttaagcaagcagtgtttgaatttcaataatttctgaagattcgaacatcttcatgtcaataacagtgtgaaacaacaacaacaaaaaatgtgagatgaacaaatatgattccaagtaataattatgcagtcaaaaacaaagttcaaaagaatgcaaaacattgtgaagaatataaagaattacaagacaggatccttgctctcaagagctttcatccctggataaggagtcaaaattagtacaaatgaaacgataaggaaaagcaaccattaaatacaaaatcatgtcattctatctgtagaggagccttagaatgagggagaaagaagtatcagtgtgggctgtgctagtctgaaatactttacagaggatgcggttatacttgtgcactgaaaggtgaacatagtggagttatgtgaagacatatgtatggaaaccatcataaataagaattgaaccgtgactattttcttcatagcactaatagcagtcttcacttatttcttttctatttggttatttatctatgtctgtctctattactagaatattaggtctataatggcagagaccttactactcttgtctcctgtcatttttccatcatctgcaatcatactttacaaataatagatgtcaatattaattgaataaatggattaatgaatattgtaagatgataagactggaattagaaaggagtcttagtaggtggaataaatttgatttgtagggctttaacaatctgataagagaatttaaaatttgaagctgtatataatgaggaggctttgaagaatcttaagcaagaattatgcatgatgaaagataagcttttagatgactgcaacaacctagaataatttttccaggacagttggggtcttagattcacactggtcattcttgagatgcctgttgtctgagtcctaatggtccttgatgagcacaagctcctttggtcatggtcttcaaggccgtggttctttgtatctgctcctttacccatttatttactgaccctgtaccatgccatcagaatccaattgatcacgctcagaaactttatgtgtgaacagagtgtggttttgtgctactcttagaagccctacccacccaaaactatgatccagaactgagtttcatagatatctctactgtctagggagccacaaaagggtgaggttggcattttatatgttgcctgtggaaattagttttctccagggccaaagggtagggtaaacaaccacagtgtctcccactgtttggctaccttctagttgtcaaggaagaaagatttttttctaagttttgtttctagtctcctgtagcaataaaaataatgcaatcagaaaaatcttttttttattatcctgccatagagatgtgttcaaatgttcagttttaaatgaatgtaacccaggcccataataaaatacttggctgaatgaaatgtgaggatttgcagagagatacatcttggagaatcatctacccccacggctctctttagctttaatgtgtgtagtttctgctcaagacccattgggtccgagagggtgagtaaggagggaacatcttcatttcctgagtggcacaatcagttaggggtggtccaaataaaaacacccctgtgctccagtgttatagtcttagcctcactcaatcacccatgtccccatggtgaggggctttggcctaggagacagaaatggaacacattttgatttggactttaacaatggcctttttctttagtcagacagccagcccagtaggccctcaattctacacttcaggaaaattcctcttgttaatttttgattttgctcataatttatcctttaatatttttataaattttatttctgaagtaataaacacataataacagaacaaataagacagaagagactcatcgattatcaatagcaatgtctcctactctgatctttctatcgccactcctacttcttagggacaaatctcttatagctgtctgctattagttgtagttgtactattttcttcccttcctccctcccttactttcttttttcatttctttttttcttcttccttcctttttttctttctcttttcctggagttcttactcccagagtcttctattctcatgatccaatatagacagctttttatgcttgcctcatagcatttattctggggctttcctttgccatctggctttgttcagtttcctgttttttagattccttctcattatcttgacttattttctcattttgttccagcttaactttcagtttctgtttaagaaagagttcatgggaggtaaatttatgatatatatctcccctctgcactgctacacacacacacacacacacacacacacactctctcacagagagacagacacaccacacacacacacacacttttttttttttttttttttgagacagagtctcgctctgtcacccgggctcgagtgcagtggcacgatcttgcctcactgcaacctctgactcccgggttcaagtgtttctcctgactcagcctcctgagtagctgggattacaggcgcacatcaccatgcctggctaatttctgtatttttagtagagacggggtttcaccatgttggtcaggctggcctcgaactcctgacctcgtgatccacccactttggcctcccaaagtgctgggattacaggcgtgagccaccatgcccggccacacttcttacacttaattcatagtttactacagagttctacctagattgtaatttcccctaagaatttcctaggcattgcttcactgttttctagtttctagcaatggtgaagagaagtctagcatggtagtttgcaaagaaggactgggtaattctttgtaagtgacttacctttttcttatctccaaacttttaaaaaagattttttttaagcacagtgttctgaaatgttacatgcatatattcattttttctattctttttgctggtgaatcacttgaaaccatcgtcctcaaactttttggttgcaggaccattttatagtcttaaaaattattgagatccctaagagttttttagatgtgggttatacataacccacatattattagatattaaacctgacaaaattttaaaaatatttattacaaattcacttaaacattacaaaataaacattaatgtttatatattatatttttaatgttaatagttatattttcttaaaacaattaggacagtggcaatggtctatattttacaaattttctgaatgtcttaatataatatagctgaattttcatatctgattcaggagatgttgtgtgcgttcatatatgtggcattagaatagagaggattattttaaaagctttttcagatgattgtagacattcttcttttaaaactacaccaaaactcaacacctgttagtttcttaaaggtgaatagcaaagagcatatcattaaatttttatttcctctcatatataatgtattggcctaattttcactacaaattaatcatttactatgcatgattttggctcagcttgtgttgttcatttgaaaaacattgcttctttcagttatgtatatcttcccagtgtagacatgtttcattataccatataaaaaaaatgcattcatgaatatttccagaaatctcattagaaaaatttttaggtattaggaagctgtcagacttacggtattgagagaagttttccaacactctaatcttcatttgaaagctttaattttatcattgaaaataaattatctcagttttcttatatgacagtttttatattccattcatttttgagtaaacatcttttaaatattgaactctgaatagccatagtctgtcagtcattcttcaaagataaaatgatgttctatgaaaaaagtagctaattctttttgcagttcaagcaatctcataagacattccctccaggcaactgtatgttggtaggcagcagaaggaccttatgcacttttcattttgtgacacaatattaaaatgtcatgtcctagctttaataaaattaatagtttttattgatcaattaaggtaatttttaagtaaaactggcatttttttccccctgtgagtgcatggcagtagtgaattcagtgattcctagtacagtttaatgctactgggctttcaaaacaaatattctactaatcttttttttacttttttcctaccattttctgaggtttctttggtcttttttctctatattatggaaggttgcctctaccatattttctgatcattctattgaaaaatacttcttggtagattttttaatctctaaagactcttcttttgtaattgttcattttttacagcatcttttactttcttgaggggtatatgtactagaatctcttgagtatgttaattagatattagataatttaaaacaaaaggattttttctaaattattatttgtgcacctatgtttatcttagtgtttatttttcattgtgctactatttcccattgagctggagatccttgatttcctgtgatgtttaacaaagaaggactgtttatctttcatggatgtcttttacctttatgagagtagaagtcttttcacttggtatcttccttgaggggagttctgcaaggcattcgacactgtgacttgtaggtttagtttcaggagggacctgggggccaggatttgattcccatgaatgctagaatgaagagaactgtgttgcatggcaccagctttaatattcaaaacctcttcactgagtatcttagaaaagagctgtggctagttatttgacactttttatcagctgtcagccctctgtgagctaggggcaaagggctaaggagatggaggtggtattacatgtaaaaatatctttaattgcccaaatagagttaaataaccttattttaacttctaggtagaaattgatttgtggtctcaatttgtggccattaattctattcttcttgataagtctaaatcattcaaatccttttacattataactttattttaaattactgcattgccttaaatgttttaaagcctctcatggagtcttggaaagaacacaagtttttcagatagggagatgaaatatgtaaatttgattaagttacttaatcttcatagagtctcagattctttataaaatgaaacaataatcatttccttacagttttgctttcacaatttgaaataatacaataagagggggagatctctatttttttatctgtggcacactgtagattctctgatatcaaatgaacactcagtaggtggtaccggtataaattaatgcaattttggagaaagggtcactagaagaaatagagaaggttaacaattgtgaagagaccggtaatggagagcacacatgatcaaaagcttacacacttttaacaaataaaaagtgggagaacaatgtatattttataattgttgtttagatattttgttagattttgccatttatttacaaatacgtatcgtacaaaactacatgattatgtttaagtatgtaaataataaaagctgattttatattaatttgaaatacgcttttatttacatctatatacttacatgttatgtaaaatataagaatattatatattcttttctaagaaaaagaaaagttaaattgaagagtctaactgtagaggaggaggaaagtttgaacaataaaatgtcactacgagctgcatttttaaatgtgacagtgattttactgtttcccttagaaacagagtttggaaatataacaaaagaaatcagagagtattatagtttagtaagtatttattattatttaataagataattatactttcctttaaaaaatatctttcctttttctagataagaaactgtggtgggcagaccaaaacttagcccagctaggaacctgcagcaaaagagacggaagaaaccccaccatcctacggaataagacttctggggtagttcatatgaaagtctatgataaagaagcacagcaaggtaaatcacactaatgaatttgtgccaggtcttgaatacgtaatgtgctcttttttatattagctcctcaattcaacaataaaaggtttctattcttgcttctaataaaaacagagaaaaaaggaaaatgttgcttactactgtaggagaaatgtctttaatatagatgcataatgagctttgaaagcattagcaaacctgccttaggagtcttaatttgtcaggtcttcaaagaggtcttatcctgttcttgactaaaaaaatacaagaataagaaaatatatcctggcaaaatatatacaatgcatagttaagcccagaatctgaatgaactaggggacttcaaatggactacatcaacaaaagaattccatatccaaagcactacattgtttggctgtaatcattttgcttttttgtttttgcttgtccaaattgtgtgcagtgaaatggagtgagagaaataacagatggtttacataggtagacttgtcacactacccaaatggcaaatggattagagatggcagccagtacagccccacatctgctagtcctttcttactttttgcttcataatccatgacattagcacaattctctttctaaaaaaaaaaaaaaaaaaaaaaatcaaccaaaaaaaaatatactgtactttcatacattagtctcttccatgaaaatccttagcttcacatacttttcttaggaaaagttttccagaatgattttgaacactaagatagggattttcatctaaaggatttggggtatgtagactaaagcagagaagagcaggggtaataatagaaaaccaaggggattgctatttctgcagataggtaatgaccatcaagcaagcagcatttattgaacataccaattgagagcgctgcctgcacatcaggagataaaatggagatcagattaggatttgccttccctgtacagggattgggtcacgctggtttggaatctttacttgccccaagcagaagaaaacatattacgtattcataaaaaattaataactttagaataaaaaattgctttaaacatttatctgaagtatttattgcattccgttcattgttgagaatttatgaatgttcatagattcacatatacagaacgtatgtgcacccaagagaatgtatatacatacatatacctgagaacgtataacctgagaatgtatataatacccaaatggttatctgtttgttctctgaatttttggggtcatgtccacaataataaacaaggatatttttcactagcaattcagtaatgaaactttttctgtatcaaaataattgtactgccattcaagtcatgggaaatagattacgtaattgagaataaaatactggtactcagtaaataaaacattgaaacattttctgatttccatagaatataattatgtgtaaaaactcacagtactattgtaaatctcagtgaataacgcatacatatgagatcgtatctgaaaacataacgttagaaaatatgacagagagagggaaggtgtgcaagagagaaagaatttccaaacagagcatttaaaaatatttacccacttttccaaactgtgaacaaacatatgctttgttttaagctgtaaatatacatgtcaaattttctagatataattccaatgaagtttttagggggaaacatttactatatgatgctcagtgtactttactcctgttaacaagattttcctcatcttttaaagatttgattctataggtataattgggtgttctatgctctgtgaaagtattgccaaatgaacaaggacctctagcacttagaaatcaatggtacaatatgactaaacttaaaatttaagcaatgaaaataccatttttactagaatatgctgataaaagcatctgtattaaagacaatcccattaacagaattactgcaggtagcgtaaaagcttcattagtatgaaatatgaccaatttaggactctttaaggtgttaacatcactacctatttggatttcaaagtacaattagtgacttaatatatcatttttgacaaagatcactggagagttgagaattcttattaatcaagtggactttctagctccactagagatttggggcatgaggtttcaacatcaatatcattataaattattaagccaagctagtatttataatttgatagataatataaatttaaacataaaacaaaaatttgttacataaattattacctttcaattttactatattttctactttatatttaacagaaaaagaaccttattgtaactaagaattcatttcattattttttactttttctctccttcactattaatttcttcttagagactaaacaaaggatatatgaaatgtatatggttagtgtttaacattaattgttgaaatatattttattatttatcaaaaatatagttctctctatatatctgaatatttatctgaaatattatatataatacttatatatggctatttttgcaattatattaaaaatatacagccccagacccagaaggtcctttttttcacgtatttttgctattatcaaggctatgtaacccctcacattctcttatttatttatctattttttgagatggagtctcactctgtcacccaggctggagtgcagtggcactatgtcagctcactgcaacttctgtctcctgggttcaagcagttctcctgtctcagtcccccgagtagctgggattacaggcactcactaccatgcctggctaattgtttttggattttttagcagagacggggtttcaccatgttggccgctctggtccggaactcttgaccccaggtgatctgccctcctcagtctctcaaaatgttgggattacaggcgtgagccaccgcgcccctagccacattctcttatttttacaagtacatggtctttcctaacctatttctctttacttcttgttttttgtttgtttgtttgtttgtttgtttgttgagacagtctcactctgttacttgagctgtagtgcagtggtataatctctgcagcctctgtctccagggttcaatgattctcatgcctcagcctcccgagtagttggtattacaggtgtagccaccacacctggctaatttttgttttttcagtagagatggggttttgagacaggcttgtctcagagctcctgacctcaagtgatctgcctgccttcacctcccaaaatgctgagattacaggtatgagcactgtgcctagcctcttcaattcccttatttctctttctctccaaatgttctttcaagctctatagttaagtatcatctgcggatgtctccccagcctttcagtcttggtagttgaaatacatctacatctcaatacaactctctaaaagattggcattacattaatatacccatgctttctacaaaatgaaatatgtagattgtcagtatataactattataaatctaggctgggggcagtgactcatcctgtaatcccagcacttcaggaggccgaggtggatggatcactggatgtcaggggttcaagactagcctggccaacatggtgaaatcccatctctcctaaaaatacaaaaattatccagacatggtggcagacccctgtaatcccagctactcaggaggctgaggcaggagaattgcttgaacctgggaagcggaggttgcgataagccaagattgcaccactgcacttcagcatgggcaacagagtgagactgtctcaaaaataatatatatatacatacatacaaatatatatattataaatctataaatataattgtttcattatttgataaatgagagaaacaaaatttcatcttaatgttatacatcagcttggaaaaatgtggaatgaatcagttaatttttattagtttatataggataaatgtaatcattttaaaagttcagggccatataatggccctacataaaatggatttcatcagtggccaaactggcagatacaggacatgagcagcgaatgtggtacatctcctgatgagaaatctcccaagttgagagtatttcacacttcaaaaatgacagagctcatgacaggttcgattgaacaattaaatctcatcagaccatcttgaattcagaagaagagaaataacgagctgcattggtattttgaaatttccacagagaactattgatatagagctttcatcatgctttgtaattctcactggatttgttacacttcatatcagtgcttgaacatccagtaaatggcattgcatgctctagaataataaaaaaagatgtaaaaatgggatttttaatgaactttctgggtaagattgtaaattacttaacttcccactaccagcattaattagcacactgggcctagtaaattcaatggaacatcttcagcagggattctagaatgcctatctgtgattacctgactaatatttgtcattggtactgtacagaaagaagaggaattaatatgccaattaattagatgattcttatggctgtgtttttcatatatttcgggagaattatatttctatgaatgagaaaatttatttccctgcttttaaaaattaattgaatacatatacacatacatacctcctttcttttagacgcataatctttgagtggttagtaataatttaacagctatttatgtgacacatttggataaaatattcttgcaaaggaagtaattgtagagttgaagtaaaatttaaaaatcaaaagagaaaaagatgctggtttctctgatcttaaaatattacaaaggtctatgaaaatatttatgacaaatcaatttccttttgcttttctgtaactattaatcttctcatgtatgtctgttgacttttttgaaagggaaaattcaacaataatttactactttaaattattcaagagaataaagcgtaatctttaaccagtatgaaacagctgcatttagaaatcaatagcatacatatttgtcaaattattgacgttaaataaaactttattttttaaaaatttcattaaagaaatttgtttcattttcattctatgcaggcagcaattcctgccaactaaacaatggtggatgctctcaactttgtttaccaacatctgaaactacaaggacttgtatgtgtacagtgggatattatctccaaaagaaccgtatgtcatgtcaaggtatgagttcatgaaaaaccttacctctggttcatttacttcactaatcattacataccatgcagatgttaggcaaccaaagtcagttaaacattagaaaaaaattaactagttattaggaaatggtatactgtttagtctcatatgtgtaagattttaatatttgaaatatttaaaatatcattgttctgccttataagacattctaattttttagtcattttagcaactgctgtatattatcaaacctttaaccaaatctagtaaaagctaccttcgacctgaataggcaaaaattatagtaaaaagcagtacttgattggctggaattaatgtagaatttgaactaagtaatgtttactttagactatattagaggaagcactagagagaatgtgaggtctcaggtttgcataactgagggagaaaagcactgtaagagaactggtacctaagaaatcttcctgttttgcagtctctagttctattagtcccaaataactttggttctagaatgatcttttatatctaatgatcataggttaatttttatcgttaaaaatgttccaatcttatttgagaaatatctatatatctatatatgtattatcatttattttattttaaatccaatatttatatgatacttatgtgcatggcactgttctaagcaccttaaacgtattaattcacttaatcctcataacctcatgaggtagttctcttattatccccatttaagaaatgaggaaactgaggcacagagaaattaagcaacttaggttacatggataggaaatagtggaaacagatttaattctaggcattctagttttaataagaaaaaaatataaatattttctaatatattggcaaaatgcataagcattagagtgtgtacttctggtagttagcttaatatttatgtgcctatttggggacaggcttttgatgccagagaagtgtgatattaatagctaattaagctattgatgtattcttagtatgacaaagatttatgaagactaacttcaaaaatttcttaagaaatctaaatgtctattaaaagtatcagtgatacagttatcttaaatcaggtttattatcatatataagtaaagagatgtttggattttaaagaagagggaataaattttggttgagagatgaggtaggcttccacaaatcatctaactcagtgcttatgaaagtgtggggcccgtaccagcatcatcatcaccaattgggagatttttagatatttaaatgatcaggcttctgggatggggcccactaattcattttaataaattcctattttaacaaatcatatgcataatcaagtttgagaactacaaatctacctacctttcgttagtcaggaagtgtagtacacaataatttttttaaaaggccaggaaatacatttgttaacataaattaagattgttaaaaataatacaaatgaaattatttgtattttaaatattcattctgggcttcccttcccccccttatctccggccctgcatttaggtatagaatcatttcttatgtactctgttcatgaaggaatcaggggaatacctcttgaaccaagtgacaaaatggatgctttgatgcctatatcaggaacttcatttgccgtgggaatagatttccatgcaggtaaatagctttttagtcataatttatgcataatatattcacttgatttattaaacatgatgggaatacaatcttttcctctgtgctttaatagtcaagatgagaaataagaaagcagcaaatagataaatattaaggccaatcataaattattctaaatgtgtagtgtctgaaaaaaaaatcaagtaaaatcgtcctaaagtatagcatttgaattgcaattgccttaacataccaccattggcacttggttgcttatttttatttctctctcttttttattttgatactttacttttatctagttataaatataaggacatacaaagcattttgatctattatatactaaaatataactttatttaaaatatattcaggatgtgattttctattgtaatacaagcggtggcaaatgaaatccaaatactagaaacaattatacatgctacaccactgaaaattattgttgaatatagtatgtaccatttggagtcagattttactttaccttctgatattttagcaaacagtgaaaggaagcaacaggaagcaaagcggacactaacattttgctgcggctaatatgaataagtgatggggaattaatggtagacactgttgaatttactgaagtaaacaagttttttggcgctaattgctaaattctgacatagcataaatatttggtattcacattaacatttagatttattatcttcaacttgagggcttaaacttatcaaaataaatgctaaatcgtatgttttctgaattaatgttttaatgttgaacatgtaaatgcatttccacggtgtttttatatgtgtaaagacttagtttgatctaatgttaaaaaacaaatagctatttgatttataatattaaaaaaaagaatcattgtaatcttgcaccagcatgtgggcttctggtacagttctaacacattttgtttaatcatgtattaataaaactctggactacaagttaatgaattactggggatcttcacaaattgttcaaaaatgagttttcttaagtagattgttttgcaccaaatgtttggaattggatagaggcaaatgtttaaaatcacctttaccaaaaggaaatacaaagaagtataacacattttattaagcaatatgttaattttgccaaaatctcagtgtggtttttgatcaaactttaatcaaatctcattattggtggaaggctaattacctctacaatgaataatctaccttgtctcttatgtacctgcattttattctttagaattttatcatataggatttgttaagtgcaaaactaagaaaatttgaacttttaaaagattttatgtatacagtacatgcatgtatttttactaggtacatagtcctttgctttagctggagcatatattcaattattttgaagactccataatgatttttgaaaatatttgataaatttccatgaggaaaaaatattagttagcatggcacatgtatacatatgtaactaacctgcacaatgtgcacatgtaccctaaaacttaaagtataataaaaaaaataataattaaaaaaaataaaataatataagcaatttgatctaaatgtcttgataagatcattaggaaatcttttgctttttaagggtaaatagatcatctgaatgagttaaattcactctccaaagtttacattggccctgaaatggttaagtttaatatcatgtaccatgatggaggatatgtttatttgcagagaataggactttctgtttcaaaatgcccaataattattaatatcataaacttatttcatgtcaaagtaacttttcctaaggagaagttacctgttttagttaaaactttgttctttacattttgcctaccatatttttatttcctgggaaaaagttattttcagaaaagctatttcttcttctaaatgtaaagggatgcaagcatacagaatagtcatgtaggtagaatgttcaagaatctattaaaatccctactgttactcagaatacagcagtgaaaaactttctttaaaaccaaagaaggttagagatctacaggccagtgaaacatagttggaagaaaccagagtttagccacagacaacctgggttctaatgccagctcaaccactagtagctttgtgaccttgggtaagttacctaatttttctgaggctctgtttccctttttggggtgtgggcatgtttagatcaatgtaagcaaatgtttaataaagtgcctgatatatgttggtgctcagagaatggtaacaaaaatatcaaataagtgggaagtaaaatattgtagaaattatcatatgttatatatattatatatatatatatatatataatatatatatatatatatatattttacaaagatgccctggaagctacatttaaatttctaattagctaggatttggctttactgttctctcaactgatattatgttttctattcagttatctgaatagaaaaaagggtgtttcttcactactctggggcaataaacacaggttaataaacctcccttttgaggataaacatcatcatcatcatcatcatcatcagtctgtagagctgatgcttaaagattagatatcagtaactatttataatattaaatgtaaatctaagaggctaacattcagtgcttaggctgaactaactgaaaccctaatgaaggtcatgatggtggtggtgctatcaggagctttccactgcctttttgcataacttgtgttacttccatctactttacagtctgatcctttattaactgtgttttatgaaaatatattaggatcagaataagtgtcagcagcttgatttataatatctttatagtggtgatatacaagctctgttacttcttggagggaaattagagagagagagaaaggaaaacctggattgttcctcagagaaagagataaaagaaaccttttttgttgtgtcagtctctacttgtttatctttttttttaaatcatgaccttcatatttcacctgattataggttctttcttgattaatttcttttgcagatattttatttcctcttcttccattaatgacatttaccccagggccataatctctacattaggatcaaagataaaaatgaccaaatggaagggcacagttgcctcttattctttttttttattttattgttattatactttaagttttagggtacatgtgcacaatgtgcaggtttgttacatatgtatacatgtgccatgttggtgtgctgcacccattaactcgtcatttagcattagcctcttattctaaacaaacagccccagtcatgctaaggagatgaagtggaagagaatcattggcaaagtacaagtatcataatttatcaatactatttcattaccatgatattacagaaagaatgtattctcaaaacctgtgcatttcataagaattaacagatctgaatctttctgggtttgattgtaataaattaaagctttctacaatgaacaaattgttttttctaccagatgaagcaattctggatactctccacagaagaaaaaaagaccctgtggctagatttaaaatgttcaaagaatttttatctcttcactggaaaagttccattccagtggaaaaaaacatattgagctttgaaaatccttgcctgctgggtgatattcctcctgataaatgaatactgcatttgatgctttaacagatacattttagttaggagaaaagccttcaaagcaaagcccattgctccacttagttaagtgatcttcactaagtaatgctctattcaatattcagttctccctccccttggggtacttatgacttctccttaataatgaaacaattggatgctacttgaagaggacattctactcagaataattattcatctgtaaaacttcacacttacattcttttttcatcttttatctcttttattgaaatttgggtcatccaactcaatgatgcaacaactgatggttactataatagctaccaggtttagaacttcacgtctaagttgcttggaagatgaagataaacaagggtccagctgcaatggctcatacctgtaaccctagcactttggaaggcagaggtggcaagatcacttgaggccaggagtttgaggctagcctgggcagtatagtgagaccctgtctctattaaaagaaaaaaataaacacagaataagggtcattatttggatgtcattgtctggaacttactagaggaaatattttattatttttttacaccatcacatagtaatctggctaagacaataaaaacactgaaggaacatgtcagtatacatttacctaaatccacagaatgtataacaccaagagtgaaccctaatgttaacgatagatgctaatataaactatggatgtgttggcttaaattcacctgtgacaaatgtatcgctctggtgtgagatgttgatagtgggcaaggctgtttgtgtatggcggaaggaatatatgggaactctactttctgatcaattctgctgtgaacctagaactctaaaaattaaaacatattttaaaaacactgaaggagtatatgtgacaaaatatcattgccacgtttatacagtgaatgtcatctgtttatatgaaagaatccctctttattagtcccacgacattcatatttatctttgaaacatagaactagaaggagtatttgataccatttgtagcactccctcatgatacaggtaaggaaactggaaaccaaagagatcaaggggccatatactaatggagtatcctactcccagttctttccactgtgccgtcgtgcatttgtaaccactgaagcaaaagtttattttgaccattgttggcattacttgatgacactacattgcgcttctgcaaatttgtgctagtagaagatcgtgtattattttgatttatatactgaatcatgtgatttttaaacccatttaataattgaagatagtgacactcaaatgagtctctctcttttttattttctatgcctggaagcttataaaaagaaactatttacaaaatttttctagtaacgactttgtcaccaaccaaggccacagaagaattatagaaagaattctttatatgtcagtagcagcaatagtttaagaaatataatattgttgctttgggacattttttcgattttatgaaaaccattttcttggctacaaagtgaattttagagctgcttcaatttcttcttgttcttgtgacagtgaaactaaaactactttttgttgtcatttcaaactttcttcaataatatattttttaatcatgtgaacagtgtgtatagatttgtaggtagtcaattcagtaaatctttcaagatgtaatatcacaagaaaataaaaacttatcaatactacctgaaatacaaatatcataaacatgcataacataaggcattttaggttaagtaaattactggaaatatctcacagatcctttttgggtaatttctaaattcaaaacatgaaaacaagcccctattaggcatttaatttatcagtatgttacctgaaattaaaagcacaagaagatgcacaatgatcacctactaagattaaaactttggtcaacttatttgagatctatattattttccatatttttgagagaatctcttaggcaagtctcatgaaacttcaggcactcagcacccctcaggaaagggaaagatcttgacaccgactttagtttaatccacatgaagcacatcaaatctgcattaggaaaactttctttttccctgcctgagttactttgtgctgccatatttctttttagctactgaggcttctcctcagtggtacattcagaattgaatgtaccactctttctccccactcttctttatcaaaatggagctgctgagaaacctattttctaaaggcatggttacttcaattcacagtaaattattagtagctgctgagagattgaaaaatttttaaattatatatgtttgagcagatcacagtgtcttaacccaccggcaacatccagctaaaacacccctaaagatatgtgaaaaaagtattttttatagataggtcaaactattttatatttttcaaattactccatactctgatacttagagtatagattggtacctgtttatttccagaaacccaaccctagatatactgacagattaaatgataatgaggagatctcttttagcttaggtacgttggtacctttagtatcttcaactgtaaacttaaacttgaaaaagtgcttttcttcccattttaagaaaactgaatatgtattaatcaatttgtctttttgatagcatttatttaaaaaaagctgtgattcagcttctgaatttttgggccattaatttttaatcaactagacaatattctaggtaaaggaaaaggaaagttatttaatttgtttatgggctggtcataagcaatggatctttaatttcattttatcatttggccttatttttatctaagggcaacaagtagtaagtggatcattttcaaactttaaggtgaaaaaaataactaattggttctatgaattccttagtatttttagaataggaacttggcagaaattgaaaaagcctagaaatggaattaaacacccataagaggattagaaaactgaggggttggaagaggaagaaattaaaataacaaaaaaaacccttaatatttgttgcacacttactacatcacaggagtaaagttaggaaactttgtgtatttatgtcatttaatttatcaaaagaatcttttgaggaaggtggtatttttattttaatattaaactgggtttcaggatgagatatgagtataggaaagacttggttgctttgagatgccctaattaaattctgcattcaggattcttttgggtttttgcccctgagattgacatcaaacatgaactgcataagcaatgtgacataatccacatttgatccctaatcgtttcataatgagaattttaatcttgttgtaattatgattgggaaagacaggccatattaggactcagggcttgagagaatcgtgaaaatatggtcagtataggattgcccctgctagactgaggggcagaagactcatggcacagcttcatctgagactcagatagttagggaaggcatcatcatcatcatcatcatcatcatcatcatagttatcatcattatgattgtcatagaatggatgaggagaagaagagagaaaaaatcatttattctactatgtttaaattagttatctattactgtataacaaattactaacacttggtaagacaaaacaatgcttataatgtcatagcttctattggtcagcttgctgtgtcatctgcttcaaagtttcttatgagactgcaatcaaagtgttgcacagagatgtggtctcatcagaaggctcagttagggaggattcactaccaagctcgctcatggggctgttggcaggattctgttccttgcaggttgttgaataaaagaccataactctctactgagtattatctcagttctttgtcatgtgggcctttctacagggcagttcacagcatgaccacaagcttctcttagagctagtgaataagagagtgggagaaggcattcacaaaatggaagtcagacttcttgtcacccaatctcagaaatgatatcccatcacttttggtatattctatttattagaagctactaactagatgcatcctcccctcagagaaagggactagagaaggagtgaataccaggtggtaggggtaagagggggccacattaggggctgcctatcacaatattatagaccttttatatatcttattcccacacattattttctaaagggtgaactcggatggcaggtttgaaatatcagtgatgttcctgtatggacagcttctatattctggcttaaactatgtgataatgaattattaatgtaaaagtttatggtcattgtcttgatcctcattttgcctccagttaatagtagactgtagctgactggagaagtcctttaggcagaaattaaagacaaagcttaaataaaatgccaaatgtttcacaaatggaatagaacaaagatgggatttaaattcacacgtatatattttttcatcatttgctttctccacactgccattctagagtaagttgagtaaggaaagattccacaaatatctaagaaaggatggatggctttttctgtttattttattttttattattttattttattttatttttttgagacagagtctcactgtgtcgcccaggctggaatgcgatggtgtgatctcagctcactgcaacttccgcctcccgggttcaagaggcatttctcctgcctctgcttcccaagtagctgggactacaggtgcccacaaccacgccagttaattttttgtatttttaatagagacagggttttttccatgtttgcaaggctggtcttgaactcctgacctcaggtgatccaccaccttggcctcccaaagtgttggaattacaggcgtgagccactgcgcccagccaggatgggtgtttcacagcaacaacaacaattttaaaacatgcaatataaggccaagggccagaaatatctaaccattcaatatgtgggattcagaaggccaagctagggagcaaggtagccctagtactgataatttgacttagttgatctacgattgtttatcaagtgggggaaattgtgtaccccaaggtacactttgcaatatctggaaacattgttagttgtcatattggtatctgttgaatgaaagccagggatgctgccaaacaatgccctgtgcatgtttagtgtcctgttcctttcccaaaatgaagtattatccatcccaaaatacaaatagtgctaaggtcaagaaacctatagcagggcaaaatctaagattattttaggtgattctgatgtgttcccctggtttactatttgttatctgatgtgttccccaggctactatttgttatcctgagcatctctttcattagtacctagcttttcatgtcatgagtttgccacatttgcttctggctaccattccagaagagtccttcaacaaaagccagaaacttcttccaaccattctttgaagtttttatctagtgtctggaaaaggcttcatgatatagtaacttaagccaaatcttacttaaggactcttcagcactgtagctctttgattaataaaagctctttcaagaaattgcttacagctgtctaggattgcctgggaaattgtgtatttgtatttgtgcatttgtatttgtatgcacacctttgtatgtgcatacacaccttcgtgtatatcaccaatagaattattattgtagtgactttattctttgtcaccaaggcgcgctgaatgtttactggtgttaactatgcttagactgagttccagtattgcctcaagtattcctctccagagttccttggccacaaagggtgctccaaagtacttggcaacagttgccagttctttatgcttgcaatggtgctcaagaacaatgaaacaaatcagtttctaggatactgggcagtctcccattacacactatggctaactcaatgtgtcagtgaatttatcaaaggctgtgttaaagaaaataaaacaaataaaactagtttcattagtcttaaagtttgtttcctttatttattatttaattttactgaaaattcaatgagaggatctagagattgagtaggagaaaactgaagtggaaccagaaatataacttgattgtcagcgtctagtataaaattctagactagattattcaaaaattatgaatctctggagttggagtattttagagttatacaaagcaacctcttaatagtgatctctctggatctgtgccagctttttgactattcaacttctaatattaatagcatcaacaataacaacctataggctattttttaaaaaaaaatctattttctcagtcaacagtcattaaaacctatgtgaaaagaatcagaattagacttgaatagtttgagcaaaaaatgtagacggtattgtatcatctgctctgttcttcaggggaaaaaaacaaacattcacaagagggattatattttgctgctttccttacaaattaaatatgagataatgataaaactgatgatccagtctagtaattcaaggctctaaacatatataaaaagttatctaaatactgaataagaggattcataatttttatttttgtttcctatgacatactattctcattaatagagaataaaagagctaagatttattagtgattcttaataataacttatttaaaatatgaccatagccttataattttttttctttactcctctctcctaatattattttagtggtaaagcaactgatattttgagctcactggctcagattttaatttactgataacaataaaggatactaatgagtatatttgcatactcaattatttttaatgttcatttaaaaccctgttaagtaaaaagaatggtgatttaaattaaaaaatagacatctattagctcaatcatcattaaacatgaaaattagttggtagaataataccagttttgcaatcacttattgatggcaaacctcaatccatggttaaatacttttatttgtttaaattttttaaaatttaaatttatagcaaatttgtaaaattagaaaacatgaaagaaagttgaaataaaaatcaccaatactacaacaacacagacagcaactattaatattttggtatttaatattcatgctattttttaaatacaaataaattttattattgatatgattgtttcttgtttcttttacttacattctaacatgaacgctctcctatgttatgattagcaatttgtaaatactattttaataggaatacattatattatgtggattagcataaaatttttaacctttccaatacttttggatatttggattgtttctaagttttggctgtaaatttttatcatttgtgataatgtctcaaaatagaattttctttattttaactaacatctttattgggatttattttacatatgtacaagtcaatggttttcagtatatttacagagttgtgcagccatcattaatatacaattgtagaatttttcatcaagaaaacaatgcctgttaatattattgctcatattttttcaaactcccagcctcaagtcaaccacttttccctttttaaaattttatttatttacattttgagacagtgtctcactgtgtcccctgggctgtagtggcatgatctctgctcactgcaacctccgcctcccaggttcaggcgattgtcatgcttcagccccctaagtagctgggactacaggcgcatgccaccatgccctgctaatttttgtacttttagcagagatgcggttttgccatgttggccaggctcgtctctaactcctggcctcaaatgatccgccggcctcagcctcccaaagtgtgggatcacaggtgtgggccactgcatctagcctgctttctgtctctacagactagcctactgtggacattttgtataaatggaatcatatgatatgttttcctttgtgactggcttctttcacttagcataatgttctattttgtagcatatatcagtacttcattgctttttttgccaaataatcttccattttattgctataagacatttagacatttatcatttgatagacatttgagttatttccactttgttgactattacaaataaagctgctaggatcattgatgtttttgtgtggacatatgtttttattgctcttgagtatatacctaggagtgaacttgacaggtatggtaactgtttatgttcaaactttggaagaaccgccagattgttttccaaactggttgaaatatttgcattcacatcagtagagtgtgagggtttcattgtctgcacattgtctccaagacttgttatgatctgtagccattctgatgaatataaagtggtatctcattgtggtttcactttatgtttccctgatgcctaaagatgttgagtatctttttaatgtgcttattagccatttatatgtgtatatgaagaaatgtctatttaaagcttttgcccattttattactggggtctttgtctttttaatattgagttactagaattttgaatacattctagataaaactcccttgtaagataatttgcaaaagttttctgccatgctatagtttttttctcttttcaaaggtgccttttgaatcacaaaagttttaaattttgatgaagtataatttagctatttgtttcttttgttgcttgtgctttttgtatcatatctaagaaaccattgcctaatccaaagatactaacatttaattccatgtttctttttaaatgcaatgttttaacttttaaatttagatttatgatccacttttagttaattttgctatacacatatggatatccatgtggatttgcatatggatatttacttatcccagtatcatttgtataaaagacgagtctttccactattaaattatcttggcaaattgttggaaatcatttgattgtaaatgtgaggctttatttatctaaattctatctcattgatctatatatctattttatttttatgagtatcaattgtcttgattactatagctttgtattcagctttaacattggaagtgtgaggctttcaactttgttctcatttttcaagacttttttggttatttttgagtccttgtattgtcttatgagtttaaggattagcctgccaattttggcaaataaactagcagagattttgagagagattgtgaggaagctgtagaaaacaactgaggattattgtgatcttaacaatattaaatcttccagtatatcaatgtgatagctttctatttatttgagtcttttaaaatttctcttaaaaatgattttcagttttcagagtataaattttgtatttctttaactttatttctaaatttcatgttatttgtagtgaaattttcttaattttatttttcaagttcattataaatgtgttgaagtgcaatcgatttttgtattttgatcttctatcctccaacattgctgaatttattagtttaaatagatttttagtggatcccttaggattttctctatacaagatcatcatttgcaaattgagaaagtttacttcttcatttccaacttaggtgccttttactcctcctcctccttcttctccttctacttcttttttgcctaattgccttggttagaactttcagtactatgttaaacagaaatgtttagaagacacattcttgtcttattcttgttctagtcttgatcttaaggggtaaatatccagtcattatccattaactatatgatattagctctttttattttgtggatatcatttatcaggttaagaaagatccctctattcctaatttgtatagtattcttatcatgaaggagtgtatattttattagatgcttttttttcatacctactgagatgatcatataccttttgtcacttattctgttgatacggtgtaataaattaatatatttccaaaatgtttaagttaactagctttgagtacagatggaataaatgccatctggtcatggtgatacttctgtttaatattttgctggattcagttcactagtattttgttgaagatttttgtgtctatattgataaaagatgttggtcagtatttttctttcttatggtatcattggctttgctatcagggtaacacatattttggcctcatagaatgaattaagaagtgtttcctcataatctggttcttggaaggatttttgaagaattggctttcttctgaaaatctttgctagaaatatcaagtaaagtcatctggttcttgggatttgagggattcgattttgatttacaattcaatttctttaattgttatagatctgttcatatgtttcattatgttttagttttgatagtctgtgtcttttgaaaaatttgtacattttatctaagttatgtaatttttgcatatagttattcatggtattcccttatatttctttttttatttctgtatctactgtatcagtaggggtgtctctcatatttcattcttaattttagtaatttcatttttttctccatttgcctttgttagtctagctacagatttgtcaaatttgttgatcttttcagtgaaccaacttttgattttgttagtattttctgttgtttttcctctctgtatttttaaaaatttcactctaatctttatcgtgtccttgtttctgcttgtttgctgtttttttttttctagttcttaagcaagaagattaggttattgatttgagatctttcttcttgtataatgtaggcatttgcagctataaatttttctccaataactacttgaacatcattccctaagttttgatatatagagtcttcattttcactcatctcaaagtattttctaatttatcttgtgatttcttttttgactcatttgtcatttaagaatgtgttgtagaatttccaccacatttatgaatttccatgctttgttgttgttgttgatttataactcaataattgttgtcagagaacacactttgtatgattttaatgcttattgagtttgatcctttcgtttggtagcatatacactatttgctggctgataatgccttttgacattaattgctccactctgatacaattaaattctggcagggatggtttttgagaccagtctttgaagtttcttctcactccagaggggctcttctttgctgtctttttccacagttttctcggacaagttagtgaacctaccatttagtttgctgcactcgtaaaactgcagcctgctcttaattgcttaaaacaaaaatctccattgtttttgatagtagacttaggcttgaactctgcacactctgttcaaataaaatcagttcttttggggagaggtttgatgttctccattcttatggactgcttctacctgtgagcaaaatctctgagtcagtactctggcagtaggcaggatgttagcctctggtttgcctctcttggcatagaacttctgtgctaccagcaaggtggggcaagggcagtggggcccttgggttcttggccttctctggattgggaggtcttccccctatgagtacaggatgggtggaggaagggagctcttgaactctttctgtattcaacagaagtttaggctcagcaatttagagttggagggtacgagaaaagttggtgtcgtgtttttccaaatgagactttttattgggagccaaaggtaaaggggaccccagtttcttggccactcctgtccatagtaaaacttccatcaagctgaactgaggtggtggaggaagcagtaatagtatttagtgcaagtgccacagactcttattgttctaacctagagttagtatattttcttaaataacatcttcttttggtttatgcccttaggtcaagttttagagatttatttttaattaaataattctcaccagttatgtagggggctgagtctactaggcttctcatgtcaacattctggaagtggactccttgacatttcctattatgctataaatcagtgacattgtctaaactctctgaaatagtgttttcatatcatttgtataggaaatgtgagatcaagtaactaaatcttagtttaaataatatttttagagagataaatcatattgttttgtactgaagtcagacaggattttgaagtagaatttactacaagcctttaaatgagtgtacaaacattatgtaattgttatagctataataatgaaattatagcaaattcagctgaacatcaattgttaagtattttgttacactgttgaaatttctttgatctaaactggaaaaatttgtctatgatcacactattgcaaaatcatagttaaaaaatgatttgatgtagattacttttttgaaaatgtaaaactatggagacagtaaaaagatcaatggtttgccaggggatgggggaagggtgatattaatagatggagcatagaggagttttagggcagtgaaactactctgtttgatattatattggtggatacatgttattatacatttgtcaaaacacaaagaatgtacaacaccaagagtgaaccctactgtagagtgtggactttaggtgacaatgtgtcaatgtagatttatcaattttagtaaacatacaactttggtgtgggattttgatagtgagagaggctgtgcatatgtggaagcaagggatatatgaaaatctttttaccttcctctcaatttggttgtgaatctaaaattgtttgaaaaaaataagtatatttaaaaaataatttgatatatttttacaacatacaattattcagaaacaaatacatatataaagatacatgtatataaaatgtgagatttgcctgggcgtggtggctcacgcctgtcatcccagcactctgggaggcccaggcaggcggatgacttgaggtcaggaatttgagaccagcctggccaatatggcaaaaccctgtctctactaaaaatacaaaaattagctgggcttagtgttaagtgcctgtaatcccagctactcaggaggctgagagaggagaatagcttgaatctgggaggtgaagtttgcagtgagccgagattgtgccactgcactccaaacctgggcgacagaatgggactctgcctattaaaaaaaaaaaaaaaaagtattttaagttgtcataattacccagaattagatttagtagaattctatttattccgtggctaagtgttttgtttgtttgtttgttttcaagtaattcttctgcctcagccttcttagtagctgggatacaggtgcgtgccaccacgccgagctaatttttgtatttttagtagagacagggtttcaccatgttggtcaggctagtttcaaactcctgacctcgtgatccgcccgccttgccctcccaaagtgctgggattacaggtgtgagccattgcgcccagcctatttagtggctaagtgttcttaactgacagaatcctcttccattcagactaaaaaaaatgctgtctataataaagctctccacctgttattattgtactgcgtatatatatcctacatgggtattcgtttttttctcttgtgtttagtaataacttttctgaaacccctatgatagtggtatctttaatttaaaaatatttcagaaaggaaaaatgaatcctagggataagaatcagggcagcttggtttaaacatctttctccaactagagaatgtctttttaaaggttgataaacttgaaaaatcaaatttttattttattgagggagatgctgtctcatcaaaatggtattgacatatgtcttaggtgtatgtggcaaataatttagaggagaattgaaaccatgagactatgtcatcaattgtaattgacatctgtgtgggaaaaataaagtattaaaatattatttttctttacatcaactcaggtatcaagggatgaaatgaaaattctgtatgaaatttaaagataacatttcacttcaaaatatcccaaaagccatgatagaaaattggaggaccactgtgtgctgttatgatcatcacaaggattttgaagattaatttcttcaactttaaaaaacctaggttcattcacgttgctatagttcacttccatttatatatattttatggagattctacttacatgtaatgcatgcctaaaaagttataactgaggccatgcgtggtggctcatgcctgtaatcccagctctttgggaggccaaggcaggcggatcacctgaggtcaggagttcaaaaccagcctggccaacatggtgaaaccccgtctctactaaagatacaaaaattagccaggcatgatggcaggcgcctgtaatcccagctactcgggaggctgaggcaggagaatcgcttgaacccaggaggtggaagttgcagtgagccgagatcacgccattgcactccagcctgagggacaatggcaagacttcatctcaaaaaaaaaaaaaaaaaagaaaaaaaaagagttataactgtgaaggtaaatactctaattttatgttcaggtcatagatgagtgtctggagtggtttcagtttactgggaaaatgttcttcattcaatagaggcagcatttcaagacatctaagaactgcttaatttaggccactgagatattaaagttctttgcatatttggtcatgtattagatatgcttgaggagatacctgtcatgtttgtgtcatgtttttggtatgaaataatagagtctcatgaagtgcagaattcatgtcactgtagtcaataagttacaaggctaagactgataaatgatatgcccttgtaaggtttatcctttgtggacttaagtttctcaactggtaaaatgcaaataactctattagaagaaatgggtaacagtgggcattcatgttttgtttaatacatttctctacactggaaagtcatctacttactcaaagtgatcttactcaaagcaatacagatatagatatatatgcacacatatgtttgcacatataaatgtcctctgtggatatataacaaaaatataaaaagaaatcattatacattaaaacaaatatgagacttgaaataagaatggacaaatggactggttaacttttatacatttgtttatagtcagattcctcccatttggtcttagggaattcttcatgccctatttccttgtattcaccataatcaatataccatatatagtctgctagacttctgatgaccactggaaacattgattcttattcactagtcagtattagatgaggcattagggtcaaggatggacatgaaaaaaggactacattattatgacttaaatttttacatgtattgataatgtactgaaatgtgtgtgtgtgtgtgtgtgtgtgtgtgtgtgtgtacgtgtgcacagtatatacagtcatgtaccacctaatgacatgtttgtcaacaatggacaacatacacaaaggtggtcccataagattataacgaagatgaaaaatttctattgcccagtggtgtcttagccatcataatgtcatagcgcaagacattactcacatatttgtggtgatactgttgtaaacaaacctgcactgtcagtcatatgaaagtatagcacataaaattatgtacagtatataatacttgacaatagtaacaaatgatgggttatgttactggtttatgtattaactgtacttgttatcattattttggagcacacttctacttattaaaaaaagttaactgtaaacagcctcaggcaggtccttcaggaggtattccagaagaaggcattgttatcataggagatgacagctccatgtgtgttattgcccctgaagaccttccagtgggacaagatgtgcaggtggaagtcagtgatattgatgatcctggccttgtgtaggcctaagctaatatgtgtgcacatctttgtttttaacaaaaaagttttaaaagtaaaataaatcaataaattttaaaacagaataaagtttatataataaggatataaagcaagaaaaaaaattttttacagctgtacaatgtggtcatcttttaaggtatattcttacaaaagagtaaaaaaaaaatgtttaaaagtttagaaaggaaaaaagttacagcaagctaaggttaatttgttattgaagaaagaaagattttttaataaatttagtgtagcctaagtgtgcagggttcataaagtctgtagtagtgtacactaatgtcctggaccttcacatttactcaacactcattcactggctcacccacaactagcttcttttgtgataaatgttttatatatgtgtaccatttttaatctcttatattgtatttttgctgtagcttttctaagtttagatatgtttagatacacacacacttaccagtgtgttacaaattgcctacagtactcagtacaataacatgctgtacaggtttgaagtccaagatcaacaggctgtgtaccatataacctaagcgtgtagtagtttataccatcttggcttgtgtaagtatattttataatgtccacacaacaacaaaatcacataacaaagtatccctgttgttaagtgatgcatgactctgtgtgtgtgtgtgtatatatattatatacatgtatataatatatgatatatattatatacatgtatataatatgtatataatatatattatatacatattatatacatgtatataatatatatcatattatatacatataatattcatatatatgatatatatatatacataggacttaaaaaattcctagcaataatattgtgttaacagcttttggtatcacatctggtataatatatatacgaatatatatatatatatatatatatatatatatatacacactgtatatgtataactatgtttaacaacatagttattatcatgggtcatttacattttgaacaccagatgtgataccaagagctgttaacacagtattattgctaggaattttttaagtcctatgtgtgtgtatatatatatataatatatatataaatataatatatattatatatgaatataatatatgaatataatatatgaatatatatacatatataaatatatattatatatgaatataatatatgaatataatatatattatatatgaatataatatatgaatatatatacatatatgaacatatattaaatatgaaaatatatacatatatgaatatatatttatggatatttgacttttatatataagaatataatatatatgaatatacacatatatgaatatataatatatatgaatatatacacacatatatatgaattatatatatatatatatatatatatatatatatatatatatatattcataggactttaaaaattcctagcaataatattgtgttaacagctcttggtatcacatctgctgttcaaaatgtaaatgacccatgataataactatgttgttaaacagaaagactaagtggcatggaacaataaacccgccctacgtcctgaaaattgcataccttgaaaatagtctcgcatttgcaatcacatataacccctgatactgaaaaatgtggtcatttactcatttcaatgctttacacactttcagagttactcattttctatcagttctcctatctactccaatgtgttgacattatgctagctgtttcaggtcacttttaaaccattcttgtttccatttaatcaaagacttcacaagattttctgagatgaaagagatttaagaccttacctattccaacctgattatttttcatataagctaaaggagattgctgcagattgtatttccaaaaatgactacaccgataactcccataccacatgttttccttgcaaattgacattgaaatttctccattgagggagatggaatctatgttctctccactccaatctgagcagcactgtgactatggtgtgctatgtgcattttgaggctacaccataaaaagctatatggcttctaagtgaccctctgtagggactcatgccttggaagccttcaactgacatgtgaaaaagttcagctacattgaatccgcatgctggagaaatcatgcagagaggctgcatagaaacaaagtacctaaggaatcctaactgttccagacctagctgttttgaattttgtcacctaggtgagtgaaagagccttcacatggctacatttcccagcattctttccatctcagatgacttcaagcagagcagagacttcagggcagagagagctgctcctgcctagcattgcctataatgcagattcacgagcaatattgatgctttttgcaactcacttttgggatggtttattacacagccatagaaactgacacagagacccagaaaccttaagttacttgtccaaaatgcacagctgcaacagaactagtttagactacatgtattttgattctgaatttaatactttttctacttcaccatgtttttttaatacattaggatgtgttttcagattttttttcttaatttttcataagtctgtttgaaaggaagtagtacgcatttgatttttttttccttcttggtaccatatattcttctttgttgttaatgaacataggtttaccctgaaagtaaggccaaaatattttccttttattctgttgcataaaatgacttcattttgccagctgctggcaaaaatctgactaaaagcctttaacaaataatcaggaatgcacaaccccctcatatgcatgtggtgagaaattaagtgctcaaactgagaaaaaaacaaaacatggctctcctgcgtgcatttgcaaattcagaataatcacactaaaatacagaattgatcagaagttaaccttgtgaagcataacttgcatcatttctagcttatcagtgctctgagcattggaattttccaactatgagtcaaactaaattggttttcatgatttcagtctaggtgagtagcaaaataaaacaattaggaaaaccatctacctatttaagcttcttagcaaaattacattttgattcgatattagataaaaggaataaaaaagttatttgctaaatttttaacttagattaaaaatgattcgttttagtttcctccttttcaaaaaggtgataatcttaatttattgtattcttgccaactctataactgtaaaggaatgaagggaacttatatgtggggggattgaaaaagtgctgaagagtttctccaatcccacatttctttcactgttagagtagaaagataacattctttccagaaggtcccttaaggtgtttatttatgaaatttatcatgaatcatatgttaaactcaaggctggacaacttcccatattgtgcacactcacaaccaccctatgtcataggcctcatcctcattcctcattttaaggatttgtaacccaggctcagagaggttacttgttcagaattacccatctgatatattttattgttggaatgcatatcacaatctcctttctcttaaattctatgctctttccgccttaccatattgtttctgctaaacagattagtttattgaattacttcattctttgggtctgatgagacaagctccatataataatccataagctaatacaagtaataatctataagctaaatatatagtcactgtgaagcagtgggtcagggactgttttttataccaaggatggcaaaatgactattacattgggtaggaagtgaagaaagatcaggcagtggggcatctgggttcaggaagaaaatctttcatgaaagggaacaaatttgatggaacacaaaaacaggagggaaagaaagagagggtgaactcacaaaatgagatgtgttaaaacacacacatatacacacagaaaacccagaacaacttttactcatcttgcaacttgttttggggatagtcatagttttaaggaaataaatgagagctcattgttaacttgacagaagaaagctttattctactgatttaaaagattaaaatgttgcctaatcaaattagattgactcttttcctcctgtaaaatataataaaaagtaaaattttggttttattttaaagaatttgagtaatagaaattgaccaatcggacttatatattgactttaaatttagtatagttgattactttgaaagggtttaccttcaacttactgaaaaatctctacatactcttctcttatgtttcagccttcttttaatctggtgttttggaaagaataccatgaactaagcctgaaatttcttagggctacaacatttgcatatctcttagttttcaagaattttctcagtaaaagtgagcaacctatgacatgtctggttgctttgttctactaccaggctaatttccttttctgtttttaaagtaatgatacataatatatttgactttattctttttaaacagtaaatagttagaaatccaatattagtactgttttgtgctcttaccagtagccagtttcattggttcaacaatagtgagcacctactgtatgtcaaacattattctacatactaaggatgcagcaggaaaaaaaattggcaaaatctctcctctcctggagcttgcatcctagaggaaaagctgggtaacaaacaaacaagcttctccaaagtatactttgatgtcagataatgataaatgcctagaagaaaatcagtttcaggaaaacacattacagagtgaaaaatctatagcagctgcattttagatcacatgttcaagaaaacatctctaagaagtgaattgtagcaaatacttgaataaaggaaaaagtgagcctgcacagattcatggaaaggcagaggtacagtaagccctgagatggaagcatgttgatatgaactaaggagacaagtaaattgccgctctgtgagccggctgacaagtaaatttcctcacgtttgtgtggagcttgacttcatgtcttctgcttcttagaccatatgtatgacttggaagcaagaatacaatcttaattctctccagatagggttaggggctttagcttctatcatcttaaacactgtccttcagatcaaaatacgaattttccatgaaattttgttatatgtgcttttatttttgttctgccattattttctcatttttaaaaataattaattggcaaatgaaaattgtatatatttgaggtatacaatgcaatggtatatgtatatcaatgcaatgcaatggtatatgtatatcaatgcaatgcaatgatatatgttttgtataatgataaccactatcaaattaattaatacatctatcaccattcatgctgtaccttagatccccagaacctgtttatcttataaccgcgggtttataccctttgattaacatcttctcattcctctcacccactgataaccactgttttagtctatgtctatggattttactttttacttttttttttttttttttttttttttgagaccaagtctcactctgtcgccaggctggagtgcagtggcgcgatctcggctcactgcaacatccccctcctgggttcaagtgattctactacctcagcctcccgagtagttacagcgggtgactacaggcacccgccaccacgcccggctaatttttttgtatttttagtagagacagggtttcaccatgttggccaggatggtctcgaacccctgactttgtgatccacccgcctcagcctttcaaagtgctgagattacaggcatgagccaccgctcccagcctggattttactctttagtgaataataacagctaacacttaatacatgtgtactatatgcaaggcactgtgttaaagtgctttaagtttattaattcatttaatcctcatcagaaccttatgaggaggtgctattattattcctgttttacagatggggaaactgagacacaagacaggttaagaaatttccttgaaaggatattgctgctaaagggcaggtttggatttgatttggattttgaatgcatgcaattctgaatctagagtatgtttttccaatctctctgtttttccaatctctaacctttcttttcacaattatattaagaaggtcaaatgtatgaatctgcattttttactccaagcatttttatgttgtttcctttagaaccacagacaaagatgagccatctagtttggcaagctttggttattttctaagtagtttagagagctgcacattatatttaatatagtgaaacactttgttattcatgaaattctagtccactccaaaatcaactattaggaatttgttcattagtttaaaagtatcaaatgcatatggaaatacaaggttattttggcaaatactgtttgcattttagaatttatttcatctatttcaaatttataatagaaatgttcactaataaaaaaaaatctttgtcttatttttaattagtttatgtttattttactgcccaaattcccccagtggtaatgctggagacacccgttttgccttttaaatacaattatgagtcacaatgcaaattttcttaccaattgttacgtattatgtcatattattagtgggtagctatcttatataattttgaaattatatgtaattttttggcataaagttcatacttaataacataaattttaagaaaaaatattgtagtagcattactctaatactgccagtggcaaaaatcattcatagagctcgcacctgtaatcacagcaatttgggaggctgaggtaggaggatcacttgagcctaggagtttgagatcagcctgggtaacatagtgagaccccatctctaataaaaaaaaatttataatagattaaaaaaatataattctgtttcatggtaccatgtaaagtgtttcttggattctgccataataaatgtagcagttgaattgtttccttctcgtcgtctgttttattgaatagcaagatttgggatataacatatattttaattatatctcactactatttattacagaatgatttattttttaaatgcaatgctagaaatatttagaatgataataatgattgactttttaaaattagaactaaacatgagagaactagatgaagaactacatgaagaagaatgtttcttaaaagagaggagccattcagtcatctttccataactttcaataatccctttcgacactcagttttctcacccaccctgtgcctgtacttttcagtcaattacattggtcctatgacaaatacgagaagaccttctttgttattttactgaaaaaatattcctaataacttactttactttgtggatttagatgctccattcttaatcgcatatgaaaagaaatcagagattaattttattttagagccattgatcaaatttatgtttgccaaaataccttcaaaagctgaaagccatgaacggattaagtaagatagtcaactaatactagtgtgtatggaatatgatgcagccataacaaagaatgagatcatgtcctttgcagtgacatgaatggagctggaggctattatcttaaattaattaatgcagaaacagaaaaccaaatagtgcatgttctcacttacatttgggagctaagcattgagcacatatagatacaaagaaggaaacaatagacacagaggcctaatattatgttaaatgaattaatgcagaaacagaaaaccaaatagtggatgttctgacttatatttgggagttaaacattgagtacatatggatacagagaagagaacaatagacacagaggcctacttgagaatggagagtggtaggacggtgagaattaaaaatctacctattggatactatgctgattacctgggtgacaaaattatttgtacaccaaactcctgtgatatgcaatttacccatgtaacaaacctgcacatgtacccactaaacctaaaagaaaaaaaaaataatagtgtggttgctgaacattggcaatgtaagtctcttgggacagatattccatatttttctgtcatcttcagagtcatgttggcaacttgatcttaatctcttctaagtgtttctgttcagttattatatgtagttattatatataatatactgattgatcatgtgtttccctttgcctggcatggcttcgctttgtcatatgtgttgttatttgggttgggggtgaaatgaaatttattgatgattccccaaatgtctgcttgccctggaaatgtgaagctgatgtaatacaatttctagtagacttgcatatgtgctagcttttcttgtgctttaaagaatggtggtcattgagcacaatgctaatggctaatacagatacaacttcttgtttctgcttagaaatgttttgtaatttaaagttatttgcagcatcatgtgttcttatggggattacaaataatctctgagaggcatgaagatacctattatgggctgagtggtgtccctcaaaattcatttgttgaagttctaacccctagcccctcagtatgtgaccatattagggccttttgagatgtaattaaggtaaaatgaggtcatgtgggtaggccctaatcaaatataactggtgttcttataagaagagaagattagtacacagaaaaaatgcacagaggaaagaccatatgaagatatagggagaagatggccatctacaggccaagatcgaggcctcagaatgttggctaaatcctgccaacaccttgatctcaaacttgtagcttccagaacgtagagaataaatttcatttttctttttccataggttttgggggaacaggtggtgtttggttacatgagtaagttctttagtggtgatttgtgagattttggtgcacccatcacctgagcagtatacactgcaccctatttgcagtcttttatccctcgcccatgtcccatccttcccccgaagtcctcaaagtccatgtatcattcttacgcctttgcatcctcatagcttagctcccacataccagtgagaacaatgtttgatttttcaatcctgagttatttcacttagaataatagtctccaatctcatccaggtcactgtgaatgctgttaactcattcctttttatggcggagtagtattccatcatacacatataccacagtttctttatctacccgttgattgatgggcatttgggttggtttcattattttgcaattgcaagttgtgctgctataaacatcagtatgatctctttttataatgacctttttcctctagatagatacccaggagtggggttgctggatcagatggtagttctacttagttttttaaggaatttccacacttttttccatagtggtcgtaccagtttatgttcccaccagcagtgtagaagtgttccctgatcactgcatccacgccaacaactactgttttttgattttttgtatatgactactcctgaaggagaaaggtggtatcacattgtagttttgatttgcatttccctgatcattagtgatgttgagcatttttcatatgtttgttggtcatttttatatcttcttttgagaattgtccattcatgtctttagcccactttttggtgcaattgtttttttcttgctgatttgtttgggttcattgaagtttctggatatcagtcctttgtcagatgtatagattgtgaagattttctgagaatggggagaataagtttctattgtttaaattatccaatcagcggtattttttatggcagtcctagcacattaatacaatatccaaatatattatctaacaaataattactattattcatttaaaacatccgttctattgtagagatttgatgaacatgataagaaactcagtatgtggtattaggcgtttgtttaagtttaatctcatgtacttttaaaatctcatgtaccagggaggtagactgaaatggaaactctcctttctatgtacaacctctgaatttcttacactacagaacctactctttatctttgtttcagcttttggtgctctgattccatctatttctgttttattgtacctattctgtcattttttttttttttgactctttgcagggttcatattcttcagccagttatttcagtaattaactctaaatcttcacagttgttgttcttctgacattcctgctttgcaaatccccaaatctctgcaaaggctacaatgttctttctccatcctcacccatatggtggctgacatgtctctatctctttctcaaaagatacctttgaagcttagtttattgagattactaagccagtgtaacaaactcaaatgattatactatgggacttagagatgtctcacatatgaataaagtagttatggaagcagggaagcttaatggggaatgtggcagaccatgctgcacatgctccactggacacagacgtgacttagctacacctcactgatgtgatgcaacatcagagaccccgtattgctgtttctatttactttatcttttctaagaggtgctggtgctattacaaaagatccaattatagactaaataaagcacaattattttctgaccacttcgagttatttgatgtaggcaattagtcacgagcttctatacttggctcatccacatttctaaatattcatatcttagacatgtatgaggttggttggggagagtgtctgtgagtaaagatggcgatagagacatgagattaggagatctgatggactgtgatacacactgacacctgtggaggagaaagggaaggaaattttagcagagtaattctaagaaatttttctcaagactggtagggagtccttaagccaaagttgccattcaaaggggttctgcatttttcaggaatggatctgcttcagtatttataccacattcagtctttggcgggggacaatgtgggagctgaggccttagtgtgaatgagatggtagattcagttagttacgctctccccattcagaaatttgagaagtgcatgttattggctgccacagaccatcccatgtgccacacagatctgtctctgcacaggtttgagaaatagctcctccatagttcctgtaggcctcttccctgcccacccaccgaccacctgccccatgaggaaatttagagaagggaggtcaatgaaactacctacaaatgttatagttgtaattgatctcaggccacactggatacagggtcatcatccatgcaagtatggtgacacctcttttcacctgctgatccatagatacaagaagttcaaagtggcttggcaagagctgcagcttgtggttcagagggatcttgctgtggctcttaggcaaaagtgcgccttctctctttggtaagaaggagctccaactctactgatctctgggtttcagtgaaaggaagcacaaaattctccagcgcatcattgagaaagacagaaagtgaggactctgttttcatctctgcattggaaaaagtgcatggatcagactaatggctgcatactatgtacctgaggctttattaatctgctctagcatgatacctcatctggcgtagcagctgccaccagggctattacgtgattaaggctctggaagcctacaatcattctccggcattcatctagtttttgcaggggccagactggcaaattaaacagagatgtaataggaaccactactcctgcaccctgtctttcattgtgacactaatctcctctatccacccccatgctccttgagatgagtttttagtttttacagtcttgaccatctgggttgaatagtggtggtagtggggataatttcagggatgtccacttggcctttccactgtgattgctcttacttcagaggcaattaactagtgttggtgttcacccaaatgccaggtatgtccatttcaattttatacactaggactaagaacgtgactcctactggatctgtgaatccagtgagcccacaaagagccagaatgtaactgaggcccatttattacctagcttttgtagcaccttcctgtctccctgtaatataggggtcaatgatgatgcttttcaccttgggtcatcagagtttattcagacactgtgtccagtaatcctcaacatatctaagcagtcacctttctccagtactgagtgacccaagtaaatggtcataagtccttttggtgaaagatctaggaggatcaacacaattacgtaattgccacaatgttgcaaggtccttctccctagggccttggctacttcttcatttgctgggttctggaactaaaaattcatttaggtctgagatctgtgcaagggatcatacatttttattggggcaaccaccctctggcttcttgtcttcccttgtttatttttttgggggagggtgggtgttgtagatgttaaacagcactcttgtttggctgccaatgtatttttggccttaacaatgctctatgaactagctctacaattccttcaggtcaagcctccctcgacgttccttcaaccttgccagtcatggtagttacggccttttggtttctggcaggtaagcacaacgatctgacctctcttatttcaggcagtagggggtgagaagggttcaaaacaatggatattttagacatgaagtccttgcccatgcctatgtcctgaatggtattgtctaggctttcttctaggatttttatggttttaggtctaacatttaagtctttaatccatcttgaattaatttttgtataaggctttctacatatggctagccagttttcccagcaccatttattaaatagggaatcctttccacatttctcatttttgtcaggtttgtcaaagatcagatggttgtagatgtgtggtattatttctgaggactctgttctattccattggtctatatctctgttttggtaccagtaccatgctgttttagttactgtagccttgtagtatagtttgaagtcaggtagcatgatgcctccagctttgctcttttggcttaggattgacttggcaatgcgggctcttttttggttccatatgaaacaataaaacaatggatattattgagccaagctttgggactgccctcctactgtaatagattacctgctgagtagagtaaccactgaacttcttggtgatgctgattcccctactgcaactacagtactatcagccctagtgaatggcatgtcccctgaagcttcccatggaacataatacttcggtgggttttcctttctcacataatatatctatttctgcatctctacttccttccctcatcctctttattccttcttctaccatctatcagggaagatcagatatttctacatgaagaaaggcatagtttctccatgtgtttaagagccaccctagcagagatgttgcctcacagccttgctagcccttgctagagtgttaattcccatataccgagaatgtgccccaagaacttttgcttatccagtcttatattctagcccactttgatcaagtacccttaaaattcaattgcagggtttttttccctggtcctttctggttgtgcagctatttctcactgctgcattggtatataatctctatcctcccttttgaggcccagtaattctccagttgggttagactgggatttaaccatagttatagccaagtagccaggacagaaagtgagtgcatgtcctaaagggaaacctgttgccttgcaggtgagatatttctgtaatatctaccagcacaagggaagtactagcatagggaagactgggccatctctgcaaactctgcgagtccaaggggtatttcaggagccaaacccctcaaagacatacatccagatattctcatcccatctttcaggttcccaggttttccaaccaggtccctggttttagcattgccgacctgcctttgctgaacatttgaacctctctggagctcaattagagcgtctgtttgctctgctcagctgtgtccatttttctaccatgggagttatgagcctctttgtaatctaccaaatctggctctcacatttagtcttaactgcttattaacagctgtcagtttttaaattatctgtctgtagtgtgtcattacaatgtagcagtaatcatcccactctgctgtctttataggcattgtttcctttttctttttcaaaggcatgactcattgcacctgcaaggatgttcccccttagcaacttccacgtcacttctcatgaaatctttagcaattgcacatcgtgtggatggcccaaccattgccccacatgctactcagaaccgtgtcctctttgacaactgctgggggataaggaagccaaacctaaaactctgtcttactgtttattttctcagcccactcccatcatctcttgtgctagtttggtcttttgggaaacagagtcaagacaggattagatatgtaagattgttattgagaaatacacctgtgagagaaaatgaggagagttgtctgcgaggcagatctgagccatatgaaagatagaggggaggaagttaggtcagataggaaaagtctcaggctatggtgcagtttcaagaaagttttagcaaggctggtggagagtcactgtcacctatcaagccaatgttgcctgtcagaggagctccacatgttgcaggaaagggcctccgttagtatctgcttcacacagtcattagctgagagcagccttagcaaaaatgtgaagatagattcagaacacagaagctgggaccatctgtcaattatttaccctaaaattagagatcatagaggctaatattcagtactaagggctgttctgggacattgggcttttactgctaaaatcaggagagtcctggacaaactgggatggttgatcattgtagctgtgactgttttatcatcataatcacagtcgccttgaataaaatcctaaattctcagtgctaaaagccattttctcataactaacaaactagatattttacacaaatcaattcatccctccaacctcatttctgactcttctctatcattctcctcatattctaatgaacagcataattccttgtgccacattctgagagtttcttccaagtctagtccccaaattgatgtaggctttaccttttctagactctcattccaatttctgcatatttcctaggggaactttctaatttatagttattcatgtgcatttcttcttacttttctgaatttcgttttcctagagagcaggattcaagtctgatttatatttgtgtgttcactatgataggaaagattccttcgcagtagcaaatactcaataagagtctgttttcaatttatctgccccattggattttcactgaactttttgttaccatatattatggttgatcatcctatgagatattttctgtattgtaatttcgttgaggttaagcaggagtattcccagggcctgcacccaaaaggcacatctatattttaagatgatgccagacaatctacttaaaatttaccataggtgatttgattaggaatgataattaaattttgcttacagcaaatattggtatgtttttgattattttgtattgagatataatttatccatagtagagtgttcagatagtaagtttgcctttcattaagttttgatgagtaaataacaataaatggactatttctatcactttagaaagtttcctcctattcctgcccgcctatcctcagaagtgatcactaatctcatttttatcaccattgattagttttacctattctacagttttatataaatggaattacatgatatatattcttttgtgcctggtttctttcacgtcacataatatttttgacatccctcctgtttttgcatgtgttagtagggtgcgcctttgtggcattaatatccattttgtgagtacaccagtttgtttaactgtttctgcaatgatagatgtttgtttttgttctagtttttggctcttatattcaaaataatactttggcctttcttatacacagctttctgcggacatagttttcactgtttagctttagggtctgataatcaattttcatacaaattgagcacttagacatctctagagcaacaagcaatgggaatagaataggacatatattataggatttatatggtcacactctccctcatatgtgttttaaggaaagggttattcgtactatacattgactaaatttaagttggagggaagattgcaggtctactcagtcactgacaagatttcctgaagcactcgagattccttttgagtttccttttgtagactcctatccaattatctactagtctgtcactgtttttcttttaagatctatgaggcttatagctcaaggtaatataacaggaggaaatgatacacacagacacacatacatgcacacaagtacacacagagagaattgttatatctctactttgataactgaaaatatttcaagatagctatttcagaacaagtctttgtccttgatctacccttcttaagatgttctatcacaaactttctaaaaatatgttattggtattctcactgaatcaaaatttcttaaggaatcttgttttccttttatctctctgggatgcattctaaaaaactctgaacctttctttttaacaattaaattatatgtctcttcatttacctgataatgccagctgatacggagatctttaatttttttttttccatttcatcctagttttctaatctaatgtaatctttaacctttggtcagcatgaacatggtttaattgaagtgaaaaacatctgttgcttgaactgcttcaacacttcttatattttcagtaaccctgttcctgattctgctgagaccaagagtattattaattctaatatatactatccaaaacctagctcatgtgaatactttttttccttcaagagttttttaaagcctgtttctctgctcctaaaatggaaacactgtaagtgaaacatcatgcagttcaggtaaggtatttggtgaaattggagttttttcatttcctgcatgggtaggatattaagagtgtcatccaagtaaaaaacatcaaagattagacataacttttagatatattttactatcataaaagtttcagaatttgattagcaatgataattaaaatgtggacttcctttcaatctggtggagtactttttaaacattttaccatggaaactttgaaacattaaaaaaaaaagtagagagaagagaataatgaacccctcccacgtacccatcaccagcttcaattcatgaccagattgtttcatctaatttaaacaaacccaagacatcacataatttcattattgagttattctaaacaatatgagacaatactatatcttttggtgtatggcttgccaaacattttttgtaattttaagtattcagagttacaaaattgctttgctttgacccttgagtttaaactccatggaatcctattttggtcatttaacttacatttgatatataattaaattcattataaaatgatactataatgatagcctgccacatgattttaatattttaccataggaggaaatacatagtttaataaatgcctattgttgctgcttcttttttttttttttttttttttttttgacggagtctcactctgttgccaggctggagtgcagtggcacggtctcggctcactgcaagctccgtctcccgggttcaagtgattctcctgcctcagtctcctgagtagctgggactacaggcacgggccaccacgcccagttaatttttgtatttttagtacagatggagtttcaccacgttgaccaggatggtctcgatctcttgacctcgtgatcctcccaccttggccttgcaaaattgcttatttaactgattcaataatctaaaatattactaccttattaaattacttatattcttactctttttatcttactcttcttttactcttctttgctctagatgatactatgctaataactcttatactattcacttgattctattcctattattgtttattggatatcaacatttattcaattatcatgtatggaaagctggaggaagacattgtgaatccaagatgaatgagagcccatctcagtcaactggaaaggcagatgcataaaaagtgagctgtgcaacctctgtgtaaagtataactatagagagaagcacaggttattaggggaataacaagaaagacaatgacttagactgtgatagtcagtaaggtttcctggcagaggaagaatatgagtcttaatgtctgagtaatagtttcctactaaaggtaaggaaatgcagaggaaatggcaggagaaaaggtaaagagatgagaaatgacatgttgcgtgtgtactagggagttggggcagctacaaacaggctagtgctgctagagtcaagatggaggcaggaaagcgtgtgagacactaccagaaaagcgcttatggtctgagtccgtcgcttccaagaggggagcaaggcgcacactctgggaactgaataacataatcgaggctgggcgtggcggctcacgcttgtaatctcagcaatttgggaggccgaggcaggcggatcacgaggtcaggagttcgagaccagtctggccaacacagtgaaactccgtctctactaaaaatacaaaaattagctgggcatgtggcgggtgcctgtaatcccagctacttgggaggctgaggcaggagaatcacttgaacctgggaggcagaggttgcagtgagccgagatctcgccactgaactccagcctgggtgactgagctagactccatctccaaacaaaacaaaacaaaacaaaaaaattgaatatggggaagaaagtattaagaaagtattataactgtttaattttatactttatgttttaaaaattatatttttgttcatgtcttatatatgtgtacatgtaaaatggattaaaatagatatcaagagtaagtgatcaaagtgttttagtcatcaaaaaagtttggatgctatctaagtgaattgccttgtatgatgtactaaagaacctggacttcatcaaaggctcatgaggaacctaagtacataaagaatgttaagcaaaagatctgatttgcatcttacagctatattatcctgatagttgttagagtgtatttgagataaataaaattaaaggaaggcgaccatttaggaggcttttgcaaacattcagaatagagatggtgagaacctgaatgaaactgtagtggtatatgtagatttgaaatataaataaataaaagagttaaaacacataggacttgctgattgattggatgtggttgttaggtgaatacggacgaagaaggaatcaaggatacctctcagatctttagtttgcatgaagggtagtatgttccttccatcagttgagagcaagcacaagtaaatgagaagattgagggcagctctgataggttcatttagtgacatgttgaatctgaacttttttattgtaataatgcagttatgcatgatcattcattcatctagcttctgtgtatgtatatctgaaatgttgtactatcttctaagtagctaactatgaagagaatatgaagctttctatcaatgtacccccaatataggttgagaagcaactgcaacctactacaaaatgataagtaacgtgaattgctaccaaatacttacaagagggtgattgagtctttgggaagattgaaggaggcttcttggtcacttctgtgtctcctttaatacacatggccttcaatagaaagtattgattcacattaaaacaattttttaaagcgggaatttgttcataaaaagaatcattgtgtattttttttcctgaaagtccaagcatagcacatttatgtattgtagtttattataatagctgtgattcaataacagtaaagtcatgttgggaaataatcatattataagactcatatatctatgtgtcacctgtgaatttggctagcccttacacagtaagcataggcaatttctagtaatttttagagcaaattatctgtgatggtagtaactgttaacagtaaacttaactttacctttctaaaaatatgggttgcctctgtgcatccaaatcaatgttaactttcagtttaaaaaatcacaggcgatgatcttgaaacatatagcagtgtctgaatatttttacagaattttctatttctgaatttatttctttggatgaggtaaattaaaattagattcttctctttttattttttattttgcaaagaaaataccaatgtattttctcttcagttttaaatgcataaagacaatattatgttaaaccaaattaaaacttcaaaggtgtatgaaatgactaaatttattagtatctacatatcttattttgttatatactttatattttaaagtttatgatagttgatatttattatgcttattaaatgctaggtatttaacacagatggattcatttaatcttcacagttctattacttccattttattcagacactaaaaagaaaggttaagtaacttgcccatatcacagagccactatgtagcagggctgtgatttttaactcaagataccagaactcaatatctaaggctttagtcattatgctacatccctctattcattaaaccttttaagtaagttatttttttcaccagggatgatgatggaaaaaaattcaaacatatttgttgggaaggcctctgtttttaaagtatatcttacttctttgtctgatttactaaactgaggcatagtttagaaaccgaacgtttgaggaacaagatttctgcttttttcttactgaaaaataaaagtgaaatggaatggtgttgttttctgaaatgggttgctggtcccctgaagatatgtttatgcaacatgctgtctcaattttgcagcttacctttgtgaagctaaaacaaaataaaataaaaaaatttctccttggagctgttattggtccttttctaatctgaagaagactagaaggtgacagcacattttagttctcacgtgttacctgaaagtcaaaattagccacaatagggctgcaagaactgacttattgtatgtgcaaaacagcacagtgcaattgctttgaagactaaaaacagttattgcttaagaaaatgtgaaagattctttttattaccttgataggaaagagttcaaaaccagaaaatggattttttttttaataacaagtaatgtttaatgcaaattccattcaggacacaaaagctagacaagcatatattttttatttgataaaatagtaatttaaaagagaatgtacattatctaaggtttcataacattgtacctgaaagggattaagatatctaaaatctttgaagtctgcagatttcattttatttacttacaaggttggaattctcagtggtttgttactgtaagaaaattgtccattagcatttgtattgatttgcctttgtcaaaatgaaagaaacaaatgtaatttgttagcactttattattgaatcccttttaatatggaatatcaagaatctgggtctttattaatctgcaacatgtttgaaggaatgctttcaaaaattgaaaagaatagaaagttcaacttcattcctatttgtactgaggcactggatggattctgaactggctgtcatcatagtttatgctcatcactctggctggaatgattttgttgtcccctcctgctattctgaaattgaccacatttagtaaattggtcctttacctgaacttggtttcagtaaattattcttgcacatcttatctaatccaaatgctacccagtcttcaagtattaggaaaagcttcacttcctccatgaagtaatccctgatgaccttcactgaccttgctttcgtctcaattcctagaactttcatagcctcctccagaggtttcaaccagcatgagatggctcagttgtatgccaaaaatgggtgatatacgtgtggagacattgatcctcagggaagaaaggcacagcatgaattggtctgagatttcaggcctgtccctcctgtcacaagcaaccttctacaagaaattattgtgccataaaaatacgtttgttttgtgtgttatattgtgaaaatggtcagaacgttgcagcttcatcagtagtactaagcctttccttttcattgcacaatctactcaaaaagagatttcacctaaaatacaggtttattactatttacttataaatcatatatcttattactgtattaaatatgatttaatatacacacagataaaaattttttaaagatgagaaataaaatgtagcagccaagattttaacattttattgcattgtcttagattttcttggtatcctagccattctctagagtgtgtgagccagactttgaagtcccttgtctatatgatttgatatatttgaaaaagatgcacctaatcttgttccaaaaattattctatgtagtgtccaaaaatgaggaaaatgcaagatgaaccattaagatgtgaagaaatgaacacaaagagaaaaagaaggaaaaaagataaaactagagataaaatgcacatattacacttgtatattttgctaaaagttaaaagtaaatgtattatttttattataataactagtgcaaagagggaggtatgaccaacttcagagctcacaatatctatataatttaaaagaagaaaatcaaggattacgtatctatggcatatgacacatatgaaacatatatttgtcacatgccaaaggtatgacctttcaaaagtcaccttcttttatatatttttggaaggaggaagctttgtcatatcactcccacatttttcaattgccatgcaaacaggaatgtagccagcttatcgggagtggaggagaatcaaacaaagtaatctctggatgagctgccttgtgctttggcttgattcatgcatagattgaacagcagtgatttctaagagatctggtgcctataatataacagaatcaactgatgagatttaacttttatttacttatttatttttttaagcaagttaaagacttccctcaactggagaaaaaactagccccaaatctgatatcctcccatagaagaccaagtcaacctctctgtcactgaaaatctctttagtactgaaccactaatagcaaatgggatagcaatgggattgtaaggggaagaggggctgtgtagcatttcataattggaatctccttcacaagattattggccctgttaaataaaggtgattttcttcctatttgtacctttaatgagttaactagtaaattccccacctgcaccctactcgtgactaagtagttttaattctctgagttgtggctgtctctttggtattttaaaacattcctcaagcagttctaatgggtagccatttgagaactactgaatttaaactacgcaaatgcaaactggttgctaaggttgagggcaatggctagaaagagtttttctttggaaaatggctaatcagaaaggggagaaatgataaattgagatgaagaagaagagggaggagtcaaggatatgatgtgaggctgggacatgacatgaaactgccactgaaccccagtggcaggtgtgatcagaaccaccttttttattttactttatttatttttttatttatttttatttttattatactttaagttctagggtacatgtgcacaatgtgcaggtttgttacatatgtatacatatgtcatgttggtgtgctgcacccattaactcgtcatttacattaggtatatctcctaatgctatccctcccccctccccccaccccatgacaggccccggtgtgtgatgttcccaagaacaccttttgaaataaagatagctaattttcagtttggagtttttacgctattataataaatgtccttatgacatgtttccagaaattctatttcactgtttgtatttcatgtttatatgagtgattttatatatcaatatgggtgggagagtgagaagtgaatgaaaaaaaaaggtctggtcttgatatctggattgaaatggcacagaacaggaataaaatattgtgtcaagaaacatgatgattgaaaaatgtagaagtgatatgagaaagcttcctccctccaaaaatatctttaaaagagtaatttttgaaaaggtagaagatggtggtttggattagtgttaactgttatatttctcaaaattttagaatggaaaaacaggttgcttaagaaaatatgaaagattttagttccccaaagaaatcattatgttagataaattagaggtattaatacattacatggccttaaggcagtttttgtaaatgtggcaaaaattgtattcctgggcctacctattaagttcactgaggataaatgacagtaaaaaaatatgaagaatgcttatatttctgacctttaaagaagaaatgtatgtgcaaccagatcatcaggaagtgatagtaaataattaaaatctaagtaaaagttggtagttgtggggtggcagggagaggaatattatttttttatctcgataattaaaacaagtcaagattccgtataagcattagtactatgactttatattgacttcctacagccataagctttttttctatatagcaaacaaaagtcaaagatccaacaacaacaaaattccagcatctttctctacaagggaataaagactacattaactgaaaatagtgtaatagtcacatataatagctacatcctgtagaacccaaatctgaagtttatgaagaaattgaaacacactttatatagaattttttgcaatttaacacataattttgggatagagcactgttgtctttatttttaaaatatggaatagggtttaatagatccaataaaatggaagtaaataaattagataagctaaacataaacttgtaaattttattgttcataaattggaactatccttaaattattttttgttctgtatatctaatttgaggttcttttaaaaattattatttatttttttatagagatgaagtattgctgtgttgcccaggcttgtctcaaactcctggtttcaagcaatcctcccttcttggccttccaaagcgctgggattgcaggcttgagccactgtgcccagacaaacttgagcttcttaatgaattgtatataaactctaagaaaagattaccggaacttattacgaaagaatccgtttatctacaaaatttgcacaattttgttagctaataaacctagggaaagtaagtctcctagatgtcaaccagattctcatcttccctgacctcattcaccaaattatcattttaggaactgtgtacaagaatcagtcctcattaccagatctaacagccaacctcagaccctcctggaaggaactgtttatggcagaaggttatatagttgttgttgttctccttcttgttttgtttttaaaggtaaaaaaagtttgtaatgagactcatctttaataaattgtggtgctaacttctaatattagtagcctcaccaactatgctaatatactttttgctatccgacagttattctcaagttaggtgccagatctagaataaagccacatttatacttagtgcagataaaacttgtttcaaattattggccatatggcaacaagagataatattaatgtaagaaccttctccctcaatttacagttacagaattttaagaaaaatctttttcaaagctccttagttcatctcactcttctcatatccctaatattcccctttaaattatgctaacataatttaaatggatatggctatgacaatgataaaaacggagaaatgtgttcccttcccttctcctctctttctttctttaactttcttgatgactcctcttaattcaatagtcaataattctcaaagtcttttcatcttcaaaattttttccttgcccatgttgcacttgctactatttgaataataataagaagaagatgaactagggatgtttacaagtttttgatgttcccaaagttaaagttggatataattatttttaacagagttgtggttgttcgtcatatttatttttcctcccagattctcagaccaaaggactaaagcttgacaattcatgagaactgacccaaaatatacaccttttatacacatgatatttataaaagactcatcaaaaaagcaagtatcttgggattttcctctctcaaacactcttagcattgatgaagaagatgaaatgataaacttccctttactattttatttcattttatttatttattttttgagacagagtctcgctctgtcacccaggctggagtgcagtggcgcgatctcggctcactgcaatcactgcctcccgggtttacaccattctcctgtctcagcctcccgagtagctgggaatacaggcgcccgccaacatgcccggctaattttttgtatttttagtagagatggagtttcaccatgttagccaggatggtttcgatctcctgacctcgtgatcctcctgcctcggcctcccaaagtgttgggattacaggcgtgagccactgcgcccggtcccctttactatttaataatagtttatcttgcttttattactaattttactactaataaacaacttattattaaacagtaaagggaagctttacattctaaagtcattgcttatttgaagctgctcatttgccccttatctggtaaagtgagcactatcagccaaggtagataagcatgttgaactagtttctgaaaataagagaatattcagaatttctggcctgtccaactgtactaagaggtattaatggttgaattagccagatatgaaggggagagtagagttcaacaatagttgaaaaaagtatagattctagattcttaattaggagagcattgagataattaatgcattaaaataaaccctatctactaaaggtatcactcatatatctcagcaattttacctccgggtaggtatccagtagaaatgatagtgtatgtctcttctaagacatggaaaataaagaattttcatagcattagttgtaacagacagaaattgaacataacctcaatgttcaaaatggataaataatttgtggcattttcacaccatggaaaaggaagacactttcaacagaaaagatgaatctaatggtcataattttgaatgaaagaacaggccaaagagtacatactgtaatttaccatttatcaaaacattttaaagaaaactaatctaaggtagtagaagtcaaaatagcggctgcccacaggggaagagaagagatactcccagaagacacagaggagtctgtgtgatgctatcagtgatctatatcttgatcaaggtagtggttacatggttgtgttccatatgtaaaagttcatcaaactgtacacttaaaatttatatacttaaatatatatacattataaattactaaggcatgacaaaaagggaaacaatttgcctcagagggaagtctcctgcggtatgtcaaaagccgaggtggacggatcacgaggtcaggagatcgagaccatcctggctaacatggtgctacctcgtttttactaaaaatacaaaaaaaaaaaaaaaaatagccgggtgtgctggtgggcgcctgtattcccagctactcaggaggctgaggcaggagaatggcatgaacctgggaggcggagcttgcagtgagccaagatcgcaccactgcactccaggctgggcgacagagtgaaactccttctcaaaaaaaaaaaaaaaaaaaaaaaaaaaaagtgcatctttgatccaattcaacacatttatcactagcttgaatcaagatgaagaaaacctacatatcaaatttgtggatatcacaacaaagtttcattgtataacatataatttttttaaatgtcaacaggcaggatccatgatcccatttaacaagctgacatttaataggataaatgtaaagtcctgtagtttaaaaagaaatgtgacataaaagccacgagtagcatgttctgggaaaaatcatatgctttatcatttttagaatcagacaaacagagctaattaaagtgaacaaaaactacaggggaaaaagaagatcttcataacagctaaaattggaccatacattgagatattgtattccctttatgtgcaagcgaaaaataaaagcattagaagatcatagccagaagagatcctaaaggttatctaaattctgccttctgttatttaaatacatagatgtactttttacatgaatatatttatatttttattcatatttatatatgaggaaaatgggggatgaagaaaaagcaactttgtgaaatgttcatggtaaatgcagaacagtgataagaacccagccctagactccttgttttctaccctgttattatatcttcctagtgtgctggtgattattttaggacagagcatcatggtaagcatatatattatattttacctggcatatttttatatatttatgctgttttctgaaatagaatgtacatttatgccagaaaacataactgaattttctaggacctaaaagcccataataacgtagagtagagtgttttcacagaaggtggtcaacaagtgtttgttaattaatcataagaatacagacaagggtgaaatatctttaaaacacttttatttcctttttcttattatcagacagaaccctgcatgatttagtctctaaatacccagggaaaacttttctcccaactaaaaaatgtaatatttctcattgtcaaaaggtctttccttgttttacagataaatatcattgtagcaatatatggttttccctttaattctgaatttaattataattataatgcacaatagctggctgccgatttccctatatggtaattcttgaaaatggcttcaaagactcatatttgtcttattatatctgtagagatgtaattataattgttattatcttaaattacaaattctattttacaatcctgtaattatattatacattaccaaattaccatatgtcttaagatagtttatttttaattttactctagaatgtaaactacatgattatagagatagtgtctgttagatcaccaccatattttatgcctacagtaattcttagcacaaactaagaattccataagtatctattgaatggaggtacttaagaaatatatttggaaataagtatcaggacatggttctgaaaatcttctctttctatctttgcaactatctccattttgtatctttacaatttgttgtaaaatgttatcctccttcaacctgattcttttcctaattaaaacattctttacctactttgtgtttattttgcagatactccaagatattagaaaacatgttttcctatcttagcaaacatttggtctagtgtgtgtttgtgtgggtatacaacatatatgtgaaaaaattgataaggaaagggatttgggtatcaatgtgtgatttaattcttctatactcttggttctccttaatgcatcatcacatgattaatttactcaccaatttcccaaatgtacctaatagaaaggatacgagaaaatatgttagttcctcaatgctgtgatctcatggtcttgaccatttagagatagcttcagtattacaaactacctatagtacatgtgactatattgagaaaatttgggtgagatgcagtccttatccatgaaatatttaatggtctagttctaggaagaaatgcaaaaatgcaatttcagttcaatatgacaaagatatgttcaagatgtcatggtgtatatgggaaggaatgatttatgattatatattgactaaaattttgcagtactgacaaaggtattagaaagtaatatgaaatgaaggggtacctttttttttttattgtaaagattgtcctgattttcttctttgaattcctgcaaaaatacttgcctgtatggcttacatgttgctcatcttacacaatttctggttgttagccatttcttcatgtgtataccttctgttccttaatgagctaaaaagcatttttatggcaagagatgtgttttctttgtatctgcctcccaaccagtctttattcagcatatcacattacctcattactcactaaatgcttactttgagcttattatgtgccagaaagtattccagataaccagggataaaacagcaaatgaaataaagtcccagccctcaaagaaattacattctgtgagacaaaagagacactcaacaaacaaaccaacaaatatataatgtgtttgataatgataagtgctacggaggaaaatacattttggtgagagagaatagagcatggtaaaagaataatttttgtagaataggcaggaaagtttcaataagaaggggatatttgagctaagacagctgagatatcttggggaaaaacgttcaagacaaaaagaaaaaaaaatatgtgaagactcttgtactgaagaatattttattttaggaacaggaagatctattactagagatgggtaagtgaggggaagtgtggaagaaaattaggcgagggaggattggagggagttggtagatcatgaaactcatgagaaggaactttaattttaccttggatgagatgggaagtgactagagagtttggtgcgagacagcggagagaaattcttatttacatttttttttcctttgggaatttctccattctaacttatttatattttaaaagtatatctgtagctatacttttctaagcggcaaagcaagactcatgtggaaagggaaaagtggtagctaggcaacaaattagaaggctgttgcaagacttcaggcaatagtggttattggtttagttacaacataagtagtagacagtatgacgtggttggataatagatatgtattgaaagaagaaaaaagtgaacaaaaaatgcttggtaatggattaaatatgagagtatctggtgattgattagaagtggtgcatgtgcaaacataatcaggacaatcccgatgcttttagtctaagaaacagaggatggaggtgccaactatcacaccaccgtggaaaggggagttgtcaggcagaagacttcaggagaagcatatttcattgagaatttgtccattgtacatcaagattgctttatctacaaacaagcagagaaacaaaggagacagttggacgtataagtctaatgtttagggaagaaaattagactcaacatacaatgcttaatatttatgcaaaaataagatttatttttgttgattgattccctggtacaataatgaaaaaatgtgaattgatgtttttaccaaatgagaaaatcaaacaaatccttgctttctagacatatatttggatagggtatctctgctctgctgcaaacaattgtgtgtctgacttaaccattgctgagaacagggattatttggaatcttttcctgaactggtaaaagtaaagactatatttcatttgaaacagaacctcaaagcttgctgataaatggctttattatactaattgcattttctttattttcatagtctgtcagtgtgccagagggaaattttattggtcttaaaggatttattcttcaaatggccatgtaggtcgcaacacaaaaacgtacttagttgctggcaaatttattatttaatgattcttccccagtgtctttctggtggctgtgtttaaaatcattggcctgtaattactaccctttatgcatatgcatgcacatatatttcatttatagtctttagacacatttttcattcaagtattcaaaaagtactcttatataaagactctgtgatcacatagaacaattcttcaagtattctcaagcccatttggacaatgagagtttgaaaaataatgtaagggtcttgtagttgacatttaagaaactcgtaccttagaaggaataatcggattataaggcatttttaagactttgtactttctgagtggccttatgcttaaaacactcttgatataattgaaatgctcttatgtttctttctgtcctctctctactttgaggttttgttgagttgattttccctagtagtattcattttaataggagattcagacataggtatagctgtgaagagaaaaactgtggtccaaaataacatggtttggaatcaaagctgcaaattcatgcaggataaggatttattgagttaaaataagtagagaaattaataaaaacaataaacaatgcaatagattatttctataatatttcaaaaaatacttcaaaaatcatttgactgaaatataagttctttcatgttcttttcatgctttttttttactatttatattagtaaattatcctgaagaatacttaaaaatctagcatacccaggatgatatcctaaaagatactgttgcaatatgatcctaacaccgatattgataccttttacagtgtgtgtatatgtattttttttctgtgtcttatccatagaaaatgataccatctactggacagacatgggcttcaataaaattagcagagctaaaagagatcagacttggaaagaagatatcattaccaatggcttgggaagagtggaagggatagctgttgactggattgctggtataatccatggctttttatctttctgtttcacacctattttgttaggggctcaaactgcttcataaaaaatcttttctaactcataacagtgcttttatttgtacttctagccacaggggtaaatagtctcttttgcttttggcttcgctccttctaatgtttttgagcctttggataagtttttttatgtagaagtagattatgtagtgttaactttgcccaaatctcctgagagctccagaaggcaggtaaacaagtgttagaagttctcttttgcctgaagtcagtagaaagttaaaataggtattttctttaggtaggagaagtttcaacttcgttttaccatgtaaatatatcattatatggtttaaaccagaggtgtgtgagattaggattgaaagtatttgcatattagtttatttacagctttctgcttaggaaacacatttaaaaagaatgtaggaagtaaacagtttcttgatagttatgtgaatgctcagaaatttaattttagtcatgacaaatacattttttttctcaaaactgtattataaacacctctattatttctcctaggtaacatatattggacagatcatggtttcaacttaattgaagttgcaagactcaatggttctttccgttatgtaattatttcccaaggcctggatcaaccaagatctatagctgtgcacccagagaaagggtaattttaagatttacgtatatcttccaagttttatgtgagttttctaagttctattgaaaaaaaactaattacttttagctgtaatgtctgagacaaaatcaagaatatcttacctaagcagaaaaaaatgtttatattcactttgttcatataatttagtacatattcgatgaagtcacatttattacagatttattttatgtgtgtgtaaatccaaataaaggcaccaacatgattccagattctcaatttaaatctcttccttagaattgtttacataattaggtattcaattatttattgaattagtaaaatagccatttgatagccctctttgctctccaatatttctaaaatttcaatattcattcatgtgtctgtggttgtcaaacatgttcatcccaaacttttgttttcttctccttccttttacttctttttttgttttgttttgagttctaaataagtataactaactgttttgacattttcatctggatgcttcatgagtacccaaaatgtatatatataaaactgaaacgaatttaatctgccaccaagttatgcttagtttttcttctaaataaatctattagcaatccaacaccctctatctttatctttaccctaattaaatttgatattatcttatatactgcaataacatcccagtctgtctcctaaactcaccaaagcctagagtgatttttttttaatatacatctgcttacttaaaatctttcaaggaatttctattgctttatgtgtaaagtccaaagcctctgttatgatccttcttaatcagaccctataataattttcagtctgaaactcctgttactctctttttcctttcacaatcaatctctgttggtcttctcttaatttttaaaatatttcttattctattccacttccagcctttgccaacctcttccttttacctgcaatgctcttcttatatttttgtcttgttaaattttatttgaccttatttggctttgaaaatagtttagattgttgtatggccccataagcacctagtatttttattgtatacattatttgtactaatatttattgatttgcctggtagctgtacgtgttcttgtttgtttttgagacagcctgtcattctgttgcctaggctggagcgcagtggtgcaatcacagtgttggacttacaggcatgagccaccgtgcctggctgtaataaattattatagccttaaaggagaaaatttgaccagttgcttcactgtgaatcattattctaaggcaagaaggaatataatttgaaagttatgcaatcccatagatacactggaaatggatgtttagtttgtttctaataaagaatttatttgcttcatagttgcaataagtccatttatattatatagaacctcttgtgtctaccctattatagattcatacagcttaatttaacaagccttttgctgctacatgtcaatctgtggattttcttttcatttcttattcaaatccattgtagacccttaagctgatatcccagagcttctttttcttaagtacctcttatctctccacatccatcttagcctatgactacacctacttgtctctagcttgattcagaatattaggcaaaagaatcttcatatactctagtttttatcaatttattcaattaacgtttattgagtgctaggcactgtgagctaggacatgtcagcatccctccatgtcatcctcagccttcaattcagtacatcttgacaaaatacaagtacatatgaaagacacttgtagacactgtgaagtatgctggcatgaataagatgttgcctctattcacaatgagttttctgtttaaactgaaaattcaaacaagtacacatttcagttaaaggaatagtgtcactttgtaaagacttattttcaggcacaataaaagactaattgatcaaactcaaatttaaagctcatatccaaatgtcatgttgaagtagtaagtttcataagatcactataaaattatcttgggtttaatgcaaaaatcataccatataattagagcaggtagtaaaaatgagggtggtagcagcaataatagtgattagtagaagctttgtggaggaggctgcaagggaaaggaggtttctgagatggggtaggtatatattatatgaagaagaaatagaataattaaagatttggtagtgacaaagcaaaagccatcagcaagagtgtaggtacacgaggtacacatagggaagagtaggtgatgtgtctggaagacaacttgggtctgtataattgttggtaggactccctatatatttttaaaaaattgccagggtcatgccttctccagtttaccaagtgaactccaaaccagtcctggaccctctctcctcagccttcccttggcctcaaacaacatacagaagctaagatcagagttgtgatgtgagtttatcgaagttgtaacattctttaacataaagaatctttaagaatggtaatttatcatccctgtggattagacaaaagggttctttcccttccctcaagccaagtaatggagagagctcaagacaaatatgtaagagggaggctaaaataaagagaaaatagcagtaaatgaaaaaaaaaaaaattctatacctttttcactgcaaatcccaataccaaagggagtcaggtcaaatttggagagagggaagagaatgtgctctaaaattaatcttaactgtatgatactgttcatttaatggtaattggctgggaagttatgggatctttctgagacagccaagtttggagaggaaatactcagtaaagcatacatggaatcagtagttggataaatataaagtcacttcttacttattccaacagaattcaggctctgtaataagctgcgatagtgtacgaggttacccaagaaagagtgccaaaaaaagaagtctaataacaaaaatgaagaatgcttatagttaggggatagaatgactaggagagagaaaaaaaagaacaacaacaacaacagcaacaaaaacagccatttgaggctttggaaattactgaactgtaaaagtcaagggaagagagtttaaggaagaacagtgtgccagcaataaagagatcaggagagagaaaaaaagcagagaacagaacatgtaactggtgatgaggatggtattgcatatttttatcaatttcagaagatgagtaaggacagaagccaaatataaagagtagacaaaagaataattagaaagtggagctagcatatacagaataaactgatgcaaactgggtgatgaagggaaagaggagaaatagaagataagttgagaagattgtagagtataaggtttttcttagtatggggatattgcacatattcataggcaaaggggaaataaactggttggaagaaagaggatggaaatgaacgtaaaggggagacaaattccagggagcataggaggagccttgacaagggagaaacaatagggcagagcaggaggaatcacagacagaaagcagggaggcaagatttgtatcttacattaggtatcccagaaagagattctaggatgggaagtcaactcaggacctgaaagcatagtcagtcgaaaaggggaagaaagagatcaagcaaatatttaattttgaacataatcttggcctcagactgattcctggagggactctagagtctaaactttaccttacagtgacggaacttggtattcagattcccaagtagtcagccagtggataaggaccactccgggaaaacagacactctcaaaatttctgactttcagcacttgtgggagaagagattcaagtggccccaggataatcctccaaagaaaattgtctgtgtgagctgttagggacaaaggtcatttgagagctcagaaatggtaaacagcatctgaggatgtttatatggagcacagacggtgtccattacagtttggaatccccacttagacatttactatttttacatttgcctttgaggtatttctaaacttcttggtctcaaatgcctatatccttttagttaattgggaggattaaatgaggtgggtgctagttctcttccccttcggggatggagtgaaagaaaagatagaatgcggagatcaaatgtattttagaggttaaattgatgaaattgaagaaagtcacagctgctagtctgtatttctaaggttatcagcttaaaagtgaataggttaagttttgctgaagctattgtagcaaatattttccacaataatgaatcaaataattttccagcaacatgagactagccaggatggatttctagaatctaagcaggaattttatatgacattgaataataacacttgataatgtacgggtagtaaagaaaagaaaaagaaaacatgtaccaaaaaggagaaaaaaggttatagatcaaagttggcagttataatgggttaactttgagttaccaatcaggcggtgaggcctgcaagctagtgatggaatagtgggaagtcaagagtagaccagggtaagagtagagagataaggtccagctggtatgagtgaccaacacagctctatgaattaagagagggtgattctaggtaggtccctggagcaataaagatgaggtactatgagcttgggtgtttctatgtcattaaattccatagaatgtcagcagtggaaggagaagatgaaaaatctgccagccagtggtaaagcaataaataaatggtgtgtaattgtgacaggtgataatgcagtcaaggaaaagagaatatgtgaattaatgctgtaaatgtttaagtgagtataacctcagaaaaaggtttccttcttccttaaaacgacttctctacttttattctggatataaatgtctcctcagacatttcatgcaaaaatcattctcttctattttaccaaccttaatttgttcctttcaatgaagcctttcccttttgctttcagataggctcaggtcactctcattagataacacattactaatgtcattactttccacatgttttcttctcaacttctcagaatcatgatctatatccattgtctcatcattgaactcctaaaatgggtttcagcttctgttgttacacaggagtttctaaatttatttgccgctacatccagagatgattattattatttttgcaggttttataccatttgccttctccaggacagttttctccactgatagtccatccaagaattcctttttttctttagccttctctgaccctgcattttctggttctctctgaggctactctatatagctcctgtgagcattatattttattctctttattctcatttaagactttgtgtgccattctctctcttattatatttatcttttaaacccatctaatcccatgtttttaaaatgtaaatcatgcatatatagtgaaatataaaaatataataaatatatgcaaaatagtaataaaatatcttcacccctttatttatatttctgatatcctttacagttatttatttggatgtctgtcactgaaacttaacatgtcctcctacctctcatctgttgccttcctttcttaaatatgatatctcttttcctgttgtcacaaaagaggttgaaactttagattttccagtattttttcatcacctatttccatctgtcaacaagtctcctcatttctttgctccagatgtttgtcagattttttttatttctctccattgcaactaccagctcagcactgactcagcaggaggatctcagtaaatatttttgatttcttaattttgagctctcaaaatgagaattgtatgtgagtccacaaaacaagaaatctttgacatatgtagcaatatttaaatattatttacttcgtcttaaaagcattttaaaaatattatgtcacacggataaactttttccatattcatagttaagagtagatacactcatttaaatgttaaacttgtttctaggaaatatttattacggcttggaaatattagagatgtatgtctccctacactttctccatatatttattgacttgaatttagagagaaaataaaagacttaaaaatgaagattcttgtaaaattattcaaacactgatttccagctaatattatatagacatttaagtgtcaaaatttatatcataggaataaagtacagtactttaatattctgtttgaagttaaaacatggcagatggtattgccaagggaaaatgtgaaccataatggagtgaattagctgaattcaaagtaaaaacatgccttgaaaagtgggcacaaatcctgtttttaaacaatagagacttgagctcttttaaaatgtagccaaatacaaaataggaatcatgtatgagtttagtttagcttaaaaaatcagtttctttcagctatcattgactcctcctcctcctcttgttcctcctcctcctcctcctcttcctcttcctcttcttcttcttcttcttcctcctgctcctcctccccctcctcctcttccgcctcctcctgctcctgctcctcctctggtattacttgctttgtgaaaattgaaatgtaataattttctccatgctgaaaagtcatttaatactaacaatgaaaagatgtataggaagccccattaagatgttaaaaattttgattaacttcccatggtatataatctctaactgaaacacatactgtaattttatttccttttaagcaccaggatacatgttttctctcttaatttagctctgtatttctgtgactgtaaataatgtgctgaaaagtttttctttccatggcaaagactcaaattaacatgggatcttgctgtttcaaaaggtctttttgattatgtatatactttttcagtatgctcaacaatatataaaaggtcttggttgacagtttaacacctgttaagacaacaacagtgtagtgtagtttaataccatctcttagagtatattttgcatcttaaagcaagggaacacatatataaaggaaatggaataaatttgatttaccataggaataatgctggtaagataggttgcaagtcatggaacaaattaaaaacttctttataatattttgataattctaagtcagctcatgagctctagaagtataggctctgggcagctagatgttaaatatttggtaaattcatagttataggaaaatatcaaatatatattgaatgtacaaaagtacataaacatggactattcaagaaaattataaatgcaaacaagctaatattatatatatgtacatgtatatgttaagtgtttgtttaagtgagaggatgggcaatgaggcagggtgtaaacacatatataaaatgaaaaatgaactataacatggtgtaatatttttaatgtgctatgaaatattatatatgtgtgtatatatatatacatatatataaatattttttgtttgtgaataatttccgcttctccagtgtgtgctcttcatacacataataattgtcctatataattactcaaaactacaatgtagtgaatcaagaaaggctcaaatgtaaacttaagaatagcagaccaagaaagaaagaaattgacaaataagttaaataattttgaagcttaaacagaaagaacaactcaaatggcctatatctttatttttgcctaaaagaaaaaaaaaattctgaagttgtttacaggaaagacaacttttctcaccacaacccttcaacattatcattgttcaagcccctacatttatgacttaaagagactagcaaattttaagtatttctaatcagcatttttctcagatactaatttacccatttgcctctgccattaacaatggactttatgagggtacctaaatccgatttattttgtatcatcagctcctagcacataatagatacctaatgaagtatttgttgatgagtgcatgagtacagtgcaagaataagtttgagaaccaaccacaaaaccaacaataacaacaaaaaatttgaaaagtgcagtagtgtccaagggtagactggttttatattttcatccttttagcacagggttctgctacctgtggttgagtgctttttatattacagaattctttaatcaatagcaacatatttaagacttgaaaaatgatttgggataggcctgtaatactttctcagacaaaactgtacgtaaatgaagaaaaagaaaatgtgaataaggcctcacagaaaaagagaacgctctacatttcattttattcctcaggagataaaaaatgtccaatcatgtactcataaaatatattcaaacttttataatattatcttattttacttatgatctgaagatgtagccatggacatgttgacttatagagtattcagtttgtatgaattttgagtgattctagtgcatctgctaagaaattggaaattacaagcagcttttgtcaagttaaaagcttatgctcatgtaaaggctagctactattgttcatctgtagggtttttatttggctttcttttttgtttctcttactttttgcagatagggtaactcactgttgactcccacgctaggagacgacacaatgacattctcgattcttttcttgaccaaggccaactgccgacataagagaattacctgatcttcatttctgtgccagcatgaacattttttggttatctcaggttttctttatcatatgtaacaaaggatctaaatcatactcacttagggaagccagaaaagtaggaagaaatggcacatttattgtaaaaattgcaactcaaattcgagctctagggaaacagtttagcaatcaaagaagagaattttaaatccagagaaaatgattaatgccaactagtcttgcttttcacaactgttcacatatgtagagtataaggataacatttaatactgtttctcttaaaaaatagacttatttattattttctttcactccattacccttctcacacaaaaatcagagctttgtcactaatgttagctgtctcaaatttattcatgggcatttataataatttgaatgtgtattttttcaggttgagtataactgcctgtgacaggaaaaaaaaaagtttttcctgaaaagtatacctgtatctagactaattctgatgtcaatctgtacagttgtcagaagacaaatacaattaactttcagggtccattaagggtttgctaggcctttgggcgctccagtgctaccaaatgtgatctttttacctatttatccaaatgtcaataatcagttggaaattaactcatgatatgtgctcattgcactgtcttcctgctcaaaactgttagagtctagttaagacaataaagacatttgtattatgacagtttctgataaaatttctataattctgaaagccacttttaaatgtcccttttaaaattatatgtttttaaatttataagtgcaagcttatttaaataaagaacattttttagtttaacaaatactattttattattcagataaaattcagttacacaatatagcatttgatttggacaagtttaatattttctagatttcagaaagtatttttagtagggctacatgtgcccatctgatactctaaaatcagtttttcttggctatatcatatagtgaacacgtttttcacaactgcaaaatttgaactcaaataggttcaaactcaatagtaattttgtcagtcaatgttaatatcagtagggtctgaacctactggtcaaaaaccagggacaaatattttcatttcttcctattgctaaagaccacatttagatgccaagaatctatgttcattaatgatatctcaggtgcatctatgtaagttattaccttaaattacaagtctctttctgcagttttacgagcttggagagggttctttctctacatttggtttataatccccaaagtttctcaaggtgcaaattccattcatttctttactttcaatttcagtttaaggagcaaataaattattatttgcttgacataaaatgtttacttaattttgataggattaaaaccttttacttttattcagttgataaattatttaactctaaaagtgagtcctacacagaaagatttggcttcacatataatgataccatatctaatcactactgttttccacaggaaaagaattgtgtaaattctggattaaaaaatagttttacttagaataattttatgcatttttttttacatttatctcagcctcttgcatgaaagtatcacaaatttaaaatgaataggggttacttggaaaaaaagagagtgacttctttctcagagctaagacctttttcatattttgttttctgtgtgtgtctgtgtttttttttttttttttttttttttttttttttttttttgagacagtctcactctgttccccatgctggagtgcaatggtgtgatcttggctcactgcggactctgtgtcccgggttccagtgattctcctgcctcagcctcccaggtagctgggactacaggcacatgccaccatgctaggctaatttttgtatttttagtagagaaggggtttcaccatgttggccaggcttgtctcaaactccttacctcaagtgatacgcctgcctcagcctcccaaagtgttagtattacaggtgtgaagccactgtgccaggactgttttttggttttaaatatggagattttttgttacgcatcttatagctaaggaaaaataacatttgatataatatcattatatatttctgtgttatctttctatttggtgagacagtgtattctagggaagacaatataggcctggattagtaaagcctgagtgtggttcttggcttgccctcttattggccatgtggactgtggatcatttacttcctagtcataattaccatagctgtgagaattagggctaagtaggttggttgctacaaaagtaattgtgctttttgccattacttttaatagcaataaacacatttatttgtgtaccaacctataaatagcttatttgatctgttcactcaaaataatatttttattagtgcatttgcaagtagattaacattaattaaaatctttaatatgcacatttcttttcttatgtgaactttggaatatgttaaaaatagatgataagaatcagattagacaggtaagcacatgtctgccctggtctcacagtgcctccttcacagtataacattacctgccattttaatacatgtttttccttaaaaagttaagtgtagcaatacatttcatttgcgagttagttattttatattgaataatatttttcatccactgacagcgtaccttaaagtcttaaaaatcttgacgttaataaaggtgtagatttttaaatgcctgcttcaattatatcttaccaataaaatattagttggattttatgctacaaagtttttcctttctgatttataaagcttgtaaatatgaatgaaattttcttcaggattaatataattgagattgtagccatacctcatttttgtttgtctgtaaaactctacaatgtttattttacacagcattttcaagaaaaatatcaactattaaaacaaattaatatacataaataatacatatatttttatctagttaagtatcactttgtacttaaataactccagtgagtataaacaaaatataagtctttaatttttctgtatgcagtctcactgattcttacgtgactattcacatatattattcaaatatcctgacgaggctgcaggaaaaagggaatgcttaaacactgttggtgaggatgtaaattagttcagccactgtggaaagcagtttggagattttacaaggaacttaaaacagagctaccattcaaataatcccattactgggcatatacccaaaggaaaatgcatcattataccaaaaagacacatgcactcatatgtccatcaccctgcttttcacaattgcaaaaacgtaacataaacctaggtgcccgtcaatagtagactgcaaaaagaaaatgtacatctatactgtggaatactttgaagcaatgaaaacagcccttttgcagcaacatggctggagctggaggccataaacctaaatgaattgatgcaggaacagaaaagcaagcactgagtgttctcacttataagtgggagctaagcattgagcacacatgaacatgaacatgggaacaagagacactgtggactacttggggattgggggaactacccattaggtactatgttgactatttaggtgccatataacttctaagaactagaaaaagatacaataatttttaaaaattaggaactatacacccagctgttgaatcaatgcttcccatattttttaaaactttattcactgctgatgtctgatagttggataaaaacttcagtagatgtaacttcaaattaagaattaagaaggaattatatttatctaaaagcatggatttctgtatagtcctatgaatatcgaattttttgaatgaatgagtgaaatacatggattatgtacattctgtttttctacattttattttatgacatgttgttttattttggcatactatatgtgttctttctgcatgacattttctttcacatagtcccccattacattttgttttataagattactaaaataagaatttctgcttttgcataaaaccgtattttaagatgacttcacaagataacataaaattcaaactagattagttacatttagcagtctaagtagaaaaaatagaaagttatgatgcattcatgtctatattcataaattaaatatgtatttaccacaaaatttctaattacctggtgctaaaggagtaatagtgaatgaaaatagaggagtgatcactgtccttgttgagcttacagtctagtgggggcaaaaaatatttataataaatgataatgtaaggaaatacaagtggaaatttgccattctaatctgtgttgtgaagcagagcacatggtacagggaagacacagaaggcttctggaaagaaatagttgagatatgaaaagtaggaagtaattaggcaaacagattggagaagagcatttgagacaggaaatagcaggcacaaaaggtattttggtaggatgttgagtgcatcctatgatttgtatgactggttaactatttttttacgataaaaattattttatcggaaccataagcacactgtatattaacttccgaaatgtattatttttattctagtgtgaatgctactgctgttattagtaatgtctttttgcatagctctgcatactacaaataaatgtacataaacactacaaattaacaatttaatttcagcctcttgttctggactgaatggggacaaatgccctgtattggaaaggctcgcttggatggctcagagaaggttgtccttgtaagcatgggaatagcatggccgaatggcatctccatcgactatgaggtctgttggatttcttttcagtatttaaagtgccttaactgacaactttaatttacctacttttagtgttcctttattttcttaataaaacaatcaaatatagtctgtaacgttacttcttaatcgatatttaggaaaataaattgtactggtgtgatgctcgcacagacaagatagagagaatcgaccttgagactggagggaatcgcgagatggtgctgtcaggaagcaatgtggatatgttttcagttgcagtctttggggcttacatctactggtctgacaggtaatttattttttcataagtatttgagtctcaaaatgttatttcagtgccagttgctttacccttgtaggatttaccatttcttagcaaggtcacaaaaaggaactcacaaagccagtaatttccacagaaaaggcaggtactcttgctattccaagctgaagcatttcaatgtcacagactaaagttggtttctttcccttctgttggtccatctgttatcttcagcttaagtaactggcttgactttaattagtcgaagattgttgatcatgtatgttcaactttttggcagagcacatgcaaacgggtctgtcagaaggggccacaagaatgatgccacagaaacgataaccatgagaaccggccttggagtcaacctgaaggaggttaaaatatttaaccgagtaagagagaaaggtcagcactcttgaaagaatacataatatgtatattttatgtgatttctctccaatttttaaaaacattgtcaaacttagaaattcttctataagtctaaaacctcaaaacattatctttacatctaatttcctgcaagtatcatatagtagcctaatacaataaatatgtcatatttcatacaaaagcgtatttgcccaggacagcacaggtacatggacatgttacatacctggcatgtcttgattataggttttggctaaggaatatagaaaaacttgaaacatgtattgattggataaaaaattaaaagcataagtaggatattaataaaaggcagttgaaatttttatacataatatgaatcatattatataataagtggttatgatcccaaaggtgatgctgttaatgtaaaatatttccaaagtcattacttccttaaaatatttattctaaacttacaggacaatgatttgggtatttaaaatttgtttacctccattaaaataaattgtaactaacttttttgtatcaaaggaagttataataatgttggagataataataatgaattcacaaaggagaattagactggtgaagaaattttaagtgcattttttatcttcacttaaaattggagtaagaacttatgctcagcatatttaggaggttaggcacattgtagctatagatttctttgatgctttccatatctcaaagatagagtttaaagcagtgcattatttctggtgagatcaattcatgttttaaatgaacaatatatgaaacactataagtatcaagtttcaaaaaagatttatatacttaactggttcattaagggaaaaatttaatgcttaacttggatggtgaatgaaacagactatgattttccaaataaagaaacccaagatttaaactgctgtgattttttaaaaaacaatacttttttaattttttattgaccagcttaaaattaagagcaaaaagagaatattcaacatcaaagttttaatatttctttatggagaattttgtttcaaaaacaaaagaaaaacataaacatgtgcatgtgtgtatcatttttcttcattagggaccaatgtttgtgccagggacaatggtggctgtaagcaactctgtctttatcgaggaaattcccggagaacttgtgcttgtgcccatggatatttggcagaagatggagttacttgcctgaggcatgaaggctatttactgtattcaggaagaacaatattaaaaagtatacatctttctgatgaaaccaatttaaattccccaataaggccatatgagaatccacgttatttcaagaatgtcatagccttggcttttgactataatcaaagaagaaaaggtaccaaccgaatcttttacagtgatgcacactttggaaatatacagcttattaaagacaactgggaagacagacaagtaattgttgaaagtaagtacagtaattcaattttaaataggtggaaatgagtatcatttagattactagagaaataatagtggtaattgcatgtagcaattacattttcctagattttatattcaggaatgaatgtgactatatcatctaaccctcaccccccacccccccgccaaatgtcaaagaagcaattaattgctagcatgtacagcaaattatgattattaccttctaatcatggaaggtttaatatgttttatcataatgtttcttataaataactgcactaaaattcatgaaaaatcatttttcagtgtaaaactattctaattgattttttttttccagtgggcaaattgtatatttaagaatatctgttcagtaatagttaatcatagtttctcaagcaaacatcagagattttttttctgtatatatgtgtatatatataaaatatatatataatatatattatatatgatatatcatgtatatgtagcagatgagaaaatgttatggaaatgatctaatatttttaatgtttttatgggacataattattcaagcatagtgttcagtgaggattatccacataatttagggaaacctttttcctgtcattcaagtttaacaaaaaccatcttcttattcttcacacaacttctctcttcttgatgtctttgtgtgatttccatatatttcccattcttccagtttcactatgtggaaatcaattttttctttgctttctaaattgcaaaataatatataaatttgttgtagagtgttcaaataatatggatttgaatatgaaatccctgactcatctctgcaaccatcagtcctatttacttacccataactaacatgtgacatgccctagaattttaagtatgtgtgtgtaatttttaattataaaagtggaatgatactaaatatattattcagctaactgcttttttcatttactgtgtattgcaaagcttttattttattacatgaggcttcatcttacacttttgaaagcctctacctagttctatactaaaggtaagctagtttatttaatcgttttttaataaaaatttagatttgaataactaaactatagctatccaagcctgtatgtgtggtggatattttctaaagaatgaatacaatgagtgtgtcacttcaaggtaaattacctactgtgtgtgttgcaaatggtaaaaaccaaactctgaagtaaaaaaattagagtagaagtcttgtatccaccacagtaaccttgacagcttcccagtacttacaggcttttctgttgacatggtgataatattaatgcatgtgatttgggagtattgcataataaaatgtgtcaacatttagaagctatgcataagttagagaaccaatattttcaaatgacatgataaaatcatgcatgagtaaatgatttattcaaagtgcaagatagaccaatgaattttaatgtaatagaggatgaaaagttcatcactatggtttcagattccacactgcaactaacctttaagtaaccaccacttgtcacgtgttggtgtaatatgaaagaatactcagttatctgtaaaggctattattaaaacgctcctctcttttccaattacacaacttcgggaggctggaagctcttcatatgcttcaaccaaaacaacacaatgagaggataaagaggcagataggagaatccagctgtcttttagtaagatggatattaaatatatttgtaacattgtaaaacaatgatttcttgttattatttcttgttattatttttgaagaaatagttacttttcttagaaggtgctatttagatgaacgcaattgttgcattattctaactttaaaaacattgataaatatttaaaacaatttaagtttaaatttctaatatggtaaatagatatagacatgacccacatacacagactctggagtcttcagtaatgattaagagtataaagatcctcagatcaaaaagactgaaaattactcttctgggctaagcattcagaaaatgtttagtacaaagacatgaaaagcatggagtagacaaggagtcatttggtatgattgaaatgcaggtagtatggcatgaattgatgtgagatgaagtagggaatgacgtgatgttgaatgtcttggtctgccaaaataagcagcttaaaaaaaaaaaccattttatttaggtatagtttacacatcatacaatgcaccaaaaagtgtacactcaatcttttttggtatatttcattataatttttaaaattggggcaaatatacatgtatatccacatatataaaataacatttgagattttacccatttttaagtgtacaattcagtggcttttattacatttccagtattttgcagccatcaacactatatttctaaaactttttcatcacttcaaatagaaactctgtgtaaggcaatatctccccatttccccctttccctggcccttggtaatggatattttctgtctctatgaattttctaattctagatatttcatataagtggaatcatcatgtatttgtcctttgcgcctggcttgtttcacttagcatagtgttttcaaggtgcatccatgatatagcatatattggaacttcattctttttatggctgaataatatttcactgtatgtacataccacatatttttatccagtcatttgtttaaggacacttgggttgtttctacaattggctattatgattaatgctgcaatgaacattggtgtacaaatatccaagataagatgatgaaaaaaacgagagtgttgtaatgctaatacatatatatgtatatatatattcatataatagagtattaaaagtaggatttatatttcatgagatcactcagtgttatgtttaggtctgatgaactgtaagggttgtgagtgccgtgtctgaaggcaaagatgccctaggaggttttgtcatattttagatcctgtttcaaccgtagtaaattaaactgaaaacattttaattaaagtatacatacaatcaaatcactctaattctgtcatccaaaatcaaagccagtagaatccatgacactttactgactgtagggaagtgttgaaacatatgtagggaagtgaaacatgatggccaagagtttgaaacatcggtcgagcccagggttcaaatcacagtttgctgtttgtttcctctgtacttctatgtgtttatttccttacctacaaaatggaaaatcaacccatacattttctatgaaaattttatgagaaagtgtatctaaagaatatataaataagcatgattttaatataaaattattgtactgtatttgtgacacatttgtggatcatttaggacagtggtcctcaaccttttgaacaacaagaactggtttgatggaagataattttttcatggacgaaggcaggggatggttttgggatgaaactgttccacctcagatcatcaggtaatagttagattctcaaaaggagcacacaatctggatccctcataatagggtttgcgctcgtatgaaactctaatgccattgctgatctgacagcaggtggagctcacatgataatgctgagtcacctgctgctcacctcctgctattcctcctggctcctaacaagccatggaccagtactcatctgtggtccaggggttggcaacctctgattgaggacaatgatttttgtcttaaattatttttagcatatgaattagagtagttagacaatcagaaataattacaataattatagatataaagtagtgcattaaggtctgactaaaacttaaaaaatataattagtctgtattgatagtttatacgaatctttctgaatatcctccctaccacaccccacctcctgccaagaagttgccctttgcttaaccattgcaatcctctctgaaagctttttaggtgaatgtatagtttaacttgccagaccaaaaaagaaaacagacaaaacaaatcaaaactaaaaccctcaaaacacccagttattggcacatataaataaatataagtaagatgtaaaatgtgtttccatctaggtattccattttattaaatctgaaaaactatatgttcttttgttatatctctaacttgttacccaaaattattttcatgtttttaagtattcatgttttaagtatttaactagattcatatttttaggtgttaaaaatatcagagagttctaaatttcactatcagattcagactttgatccttcatatagctgaatataagaaatggatgggataaaggctttcttctttaacttcccaattcacatagaatgaacattttggcctcaggtttaaaagatgacaatagccataaaatacaattcaatatttattaagtgcttacagtgtgccatagattattaggtatgagcgaataaggatgaaaatgtcttccttctaccctttggaagttcacagtataaaaagaggaaaatgcagtagttcacttttcctatgaagaatcaagatacctggtgaagacactgttaaaagtctacacttttaggccatttctgactttaaaaccacagtaacgatttataaaatatatttaaaatgaaaattagagatagctaatctcaaaaagcaagatagacttttctttgagtgataaacagaacagaaatacaaagcagagaaaatgactgaaacagaattctgagattccaggctacatagatgctacagagagacagcatctaaaaagaatttacttaatccaaggactggggaatactgccccacagggaagcaagcctgaaataaagctgtgccatctactgttaggccaatgacttgtaggaagtgactaaccctagaagcttagaggccacagaaactgccttatgaccagctctgatgcaagtccattgcaagttattgactctacaagctctcatatgctctgtggagcaaaaactcaaatgaattatgaaagagagggctgcagtttaagacgcagaggctcaatgaagtccactctaaaaccacccagtagagagaagtgagtactaaaagagaggttaaaaaataacccctttaggatgctcaaattcaatttccacaacacatggattcttaagaaagacagcttaaaaaaccccaccaagcagaagatgaatgaaaatgaaaatgataggagaatctgaagaatatttacttggggttcatcaaagaagcaaagaaaaaaaaagtatgaaaagaacaagaaatagggacatccaggaggccaaatatacatatgtaagaaaaaaatttgttaaaattaaaacaattgaatatcttggaaataaaaaaatatgatcactataattaaaattaaaaagtaatctttattgataaaataaaaattatattgtactagtgaaagtgataatgcataaataagatgctaattcattaataagaaattaattaatgttagaggcagtaagatacaaaaaacatgagaacacttgtgaaacttggaggataaactaatagatttaatagtcttttagctaataaatgttgacaaatggcaaagaagagacagatgatagaaaagtaatactcaaagtgataatgacacagagtttactagaaatgaagaaagaaatgtctctagatgggaaatttgctgtaagcgttaagaataattaaattaagtcagcaattgaagtaaaactgcagaagatcatgaaaaagggaaaatcttaagatgctaccagaagtagtagacactatctgcagaaggaagacaatggtatttaaacagacttctcatcagcaacaagagtaaaatcttcagactactaaggaaatacataattctataactgaattattaaagatggagggaaataacatttgttttaggaatataaagtcagtaacaatatatctatgtattcccactaattaaaaaaatataaagtaatggcgtaaggaacttaacagcttcaaacttaaactagtgtccttaaatgcctgtaatctaagttaacaaatttcacattttacactgtagctaagtatatatgtttctgttttaccaaagaatatgcttatttagtgggatgcattctgatgttttgttttaactaaacatagcatattttttaaaaaaagcaaatattgcttaatataaattcaaatggtgtccctacatccaatgactaatcgagaaatgtgattaggcctggagcggtggctcatgcctgtaatcccggcactctggggagctgaggtgggtggatcacttgaggccaggagttcgagactagcctggccaaaatggcaaaaccctgtctttactaaaaatacaaaaattagctgggcatgttgtcgtatgcctgcaattccagctactcaggaggctgagatatgagaatcagttgaacctaggaggcagaggttgcagtgagccaagattgcaccaccatactccagcctgggtgacagagtgtgactctccacgcccccccgccacccaccccaaaaaaagtaatgtgatcttaaaaaagctattcttaagctagtaataacaacaaagtattcacaaaacattaacatagaaaattttaaaatgtttatgaaggacataaaagataatcttaaagggggagagtgttactttcatgatgcaaaaagtcaatttccatagccatggaaaattatcccaaattatctgtaaatttaatgcaattcaaaatgccaaaatgtctcagtgtggtggcacacacctgttgttctagatccttcgaaggctgaggtgggaggatctcttgagtccagggttttgaggccatagtgagctatgattgcaccactgcactctagcctgggtgacagagtgagaccctgtttctaaaaacaaacaaaaagcagccaaaatgatattttaatgaaactgcacatgttgatagtagaattcacatagaagagcaaaatatcaccaattgccaaggcaattttaaagaaatataaatttgtagtctctccttgacacaattgtctttattattaaaaagtgaaagtaattaacacaatatgatattaccaataaaaaacaattaaatgaaaaagaacagagggctcagaggcagatccatatttatatataacttttatgtaaattgattatacattgcctagttagcattacaaataaattgaaaaataatgaatttaatgaattatactagaacaatttatatgcaaaaaatgaaacaaaatgttatctccaactcaaactatattcaaaaattcaagtattttaatggtgcaaatatgatgagctttttaatatcaaagaatacagaatatctttataaactcagggtaagaacagatttcacaaatgatacacaaaaatcaggaagtataagtttagtatattttatctcattgaaattaaaaactctttgcagcagaagctatgtagaaatttaaaagacaaaacaaaacactagtggtgtatagttgcaatccttaaaaccaacaaaggattacaactgaagtttataacataccattacagagatgaagataaatatggacaagttatgctaggggacagaaaaggaaatataatcatactaaagtatagtcaatctctccaactattaagaaaatttataatgaaacagtgagatttttccacccataatttgtgaaaagtttttaaaagttttgtaatgagaaaaaaccagactttcacacacaattgatgaaaattacaattttgtacaactactctgaagagctatttgtaacattttgaaattttgaaatggttcatatactttcacctagcaattcacacttttagagagaataatggttcattgtgcagtacttaaaaaaagaactagtgctacatctatttacatagttatcttaaacacaatttgattaaaacaaataatacaacacaataaaaatattctcaaatgatatggttgatgtgatattgaaaactatgtaaacaatacaacatattgtttttgaaataacatagtaatattttcaaattttagcaattttttgataattatataatcattacgtgaggcgttttcattagaaacagaaggcaactccctgtactaatttttgaaacttttctgtaagcctaaaattagttcaaaatttaaaaattaagcacattaaaaatcatacaccatcaacatcttgctttctctggagagataaaagaaaaaaagaaatggtattgagagaactatatactttcaacaatagctataataagattgttcttaataatatgaagcatttatagcaaaatggtaaggtttctcaagtcatattctctctactattctatacatctaaaacatttaataaagtataaataaataactttcaaaataatcacttttcaatattaacatagataccattagtaaattaattggtcaaatctcatacatatgcatgtttggaatttaattgcattagcaaccatgttgaatgacatgataggtgcctgctatctgcccttcttttctctttatatttatagacattgacttttgtttaatctccagcttgatactgtcaacaaattgcaatgagatataattcccacatttgtgattaggattcaaacttgtgaataatagctttataatatttttagattgctttttcaagactcctgatagcaatacttcactttttttttttttttttgaggtggagtttttgctctcgttgcccaggctggattgcaatccagcctggattgcatgatgttggcttggctaaccacaacctccgccttccaggttcaagtgattctcctgcctcagccttccaagtagctgggattataggcatgtgcctccacgcctgactaattttgtatttttagtagagacggggtttctccatgttggtcaggctggtcttgaactcccaacctcaggtgatccactcgccttggcctcccaaagtgctagtattacaggcgtgagccaccgcgccctgccaatatttcacttttaagttatatttcactggaaatatgtttctctcttctgttaaaagggctatgtgcttattgtttaggagtgtttcaaaacacatttgattttgttaattgttctttttttgtcttaaaaaggctaaaaaatcaacttttagaatgcatatagttttaatttgatcatagaatacagacattcgttctcaaaatgtaaaaattttagcttttcaagtttcagttttcataaaactgaaaaggatacttttagtcatctacatttattagctaaatcaattttaagattacctatttagataattacaactactggaaaggtctaatggagcattgttttattaggtactgaagttgctaagataggaaaagggtaaaaataaaagatgaagttgtccatagggagttagcaagatgggaagcataggttaatttttatggtccaaaggaagagaaagggttacatggtcattgattatggagagtagaacctggagtcagtcatgattagtgaaaaggaaaaaaaatatgaaatctcctcttcattttgttgcaagctataaattagtttcagtctggcttccatgaattcaaaatttcctgagtctatctcaaaagatgtcctgtggtagatgtaggggaagaaaaatcatttcttctattctcttagcttctgtggctgagatctgtgaattaaactgacaaaagaaaggttaataagagaaaaagcatatgaattttctttgatgttaatctttgcatgtacaaggagccattcattgaaaaaaaaaagtaaagacctgaagtaaagacccgaagaagaggttagacccggaagagtgatatgcccttttaacaaagcatgagaaattgtggagaccttactagacaaaggaaaggggttggagattgtacaggctgtaaattatgggaagataaatgcatgctgtaaattaatggaagataatggttattttgtaaggttttgtttgtgtggattcttctcggtgctttcttcttctctggtgataaaggtttttttttcaggtctgagagagggggacacctttaagaagggaaatttatgctctgatattctttagatggatgagcttttcctgtgtctattgtttctcaattgctttcaactcagaataatcctatgtcaatgatgtatattttgggatggaaagttttatattgagaattaaaaccataacaagacataaagctgaaaagttttctgcataggtgttcaggcttgggagactgccccagtacatcatgttagaaattctaacaaggtttctgtttgcagaatcagaaagtcctgagttatatccgtgtgaaagagagttatagccaatctttgttataaaacttgaactttactagaaacctgtggttggctctggaattattatagttagtgaggctgattaggaatggatagaaggatgaacagaaggagaactggaaaactgacacatccatcacaagatagagatgctgggtggacttgggaatagtgattcatatatgaattagcgtcccaatattagatcactgccaagtaagctctgtataggtgaaggaggctggggatactgaggttcctaattcttgaccagagttatttctgttgttaaaagaaaaacttcacccaagttaattttaagggagtttaattgagcaatgaacgattcacaaattgggcagcccccagaatcacagcagattcaaagagactccagtgcagccacgtggtggaagaacatttatagacaaaaaaagggaaatgacatgcagaaattggaagtgaggtacagaatagctggactggttacagattggcatttgccttatttgaacacagtttgaacactcagcagtgtatggatgtttgaaatatggccactgggattggacaagactcagctattgttataggtgcatactcctaaattaggttttcaatcttctctacctatgaagttaggttgcagttcgtctacagggactcatatatagaatatgaagttcttctcaggccatatttagtttgctttaacactgtactgaatgccattttaaatttaattaaatatgttttattttaattcatagtctaggacttcaaagattagatgatatcaattaactttggttacaaaacaaaccattccagaattcagtgacttaaaacaactgcttatttattctactatttgtgggctgactatgtagctcttctcatctgtgttagctcttcaaatttctgtaaccagctggtgggtcagatggtgctggatgatcaagatggcctctctcatatgcctggcagttggcagactatatgctgagtaaccaggccacaagtctgtaattatccagtaggatgccttgagatggtctcagggttccacatgagaactggctcaatatgtgaagatattttataagtctctgcttgcacagcaactgctaatgtctcactggcaagtcacatgaccaagttcagattcaaggatagagaaacagactcacttactgattgggaagagctgaaaatgggctgcaaacatatatggaggggaagaatgtgtaccttctgcaatccatgcagtggataggttattatcctatttccagaagctcctaaataatacattaaactatggcctcactttgtaaaactcattttcttttttttgttttatctgttatattccttgaaaaccaatagtagattatgataatcacatgtggtttatccatgagctataaatcaatctatatgtgatggtgaagagataaaatgagatgggaaaggattatttaatagggaaaagaaataacaaaactataaaggggtcaatagatttaatgacattgggttgattctgttaccttcaagagtataagtgtttacatgtgtagctcaaataatgctgatttttttttctcacaagtgtgtcataattagttgctatgaagccactttaaataaccccatgtttctgtgtaaaaaaacaattggctgattttttttttatagttttgacttgaatgaggtaagttgtaagtgacaactaagggaaaacaatccatgatgtaggattagaagcagcatttttcataggaagtaataaaagacagtgtacatattataactttccttgtgagagatttatggcaggaagtgagcagatgaaatcaatatactgtgaattataaatagatctttgaggggctgggtgatgaattcaaaatttctaagaaaacagtagatcacctgtggaaatgagcaagggcacaagtgaattcagggttccccttgaaagatgattataatttgcaggagtgaagtttcctgttattgtttgaaaaagcaaaatatttcaattttatatacctactaaaaggtatatgaaagtcttgggtttttagacttatatgcaagaataaacaagctttaccagaaataaagaagttttatttacatattcaacctactattgtgagcttttcaggatatctggttaaaaatactgagagagagagagaaagagtatattaaaagaacttgtactaaaaaaaaaatcatgtggatatcagtttctcaggacagaaatccatttacagatttttttcttagttgagttttaattacataactttaagagggacataattaaagatgagattatatgccaaatcttttcccagttagccttatttgcaacgcctaggatagcatactatgtggcttagattgtcattcttgccatattcaattgaatacttttagctgtctaaaccttattaactttttaagatttttataaagtagaatttacaatgtatagtcctgtacttcactgatatgtaaaagcatgtcagggacatgtagagaaacctgtgttacccattccctcctgtaactacatcccatgattcctttccatttccttgggcaatttaagcccaatggtcttccttctacttttcctcttctctcagaaatctttccggatgactttggatctcatcactctatgtcactgctctacccaacgtccttgaacttagtgttccttctatttgagcaaaatctgtttacatcacatctggcctactctatcatatcagttagtctccttttttctttacctgcatcctgtaatcattattctgcatttctcacaacatacttcatttaattctgtgatgaccacattccattttttttaataccaaacttggaccaaaagataaggcatttagtgctgttcctaccactttcctatactataaaatgttaccttctatatttcctgtttctgactctacatatgctgttcccatagaaacttccttcctatcgatggacatattttccttcttagagagctcaatcattataatgatttatactgagaccctcattatttattatgtcaccaagtccacatttcctaatttacctcatcacaaatggaccagtgtccatttatgaaacattcctgttgtatgtaaatgccaactcacaatttacatactgaagtcattttcccacctcaaattggaacccctcctattttcatcaataaaagtattacttttcttcccagtcaggatccaacctcactattattattttataataatgattattattttaaatttttattttcactctcccttctcctgtatcccctgagccatttattcactaactacttttcttatcaatcttcaccattataggccaggttttcattcatttattactgaatgattgctagccttctatttgctttccctgccttgagtttctggagttttctatatatcatgaacaacacttaattgagttagttcctaaaacactgatttatattttctgcatctcaaattgtaaagcatttacctcctctccagattttatgtgatgtccaactagttaatccatctcaccacaaatctccctactaccttaaatccaccctgtcctctagtcctactcacatcctttttatcttaaaaacatgttctttcttaaccacatgtttactcctgtaactaatctagaatggaaaggactttatggccttcccagtggtctatattttggagcatctataaaatttagttcaaatcccttcacaccatgaagttcagtcttttttgcgctgcagcccacagtgatttccctcttttaaaaccgttcagaacttgtcatgtgtgctgaatatctttatcacttccttatttgctgcctactacatgcttgccttttgttttatttttatctataagatctccccaaagatatgttaagtggttctagacaggatccattggatatagtcttttctgcacctcttctaatcaaaaatagaagttgttgcttagtagataattttaaaaagtgattttattatgaattcactatgtgtcagctatataattaagttttaggggacttgtctgaaagcttcatttgcagagtaaaagcaattctttgactgatattgtttgtttggttgaacagaactgttcgtcagggaagggaatatgaacctctatgtgaaagttttaactacagaatattggttaaaagcaaagattgtagattcaggatgtttatctagattgaacccagcctgtcttctcctgttcaccagttacaagctgtgtctttaggcaaattattcaacttctccttgcctcagttttcccttttagaaataaggattatgttaatagcaaaattagaagcatgataagactcaacaagttaataaatgctggttggaacaaggcctaggacttagtaataaattggcacaaacaattttgagtctttatctttatttctctttactgatccattttctgaaaactattcataactataaattaatagaatctagccagcatgtaaaatgacaaccatagcatacatatattttgaagaacaggtgtacttgctttcttcaaactttcaaatactgtgaatgaagaaagtagagggtccctctccttagggaaatgagaaggagttaggattccagagttctccactcatctcacagtgttttttgaatatttgcacatgactgatacatgctatggacactataggagattttttaaaattacatgacagaagggatgcatgctttaacaatagaatatgcatgtatgagtagcaaaaataagggggtagagatgaaaagacaatagaaagggatgtaatcaagatgacagaatatgttcctattgttagaagcatttgattttccaaagatccaaacacttctctgtctccaacccctcgcatcttgggcccagattataatttaccttagctagcatgccattatagagacaatcagagcctaaaaactaaaaatataaaaagggatgttggtaaataagtatgcattagaaatacaagaatgtctatatcatgtaataaagcacattttaatgtttcttttgcctcatcccttttcagccttcagaataatagaaatgtatatgagtatgtgtagaatgatagctaaaaacaaaatgtatctgtaatctatgaatatctgaaaatggcaaaaacttctctatttttgttttattcacaaaactgggattcggatgggctagacgttgtaagatgaactggcaaggcaggttatttgatggtgtcctgcatgcttagggtgacaggattgcttaggcctggaacagcaagtgtctgtgaaaatgcctcttggttgtacctattagtctgataaataatacagacaaattagattaatttagtcaccattcgaaagacatctacattaaccatctttttctgccagcattagagaacagagttcaatgagaagatgaacattgatttcaaaattagtaaaaaagaaacataattttttaagtaatttttcacccagatggcatgagccatgcatttgtacatagaagccatattcagtaattgattaaatacctctcatgtagcatgagacatttacttataacctattttatagattccgtcatttttttctcactctctgatttatcctcattggtattattaaaatatatattcagaatgaaagggagaaaatttgaaaagtagcaacattttagactgatattggtatgtattcggttggtgcaaaagtaactgcgggctttgccattgaaagtaaaggcgcgtcacgtagcccacaacatccaggggggcaagccgcgggcagcccggcatggacccctcagtctgccagggcccaggcgcagggggccgcggagctgtttcggggtcggctgctgcctagcgcatggaaggcatcccctagcccggaggctggctttgctacagctgaccactcctgtcaggagagagagactgagaaggctatggatcgactagcccggggagcacagagtgtctctaatgacagtccagcccggagtgaaggcacccattctgaagatttgctgtaaatgcggaggactcggatggaatacctgggagctgagagaagggacaaactgtccacccaaggaacagcctggcaatctttttaatgaagactgggacttggagttgaaagcagatcaaggaaatccatatgatgctgacgacatccaggggagcgtttctcaagatctcaaaccttgggtcagctgtgccccaaaaggagacatgatctatgaccccaggtggcactatccacctcaactgataacccattattccaagatggtctttgaaacaggatagtttgatgatgctgaagattgtgtgtggagttttctgccttgtaggtggttgggcctccaggtcaagatctcttttcctttgaaggtgaaaagtcatatctgagaaaacattcccagtgatccctcatctgggatacacagaccagtgttcaataaccctcctattgttctccccagtctgctgttcttaatgggatcctccttggaatgcgtgtgttctttgtaaattaaggtttaaaaaaaaggagaaagaaaaagaaagtaatgtcaaagcccgcaattacttttgcatcagcgtagtctgccattctgaataggtattaatgacaaaagatttatttatttaaactgcaggaagtgtaaagcaaggactgttttctacacgtactctaatgaagggttttctttctgtgtaatttgcatatatgagctactcagattcagatataaggaagaatcaggctcatattttctgaaatgtatatctgaagtaaacattctaaatcagatttattacgtatctactctgctaaacaattgcagtgtattggttgggccattctgtctcttgtctcaggttaaacattgagtgtactgtttccttgcttatatttcacttggttcacatgctatatacttcaggttcagtttagctctttctttcacctacaaggtgcacgcacacacacacacacacacacacgcaatactctcaagctagagaaaagtgtgtcttccagttcccacaaatgatttgcacctaaccttattacaatattgttatttttcttttatttttttattccctaatagcttctctgctgtataagcacagaaactgtgccttgctcatcagtatacctgcagcccagcccaaggcaagtgtccaggacactctgttgactattgttccaaatgcctttgggacagtctgaccctggccacagagttcctgggacttaataagtaatcaatgcatattcatcaaaggaaggaatcatatgctctctgaaagttgagattcttgatctcatggaatgtacaaagtaggagagaaaatcttagcagcagaaataaccacaagttagtgtgataccagtgtggtacgaatatagacagaattatacagcacacatagtaaagtgaagtctcctccagcagggatgatgaaagaagcctcacagagtagatggtcctaaatgcccattctgtcgcattataatgagctctgacaaataaccataaggatgaaacacgtaactgttttacagttgttaatattttaaggttattaatattttctgaaaataatattaagacaacaaacatgcatcttacataaaaatcatctgatgacaaatatgttcttaaaatagaagagacttcagaatgtggcatatagttacatccacacatgcctttcttgtttctcccattcatgaaatttcttaggcatagcacatgaatctcatctatatgactgtttactttacttggtgagtgcacaggaagtactcctttttttctttagtgttgagttccatgaaaaaataatttatttggtagtaaagatagaaacgtgatttgaatcatcccaacaaaagatgagctttgcttaaacttagtgtttttaatatctatgatagaggagaaagaatcccaattagttgccaagtagtataatatttttgcacaaaataccattgaaatctgaaattattacctccctatagtctttttttcgttaaattatcatttttattcttatttaattcaatttgccaaatattcatttagtatctaccaagaacagtgtcagcttagtctcatttaagacaaatattaaaagcgctatcattttataagtaatagtattccttgcactcatctctttaacagaagtactctgcatcaggtttagaaatacatagaaatgagatttatttattttttattgacaataatggagtgtttcatttcactgatatgaaagtattatttcttaatataaattattactcttttgactttagctgtgaatgaattaatagatgatgctcatttatttattccttcttttctctttatttcatttgttctgcaaatatttactgtgtatttaatatatgctaagtgttatgggaatatgtgattcagtgtttcttcggcactcttcatttggaaagtctgaaataatgcaatttatatataatactagcaaaacatagtcacatggaaaacatctgctgtaagccatattaaattttcctttggtacccatcatgaatgtgttaacaactttgttcaataatgctgacagagctacttttagggagtttcattttcctgtgacttataccccacattgcttagctttacaaatatatttaatgcagcaaaccatttcacacagcactgccttttaagtcccacaaaatcaatagcataatttgcatgattgtgggactgttagtattttctgttagaaagtgtaaatcatatttaaagatatacaaataatattcacactttttcttgcctatggcatcacaaaattaggtttttagaggttcgtcttactcattttgtgatgagacctgggtcacattagctcactcctcacaaacgtaatgttcattgacacctagagatatgtggtaagcctgttaaggttaaaatatgggctttgggaatagtgagacttagatttgaatccaagtgcatcactcatgatgatgcaatgttcttaagctctactaaaattaggtggaaaatagcatcaattaatgaggattaatgaaaagaatgacaatgctatgcttaccacagtgcctgccagataaacaggtccaaggggcagtcagcagttatttcattgtaaaggtaaaataaatcttaattcagtctgaagtagccactggagagagtttattgctctttttgttcccatactaatgtggcccacccagccgctttttctcaaagtccaataacgagatgcagaccaactgggaaaaaagggagcttatttctgcaacccgcaagaaggttgggccaacttaagaccaactcaaagtcacaagtttttctccggtgcacgtatacatttaaagctccatgcctacgtgtgggagtgcatggagctgtttcagcaggaaccagcaggagtgtttcatttaatctctgtctaatctttagggtctggggtctggaaagctttctctagggccttggaaagtttcttactcttaagtgggccctggaacgaggtgtatgtgtaagaatgattttattattggatcagacgtagggtgtccaatcttttgggttccctgggccacattggaagaactgtcttaggccacacttaaaatttactaacactaacgatagctgatgatcaaaaaataaataaataaataagtaaattaaataaataaataagtaaattaaataaaaagtaaataaataaataaacaaacctcataaaaagtttaccaatttgtgttgggtcgtattcagagccatcctgggctgcatgtggcccacaggctgtgtgttggagaagcttgctttagggtctgagaaaacccaggtgggatcttggtgggtttgattccacattctagcccttatgctcaggcaccagtttctccagttcttcaatgtttaacttacgtatttaccaaattcataataaaggggtcgttgaaactgactgctctggctcctaacggaaacccgagccaccacattctgaccaagttacagtacggaggggttgatttaatttgttcttccttgattcccaaaacactaaatgtactcattatgttttaacttcattcgctacgtactggtaaaaaacaatgaatattagtatttaaatgtacatcattagttcattaatgtacattagttcattgaaatttcagaatgataaagatgttaagaagaggaaagtataaaacctgctctagaaataattccactttggcgttgaccagacagatgaacagaaacttaagggctttttaaaaaaattgttatgagctgaattatagtcctctaaattgatatattgaagttctagttctcagtacctccgcacatgagtgtatgtggaaatagggcctttagcaaggtaattaaggtaaaatgaggtcataatgggtggactctaatctaatatgactagtatccttctaatagcagcaaattaggacacaggcaacacagacccagggagaactctgtgagggcacaagaaggcagccctctgcaagaaaaagagagaggcctggccgggcgtggtggctcatgcctgtagtcccagcactttgggaggcagaggcaggtggatcaacagaggtcaggagttcaagaccagcctggccaccatggtgaaaccctgtctctacaaaaacatgaaaattagcagggcatgatggcaggtgcctgtaatcccagctactcaggaggctgaggcaggtgaatcgcttgaacatgggaggcggaggttgcagtgagccaagactatgccattgcactccagcccgggcgacagagagagactccattcccccccaaccaaaaaaaaaaaaaaaagggagattgaagcctcagaagaaatcacacttgccaacaccttggttttagatttgcagccttcagaactgtgaggaagtacatttttgttgcgtaagcaaccccatcgctggtattttgttatggctgccctaacaaactaatgcaatattcaaaggctgaaaccagtgaattatttttagaggaaaatatgtaggttgaattggtattaagttatatgtagaatacatccatttgcttacttaaaggggaaaaaatgccttgtccagtctttaatgctaatatgttctgaggttttaaaagcattaaaatctatactgattttgaaagtctcacagataagaaatgaaaactacaacctaaacatggaatttaagaacatgaatctttctaacaaatatctcctaaaattactcttacattttattagcttcttattccaaaggaaagatattttatgagagaaaaagcacacaaacacacagatttacatatataatcccgtaatttccttcaccatcatcttaaaacgcctttcatacctgtccacatcattcttcatgaatgtcttttttgtttcttataggcaaaaaatagaggtattcagtaaattgcctcacttccacttgcagaattaattgggttcattggagtatcatgattaagaatctagactctaaaataagattccctgggttcaaattgtggctctgctttttactatttgtgcaacctctgcaaattattaagcactgcatgtcctagtttcctcatctgtaaagtaggattaatgttacccatcacaacatagcaagtgcatagaacaatgccactcattctccttcatgtgtgtatgtgtattcaattaatgttggcttttttttttttttttttgagacatagttttgctctagttgcccagactggagtgcaatagcacgatctcggctcactgcaacctccacctcctgggttctggcgattctcccgcctcagcctcccgagtagctgggattacaggtgcctgccaccaagcctggctagttttttttgtatttttagtagagacggggtttcaccatgttgaccaggctgatctcgaaccactgacctcaggtgttccacccacattggcctcccaaagtgctgggattacaggtgtgagctactgtcactggcctaatgttggctattacctttgtgtatacccattttcatctacttccatttttcagtcattgagaaacggtcctttcaaatctaaaccttattcctatgctgttgaaaccattgtgtatggttttttttctctctctctgttcagtaagcctcctcctaaagctacaaaaattctcatttctcctctatactaaaaaataaaactataaacaaattgctctctttcgtggatcccattgtcctctccacctttcctattgccaccaaggttgaacaagtaatctatacccactgactcttttcactctttaaatcattgccatctttcacaagttccctcattgctctgataacagactcagatgactctgtggttgacaaagacaatgaactcatttctgttgaaattgttgactactctctacatctgaaaatttatttctccttgcaatcctctgacacagtttcatcctggttctcctcctgattctcagactactcttgtataaatgccattgctaatctctattgacaacactgcttttcttccctaagaagtggcagtattgtatgactgttttctatttatcaaaaataaattgcaatgattgttcatttgtttttggcacattgatattttgatatgaaaaacatgttttgaaaaactagagagttagaatgttgtttgctgtatctctattgtttatgatagtatttggtatataataggtacacaataaatatttgtacataatttgatttatttttttcctgtgaactttcacatcttaaaatctttacaagcaaaaagaaatgtcctataatacaagggagtaagtcatttattgatggatatctggaaccgtaagttaaacagaaatctatctatactttttaaatagtattagctaaaattattttcaagaatccaaatctcatatacataagtctcaatttctcctcctgttcttaatctgaaatgacagtgtctatttaaatttaaaaagtcaaacttgtaatgaaagcagcaaacttattttgtgaagagaagttatcaaactgcttacctttatgattgcatgccttgcagtcttatgggataatctgttggaaggaaataaacaataattaatggggtgattttaaaaaaaagtattctaaagcattggctttaaatttatgaatcaacagtcaaattttaacagcgggattatccaagaaatatctcttatttttaaatcatgtggttttgaaacctatggattgaaggtatttttcctgtattaataagagaaatatgcactgttatcttatttattttacccagagcatatttattatataattacgtgctgtaggaagcaaattgtactcttgcgcttttatctgacataaattagctaggtcaagaaaattttttatacttgtgaactctggaataactcctccccaggaatgttccagtaacactggctattgtttatgtgaaaataagtacttagttttacatttaatacagttttcttatcaaaagccttttaaatttattgtagtaattctaaatttccttatgacatttttcacagcttgacataaaaagatcagcttctctgtattttttttcttgcatcaataatgctaacttgtatcagagacactgaaacattgaggtagcaattgataatgagagcagaatacggcctcatgtttacctaattttaagtaacattttaaggcaattacaatatatgtacatatatatgtgtatgcacacacacatacatctatttatctctctgtctatattattttatagacacagggtcttgctctgttgcccaggctggagtgcagaggtgcaatcatagtgcactgcaacctcaaactcctgggctaaagcaattctttctcctcagcttcctgagtagctggaactacaggagcaccaccacaatcagctattttttttgtttttttaacttttgtagaggcaaaatctcactgtgttgcccagactaaaatattttattaaaataagtgttaattaaagactatttggtaactttcagcacattaagaacagtatgaaataaatataattcaatttgaaatgttataacttaatcaaatgtattttatagaggcaatgcttatttttaatttttagtcacattttagttgaattattcacttattctttttggcataaattaacttaaaatgcatgtttggcaaatgggtgcaactttatttattagcaccctactgttaactctgtctaagtgtgctggtcagttttatatgtcaacttaactaggctttagtcagttcttcaataaaacactaacgtaaacagtgttgcaaaggtatttgtagatatgatcaagtcacagtcagatgattttaaataagggaaattgtcctggattagataatctggatgggctcaatgatattacaagtttcctataacaaggagacacatgagtcaaaaggcagtgagaaaaggtgatatgatgataaaagcagagattagaatgaagtggccacaagccaaataataccatcagcctctagaagctgtaagatacaaacagcagatcctctcccagagtctctagaaggaagcagctctgctgacatcttgattgtaagactgaacctcttgaactgtgagatgatttgtgttatataaaaccactaagtaatttgttacaacagcatcaagaaacaaataggaattttgtatcctggaattgaagtgctgctataacaaatgtctacgaaaagagtcaaactattcaaaatatttaacctctattaaagaggtttatcctgagccaaacatgagtgaccatggtcagaggcacagtctcaggaggtcctgagaacacgtgcccaaggtgtttgggttacagcgtggttttatacattttagggagacataagacatcaatcaacacatgtgagacatacattgcttcagttgggaaaggcaagacaactcaaacaggggagtcctaggtcataggtggattcaaagaatttctgattggcaatttgttgaaagagttcaattgttatctaaagatctggattcagtagaaaggagtgtctgggttaagaaaaggggttgtggagaccagggttcttattatgtagatggagtctcatagatggccacccttagagataatagatagcaaatatgtcctattcagacctttaaaaggtgtttgactctcagtaaatgtctttgagattaggagggcctgaatggagaaagagctggttatgttattagaggtttacaggaccattccaaaatatgtcaaagaaatatatttcaggcagtggttcatgcctgtaatctcagcattttgggaggccgaggcaggtggatcacctgagggcaggagtttgagaccagcctgaccaacatggttaaaccccgtctctactaaaaatacaaaaaattagccaggcgtggtggtgggcgcctgtaatcccagcttctcagggggctgaggcaggagaatcgcttgaacccaggaggcagaggttgcagtgagccagagttgccccattgcactccagcctgggcgacaaagcaagactctgtcgcaaaaaaagaaaaaaaaaaaaaagaaaaaagaaaagagatatatttcggggtaaaatatgttgcgggttggagttggtatgttattgctacaaagagtctgttctgtcagtcttaggatctctgttttaatgttaatgctggtcagttgtgtctaaagtccaaaagggagagggtatagtgaggtatgtatggaccctcactttctgtcacggcccgaactagtttttcaagtttctttggaatccccttgactgagaagggggtccattcatttggttcacggcttagaatcttattttttgtttgcacagatacctaaaaatctgtaaatggcttttaaattgggtactgggtagaggttggaagaacttttaggacaataatagaaaaagcctggattgccttgaatagactgttcatagatatagatgttaaaattattctcatggggactcagaagtaaagagcatggtggaaaaaactgtattaactcagagaatacttaaatcattataaataagctgtcattagaaatgtggacatgaagaatattgatgagggctcaaagagaaatgaatatgttattgaaaactagaaaaaagagattaagcacattaagaatgctatgaaataaatataattaaatttgaaataatataatgtaatcaaatgtactttatagaggcaatacttgtaataccttaattgatttctgccattatacatagagcaggagttgtaagcaatgaactttggtatttaactttggatatttccaagcaagatgttgatgtgttctggtttccttctttctgcttataataaaatgcagaagtaaaatgatagattgagggaagaactgttaagcaaaaaataaccagggcttgattatttgggaaattctcaatctgtccagattgcaaatgacactaaaattagaagattcactgttaggaaagtgaatggttggacaactttttgttagtgcctcagaagaaagaagagctaaaagtgttcattcacatagagagctctttgaagtgatcatgttactcgtggatcttttcttccatttctgcagaagctaaaaaataaggatggaattatcttggaaatacctgtgtaggggcctcttgtttaatggtgcaaattcccaggacatacaagaagacacaacgtttttgagaatattataacagcagaaacattgccagtttggactgtaagagaaagagagaggaggaaataaaagaagactgtaagactcccaaatttctataggcaagaaatgggttgttaatactatttatctgcaaacccatcaaaaaggaagaataattcagagggaagagtgaaaggtagagaaggcagatatttgagccacagagaatttttcccaggctttaacaataaatggagtttactctgctggatttcaaaattgcttggaactggtgaatttttttttttttttttttttttttagatggagtctcattctgtcacccaggctggagtgcaatggtgcgatttctgctcactgcaacctctgcttcctgggttcaagcgattctcctgcctcagcttcctgagtagctgggattacaggtgcacaccaccacgcccagctaattttagtatttttagtagagaggaggtttgaccatgttggtcaggctggtctcaactcctgaccttgtgacccgccgccttggcctcccaaagtgctgggattacaggcgtgagccactgagcccagcctggtgactcattttatccttccattttctccatttttgaacagaaatgtctataactagcatcctatacttgtcccacattgtattttcggaacagataacttattttctagttttacaggtccacagatggacaggaattttggaccaggatagaccatgcccagaattttaaacatagctgatttagatgatgaaattacagacttttgactttatgagattagaagagattttggacttgagttgatgctattaatgatttgagacttttgaggaccttggtatggaatatacttactttgcacactgagctgacataaatctttgagaaccaggaacaactgcattagttcaaatgatggctcccaaaagatacccaggtcctatcacaaacctgtgaatttgttacctcacgtgataaaagggactttcctgctgtaattaagttaaggatattgagatggaaaaaatatcctagatgatttgaatgggcccaacttaatcacagagtccttataagatagaggcagaaagattagagatagagagaaaaaaatgttaaggatgaaaacagatgtgcgagtaatgcacctgaaggtggagaaagaggccaaggaatgtgcatgttccctggaaactggaaaagacaagaaaacggatgttttttgtttgtttgtttgtttgagatggagtctcgctctgttgcccaggttagactgcaatggcgctatcttggctcactgcaagctctgcctctcggattcacgacattctcctgcctcagcctcccaagtagctggtactacaggcgcccgccatcatgcccggctaatttttttgtatttttagtagagacggggtttcaccgtgttagccaggatggtctcaatctcctgacctcatgatccgcccgccttggcctcccaaagtgctgggattacaggcgtgagccaccgcgcccggccaagaaaacatatttttttctaaatgagccctcaaaagaaatatgggcttgtatataccttagttttagctcaatgatacagattgtagacttctgacctttataattgtaaaataataaatgtatgttcttttaagctaccaaagcagtggtaatttgttataactgcaataagaaatgaatccaccaatttagatatatttaaaatgtttgcaattctaacatacttttatttaaaatggtaggcctgccctatatccctttatcataggcacctgctttaaagcattttactgatttctgtatttactttagtatttaaataacgtggctacattttcagtttctgcatcttcagccttaggcattatgtattgacctcatgcattatttattgacttcctactgccattttcgatccccttaacctaatatgtcgtaattttatcaagacacatattctgcacaaaagtaatattggaatatttcttcaacattattctagggattctctttgcctggatttgtactgaactgctcttatatttttttgtatacgatgacttatttttttaaaagattaactataacattggttcctcagttcagagaacctatgttttacccttcagggaataaatatccaatcttctatatacaggatcctctgcagggtctagccttctaaagtataaagaggatctggggacctcactgcctcctaaatagatcttccaccagtccttctagttttagcatttacattatctctatttatacaagtatccattacttgcaaatttattaggtttgggaagtggactttcctcgcctttatcttaccatttagaactgcggaggctattaaatcactaactacttgaccgcttttctttctacctttttttgtcaatatcttttccaactttctttgtgctttgggctcatgactttaaacaaaaattattttaatgtaacttcagtaaaattttagttaagtttcaggaagcaatggatataaatgcaaacattaattttaagtccctttggatacattaacataaattggatgcgtagtgtcttcttgtttctatgttatgcattcttacatttaaacatctaccagtgtcacgtggtattgttaattcccattgggaaacattcttagagaagtttgccaaaatctgtgctacttctcaagttttgagtccagacccaaatttagagaaaatattttaacattaagtatactgtattttatttcgaaggataatttatgttaagatattgtactgtctctacaagattcaatgcaggcaaaatattttaattttgtgattgctaaatactatttatgaaaactatagtaatatgaattaatatgtgtgcgattatcactatgtgagtgaaatattgtataagacatggacgattcgaaacaatctaaacaatttttaggacaaaaattccttaatctttaaactccagttcctaaatttattttattataatgttacaaccaataataaagaattaaaaggaatcccatggtagactgggaaaaaacaatttcttctgtataaaaaaaactgtcagtaaaagtaacagttatatactcctttgtttctagcatatctagcacatggtaaagacatcatgattagttatggaatgttaatcgaaaaatgataattaaatcttggaacgtgattagtttcctttgcaccttccatttaatttcctcttccatggatacttctgtttctttccctttttaaaactcttctagtttatcattacttatttccagagcttttacaaaatcttcctaaatggtcttccctccacttgctattaacccatcctaatatggttgtgtgacttgtagatctgtagacccaataaagaataaagttggattattaacatgatatactactgtgtgtaaataataacactttttggtttgtaaaaatattgtctttactgtctcattattttttttatatccctataagagccagataacaggtattaatatttactaataaagaaacacattttgggaaattaaattcctactaccatgtccgtggcttatgaatgacaaagcaagcacttgaatgcagataccctgatacccagttctcttctctcaacgatacagtgaaataacattcctatttcagactcttagaaaccctgtgcctaaaaccttcaaccaaagaaatctcttcatctgtcattcaacactcttcacaacattcttccattccattctaatttctcatcctttcattatcccattggttttacataaatacctttaatatacaatttttagtcccgtattttacattttctcttgtgagagaacttatctggaaaattcatattttttatttttctttgtataagtgctggtcagtttcacagacccctttgtggcattcaccatttgccctagtttttagaaactacttgaactttatttctaaaacatctagtggcttgataaatattttacagcaaatatagagacatatcagaaattctgatgtaggtttataaccaatttggatgaatatataaataaaatttatgtttattttcatttgtggaatacattttgaaggaggctatttatatgaacgatagcaggtccagaagaccaaacagtttacacttgtaaaattgtttaaaattatgaccctctaagctgagtatcgtctaattacaatcaatgtgaaacatattacaaaaacatgcctacagtaaatctccattgttacatgtattatgatttttttacttaaattcagataccatttcaaaaaaaatgaccgaagtaatacataataaatatatatgtatatttgaccctaaatattcttttttttttttttttttttttttttttttttttttttgagacggagtctcgctctgtcacccaggctggagtacagtggcgcaatctcagctcactgtaagcaccgcctcccgggttcacgccattctcctgcctcagcctccccagcagctgggactaaggtgcacgccgccacacccggctaatttttgtatttttagtagagacggggtttcaccatgttagccagggtggtctcgatctcctgacgtcgtgatccacccgcctcggcctcccaaagtgctgggattacaggcatgagccactgctcctggccaatattctaacattctaagctacaagaagtctgatttcaattttcagttttcatgtgtattgtttaggtcattaaataccttttgagtttctactggttatgaaacactacttcctcataaaggagacccccaaaagaacacagtatgatttgtgacttcaggaacttttgctattataaagtagaagagaattagccaagttcgtaaataactgtaaaataaggcagaatgtaattaatgtcttacagagcaaaaaagcgtatattctgagagaatggagaaatcacttttcaactctgagactcagacaaagagaaaagattagagctgaattgtatgtgctaaaaagaataaaaatatctgtgtaactaggaaaagtgttatgtactggagggaaaaaggaacacatggattttgaaagatattcaaacaaaggtcatggagtgttcaaatgtttccagttgaccaaagatactgtggtctgtagagcagaaaaattatttgaaggagcaacagaattttaaaaataaatccaacaatactatccaaggtgtataggaagagagtaaacattattagcagtcattctagcttggagccttagcaaacctaggtgtgcactcatgtatcaactgctctttaggtaaacatttgttttatatcagggtaaatgaaacttaaatggttcaactctattgcctgatgtctccgggtggtatcaaggcaaaggttatcatagctaaaaacctgaatatatggaccttttctagttggtaactaagtggattctctgcgctgcatttttcatgcatttattcaatatttatttcttttctgctctgtcccaggcatggaggtaacagtgaggacaacaacattgttctttctctcatcaagcagcaagcagatgttacgtagggtcacagcatgccaatgcgcctaactttctgaaaactttttcctagctccttattttaaacacaatagttacttcagaagccaaatttctgctgagaatatgataataagtatgttctgtcctgtgcatttgagcaaggcacttttaaaaaaatgttatgccttaatgcaagggaaaagagttggaagtttggtactttagggagaatgtgtgctagctttatttgagacttcattcctcacacagtataattctctgatggcagaacaggaagtttctttctggtgttttcccgtatgcatctcaaaaccaactttcttttcaagatacttatcaggtaacttgtagatggacaaatacattcaactttttaggaaaattttttcaagtagtcctcattttaaagccaagattttgaaataaaatgtactatgagttgttttttaaaagtaatccttggaaatgttagtttcttgattacatcagaatgcttaactgaattttacaatttctgagcatgagattggcatacaaatatcttccttttcatctttttattcaagtaataacaaagatcataatgaaacattaatcctgggccaagtgacattctcacttgtatgtttgtatggatcgcttactctttggcttataagtgaactacataagacagaggagtttcagtactggttattaaaattttcttcacaatcatctcatcaaaagccgagactcctaatgccctcccccaacattttgggaggcaatttatttgtgtggtgtgtgtgtgtgtgtgtgtgtgtgtgtgtataataaatggatcatattaaaaaattttgcctataatcccagcactttgggaatctaagtcagatagataacgaggtcaggaattcaagaccagcctggccaagatggtgaagccccgcctctactaaaaatacaaaaaattagccgggcacagtggcaggcacctgtagtcccaactactcgggaggctgaggcaggagaatcgcttgaacttggagggcagaggttgcagtgagctgagatcatgccactgcactctagcttgggcaacagagtgagactccgtctcaggaaaaaaaaaaaaaatttttttttttttactccactgaagtggtattttggaatgaataaggttgagaatgagtatataaagtgggaatctctaagacttaaggaaaaaaatatctgtttaaaattcagattagcagtaaggatgatagtcatgttttctggtagattatccagaattttttaaaaattattcttagataagttacataagaacaacaactctttatgaaaatctagcatgcgttttaggatcctgttggccacatgacatacacagttttcttgcttctcagggaatatgccatcatgtaaattcaacctacatgtaaagttgttttctcaggtttggccatatgtggctttgaaattgaaatatgttttcatttagttccccaaaagctctgcaataatgaacacatttctaatgtgctgaagaaaatgggcccaagtggccactgaaataggctatggaaaaaagggaaaataattaagacttaaatttaggaacatatttaattatttatcagaagaatgacttggtgggataacagtgttgtgaagttacaaatattatggttgtttacttattttcatagagtctatgttgtagaaaaatactggaccaggtataaattcaaatctgctttgcaatgtgaactctaaaactatttttctttgaaatagagttcctcctgaaatgattaaatatgagtgaacttttcagttaccacatttttatgctattttaggtgtcaaaggagaaaaaaatatttgacaacttcgtccaaatttctatgaataaaagtaatgtccaaatgaaacatttgcattttgacattgtgcaattatgtcatagcatgaccttccttggagtaatacatataaacaaactttcttgctattctcattagtacaatagtagtagaaatgattaatcaggtcttgattctaaagtgctttaatctctaaaggtaagatacaaattattaattcctatcaaatagccttaatttggttgtttaaatctaaaagtgattatttttaaagtttgccttttctctgtggcaattatagtgaaatgaaacaatatattgttgcattttattgtttcagagagattaatctttttaaagaaagggcattccagatatcagaattttttttataatgtttttctgtttgtttaaagccactacacagtaatatgacattggattatcagggaaagatgtcacaaagcacttaagaacgttggatataattattttataatatatttctaaattaagcatagagatgaacaaaaatagtatgttattggacaaactatggattcattagtctatttctcaaaagttcctgtttatattatgatgaaatattttttattttgataagagtctaaaattagagcactggttttagtgttttgcatttttaagtaccatcagaatgatattaaactttataaaagatgctttcctattttaaaaaataaattattttccattgatttctttccttcattattttaatttttttctttatcttttttggagggtgtatttggaaagaatagttgaacagagaaattcctaaatgacaatatgtcttcaatttatgactcttttcttcaagatagatagaagggagatctcattttattgcattttgcgttattactctgtgcagatgttgtgctttttgcatgtcgaaggtcatggcaatcttgcattgagcaagtctgttggcactatttttccaataacatgtgctcactttatgtacctttgttacattttggtaattcttgcaatatttcagtcttttccttattattatatctgttatggtaatttgcaatcagtgatttttgatcttactattgtaaccattttgaggcaccacaaactgcactcaagagagtgaacttaattacttgccgtcaaaatgagcagtcagaaatacagtgtgtgttcttattggtccaccagccggtccttccctgtgtctttccctgtcttcaggcctctttattccctgaggcacaacaatattgaaattagtccagttaataacctacagcagtctcaagtgttcaagtaaaaaaagaagagaaaagagtcacatgtccctaatctgaaatcaaaagctagaaatgattaaacttagtgaggaaagcatgttgaaacgcaataaaagccagatttcaggctccttgtgccagttagccaagtcgcaaattcaaaagaaggttcttgaagacaattgaaagtgctccttcagtgaacacacgaatgataagaaaatacagtacccttcttgctgatatggagaaagttttagtggtcgggagagaaggtcaaaccagccacgacattcccataaactaaaacctaatccaggaaaggccctaactctctttaattctatgaagtccgagagaagtgaggaagctgcaaaagttaagtttgagctagcagagattggttcatgaggtttaagaacagaagccgtctccatacaataaaagtgtaaggtgaagcagcaagtactgatgtagaagctgcagtaagttttccagaaggtctagctaagataattgatgaagctggctacagtaaacttctgtttatatcagatatgtgtggatcttggcatgattcactggactattgtagtttttctgtatgccactatggtgaatactcgatgatgatgatgaccagtgtatttccaacatggtgtgtttgtaatagtctgtaatttatctcaaattttatatttttagtatcttagtaggaattttgggggacattttaatgaatttcagaatgtcaaataccaaaaacacaaattctctgttggttgataagttacaggtatttttatatatagcatgcaatttaacatatcattgagctgaaattcttgtgtgctgttcaatcatgttctgaaggctacatgttgttttacttaaaagcatttttataaagttagtgcactttcttaactgtagccctttacccatttggaaattatacacatttactctaatagattgttattaatatttgctaccctacaacttttctgttatcaatacttttgcaatctaaagcatttgcaggcgcctcactaaaatgattaccattggcaatttcctctttatatgtgtaaaaaattttaaatttctgtcagaaggaatgatgtttcctctgagactttgtattttagacctaaggcaatgtttcatgaattttacttgaaaacagatactcactgccaagataaaaatggtttgccatagggaatattgtgcagttttcagagtcattcttatttaattctttctatttgtgcaaggaattatatccattccaatgaaaatggccttcttttaccactgaaattatattttcaataatatcaacaggaaactagtaaattccaggcctttcaccatacctcaaattagttccttgttctctacatttaaaattttttcatctttatctaattcagtttggtgtttgtgtaatttaattgcttcacttctttttctatcattttaagttcccttgtattattaccctcttccatccaaaggaagactgtgttaataccagctatgtattcttaaataatttttccttaatatttgtaattatagcatgtatagacacctatgtgtaatacttatgcaaataaaaactgtggattattttgtcctccattttacaatctctaattttctcactcaagaaatacctcatacaaatgtagtcaagtgaactggaatttttccttttaatagtatatatatagcggatatatatatgtagtaatatataatggatatatcatgttttattacttcccttattgattacaaattacctttcttctagtttttttctactctaagttatactaatctaaatatttccatatggctactttattcttgttcgttagagttacttccaagtttttaacacgatatttgagtttaaatgataaaagagagaattcaggtaattattcagatgacttatgtcaagtgtttcaattagataaattgtttagtgcttatttctcatattttaatgctatacaacttagaatcttaaacttttttgtgtgtatcacaacatagaacagagatatacttagtgtgtatcatatgtcatatgacatgattttgaaataaagacaacaaactgatttcaaacctaaaactttaataagtattgagtaattaccagaggacaattagtccagaactgtctacattgctcactcatgggatttaatccagtggacaattttgttgttgttttgagactggatcttgctctgttgcccaggctggagtgcagtggtgcaatcacagctcactgctgcctcaactgcccaggctcaagtgattctcctatctcaaccaccccagtagctgggactataggtgtgtgccaccacactgcgtttttttttttttttttaattatttgtagagatggggtctcatcattttgcccaggctggtcttgaactcctggacacaagtgatcctcctgtcttggcctccctaagtgctgggattataggcatgagccatcatgcccagcccaatttttaaactaactttctctgtggacccatagtctcaaaatcctggtaatgtaattccattctctatagacctccagtactctagttgaaatttctccataacaaaattgggcctatctgcttttcattttatatccctatcatgttttttaatagcactctttacccagtgactgtacaaattaatggctaaactgagaaacattcagatataaactggagtaggtaacttactatttattcaccattttcttaataatgattgctacataatttaatatctttggcataaaagtatgtctatgagttgattaaattaactttggcctctgataatgggaagggcaaatgggtttcatagaaaaaaccttaggagttaacaaaagcagaagaagagagaacatgattattaataatattaagaaaacatttgacaaaagcatacatttatctgcttgtcttttctaaatgcaataaaaatgagagtttaaaaaaaaaaaaaacacaaaaagacaggaagaacctaatgggaaatagcaacaaattggaaagacagcaggtaaaattatcaatcaatgcagacattttcagacatgtacagttaccaaatatttaactctggtgtacctttctttgaaagctgttggagaatgtgtatctagtaaatgaaagacataaaacaaagaaaagaaagacgtgagtttcaggatataagagactctcatataacgcacataaacaaccaaaactttgtttcaagatgaaagttgcacatgagactcaggaaagtcctggtccagatcagagagggagtttgggagatatgaaaaggagctctttggaagaaaaatggctttgatagattatatgatgtataagcatctggaatataattttgtgtttaacttatacagcatttataaagaattaaagacaggtacatagaaaataaagcaagtgaaaaaatagtttttaattacaggaatcacaaaaatacaagaaagtaaacaaaatcatagtacagtacttgtctctgcaatgaacaataaaaattgacatataaaaatactggaagtatgcaaaaagaactatgggtatttaacttaacattgtctaaaattaataaagaccagtgaggtatgggcacattatttatgaatatgaagacgaacccagaaaaagttactttaaaagttgaaaaaaacacttttgcagagcaggagtttttttttgaggggaaggagtgggacattagtgaatgataggttgttgtaagggatttctaataatatacactttttgaaaaacactataagcatgtatcacattgataaaagtaagcattaatttaaataatggctggtgatagaatatacatttttctcctaatattgcctgaaaacaaaaatattagttattaacaaatatgaaattattgataaacagttgcatatctgaaagttaaagaagagattaaaaatcaatgtgttactccccaaataatctatttttcttgactcttaaaaatttatttcttatctctcatcctgtttttctcactagtctcgtaaccctaatataaagttttgtggttttgtttttggctttgatcatgcattttggaaattttttacattaaattgtatcgttttatatttgctcatgttgtctccccagtgagagttcaagtttcttcctttgtaccttcctttgtatctcagcctatgttaaatttgtaggtggggttcattctatatttactgtgttgaatgtttcctgtttcttatgtagcacatatctgtgtttgaatataagtccactgaagccagaatatatttttacagcatttcctgagtaccaggggcatcttggtaactgttaaacattaacaaaactcagtacactgcaaagttggtctggcaccacatcactaaaagcaaacctttagtagctttccactccattagctgtaatcgagtagaacctttattcatcaaataaaaccatgctgaaaatagattaaagttacaacgcttatgtacacagggtagtatcattccatatgtctaaattgctgaaaaatagatctactactcataaagtatctattagatgacatgtttctagttcagtaaagtgggatcttcttagtcaacatgaacctattattgtggcacatttcatgctcattgaaaacagatttataacatgtaaagagtcttttattaaatagattttcagttcactaaaaaaaaaaaaaaaaaaaaaaaaaaaaacagatttacagtttagggacaacccattgcctaacatgttttcagctcactgaaacagatttacaactcagaaacaacccatcatctaacatgtttccagttcactgaaaacagatttacaactcatacatagcccattatctaacattgttccagctcactgaatattgatttagaattcataaacagcccattatctgacaaattttcagctcactgaacagatttgcaaatcataaacaacctattacctactgcatttccagctcactgtaagtagatttatagtacataaacaacctattatctcacatgttccagttcactgaaggttcatacagaacccgcaaagaaccccaaagggtcaaggttccaccttggacagaaaataaataaataaataaataaataaatgtagacatattgcgttaaaaacatttgatcctaatgtactgtcatatcaatagacatgatagagttttatcatcattttcaaatttaaaagaaaaaaattggataaattaaaggtgggaaaactagttttgtggattttaagaaatatttattttatttttggaaattcaggatgagaaaataaaattattaaaaatgattattgtttataaataatgatgcatttttacaaccttattgccaaagattgtttaattgttatcctgttgcagtatataaagccattagaaaacatgaacttttttgaatggctaatataccaacttttgttagaaattgttaaaacaaattaacagaaaaacttccttttgtatataatttgacattaaatatgtttactggccattaatttgtttttatattatcaatgtgaaaagaccatatttttccttcaaagtatccagaagctaaactttccttttaaactttttattccaatttttcattgctattttattcaatgttaaccaactgaaatttgtaaagacacaataaaaatgttttacttaaaatagtatgggtttaagtataaaaaactaaattttgaataatttataagtagatattaacttatgaatgtgtgatgttacttctaaaatgttttattatggaagttttcaaataagcacaaaagtaaagaaataagttctgttaatccttgggcccatggatcagtttcaattagcattgacatacagccaattttgcttatctgttcaatctcccacccccaacacatacactcactgtaccatcgggttacttcgaaacaaattccaggcaacaggctattacatcagtaaatattttaacattatggtaagagataaaggctcttttgtttttaatgtaatcacagtgacacatcatgagtacattaaaataatacctcaatagatataatttaatttctagcttactgatgattccataatgttgtatttatatatatatgtatgtatatatatgtatgtatatatgtatgtatatatatgtatgtatatatgtatgtatatatatgtatatatatgtatgtatgtatatatatgtatgtatgtgtatatatatatatgaaatatctatctatccatccatccatccagccagccctcttattttttctccttatttccagtactggcctatagttcacccatatttgttagatggaataatcattcaatgtatgatctaaaatattattcaatgtatatatctaaagatttactctggtcttaggatacgaagtgctgagaaaatcagtgagtttctgggcctctctttctcttttctcaatagggcagttataatgattttcagtctatggaaaagcatgttttctaccgcactgcctacttccctatattatgaagtacagtttcctttaattatgaaataaagcaatcaaatagaatttttttttttacttttatgtttcaagatacataactttctttaccaaaagggatgtgtatgtgtgttcctgagaaaacactcatgtatatatcacattggcataaatgcctatcagtactattatatttcacaggataaaatcattttgaggtatatatagaagctctgtaaaatattgggaacttaaaatataataagagaaggaaaatatgaccacttttaacttagtctgttttgtgatatattgatgaaattcattgtcttgtttgtgattatactactgtcaatttttgttttaaattgaccctagttagctattgcaagaccatttagtttgccatttctctcaaatttacatgcttttgtggttttgtcagtaacatttgcttttttaactctctgcttctccaacctttagtctttcatacatttcctcactatagttgttaaaagttattgaaaattccctgaaagtgaaccccaaaaaacttttcttttgaatgaatcagacaaatagtccaaggagatacacagacatacacttgcacatctaatacaagcagaaaaatcagaagtagtccgcaaaattacaaatggtttaaaagcagtagtttcgacaaagcaataatcagaaagaggaaagaagaaagaagtagaatttttctgtatcaggtcatatctggttgatgtgataacaaagatatttttctttaaagaaaatttagcaatgcctttggggaaaaaaacaaagcaaaacaaatctcttcctttactgctttcctggcattatcaatcatacttacaataatatacattgtgattttctcaatgattttttgaaaattgtaaagacagtgtcctgaaatagtgccaaagtaatgtgcaatcaccattttgttagaattagtacatccctttaaaataagacaaaaaatgtccagtttctatgtctcattattatatattgtcacaaaacctgccaagatgtttttacattacagaatctgctagcagatttccctgagcttttggtgacaatgctgaggataattatgaaatcactgagaagtgggcaaaacaaaaaacatgattaattctctatttgtggtctgacatagatggacttatcttagaattactataatatggcatttattgaatcccctatgtaccacttaaaccacttgaatgtgtcttgtttcctttgggaattaaactagtaaagagataaatgtatactctgcctattctttttttgttttttttgagacggagtctcaccctgtctcccaggctggagtgcagtggcgggatctcgtctcactgcaagctccgcctcccgggtacaggccactctcctgcgccagcttcccgagtagctgggactacaggcgcccgccactatgcccggctaatttttttgtatttttagtagagacggggtttcaccgtgttagccaggatggtttcgatttcctgacctcgtgatccacccgcctcggccccccaaagtgctgggattgcaggcgtgagccaccgcgcctggcgcctattcttttaattaagaaatatgaggtactttttataacctagctacttctctgtgctctgatgcaatacagataaatacaattcagtctctacattctttgagtttctcttcctgcacctaggaatgattaatctggaaggaaaccactatcttaaattcatgaataactgaaacaatagagtcacatccaaaggacagaacaatttacttgcaagtgagattccagttattgaggtattttggattattgaggtattttgatattttatatctgtgacaattataagaacctagaaaattattagagcaggataattcacagttcatttgctagaaatttaggacataaaatagacgattaacatcaaggttaataaatgtagaatttggaagtcaccactgtactttataagaatgagaataaatttttaaaaagcttgttttactgatgaattggtaaattttaattatttccttatataataagattaaaaatttcttgagcatgtattacatgttgagcatacttcgatggtctagaatttgtacaataggagatccttttagagagataggccacatatattccaatttttagagagctaggagatatatatatatatacatacatatacccatacaaatttctcttatttaacctcagggctactgtgcccagctaggaaaccttgggtgaaacttatttaatgatatcatttgacagtaatgattatacttactggtgtgtgggaaaaagcatagctgtggcagcagtatttcacatgacaaactagcatagagttgagtgaacaatacggagagcagatgtttctttaggatagtaagagaccctttgtgataagtttcagatgtcaaataaatccatttttacttagcatcccttctcgtctcttatgagtaagcataatttctcttaaacatatggccaaaaatgaaataagcctgggaaatcccatctatagtgtcagtctgtgttatcggggaaaaaaaaatcttctgaattagtaataaaacccatctgttcccacttagaggaaaatgcctcacactgatgaagtgagactaatattcagcattttaaaaagtgtacagaaaaattaaatggtttcttttcttaagaagatgtcagacccatttattcactttgatcaatcttcaaattttgattactgacagtctttaaaataactgataaagaacaatgccttttcccttatatacatattaattctcacaaaacatcctaaataccgagatatttcttatttttagaaattattcatccttgttaatgtcataatttgctcacaatagtaagatgttttcaatcacaattgttgtctcctcagatttttaatagtccttctgattataacagtaatccagattcattgaagaaaagtgtaacaatccagaaaagcatggtaaagaaaattaaacactcatgtttcatttttctcaaaattgtatatacttatagttttaaaatcaagtagttctataaattctataaaaatagcaattactcatccagtatttccctgtccacattactattccccaaatgtagttaaactctctctcttttttttttttttttttttttttttgagatggagtcttgctcttgtctcccaggctggagtatagtggcaggatcttggctcattgcaacctccacctcccaggttcaagcgattctcctgcctcagcctcccaagtagctgggattacaggcgcccaccaccaccttcagctgatttttgtgtttttagtagagacagggtatcaccatgttagccaggctggcctcgaacttctgacctcaggtgatccacccgcctcagcctcccaaagttctgggattacaggcatgagccaccatgcctggccatagttaaagtcttttagtatgcttctttagcatatttatctccatacatgtatatataaataaataacatataaattacccctatttctttataatatggtcacatatattatcttaggcttttaaatatgaaaaaacttgttttcttacatagcttgcagactttacagcccaatacctattttctaccatatcaccatatttaattccatagtcattctttacgttgttattatcatataaattttaatgattgttaaaccatctagtatatgatgcctatttttcctttttcatacaactttctagtctccacggattcaacaattatctctttttttctcctttgcttatagtacttatcactactgcaccaatatattcccttaagagatatgtatatctcctctcagtccttatcctgaaatattcaagggagtaaacttttgctacttgttattcctgaaaagtatctatttcctatctttttatcttattgttgtatagtccgggaggtttcctcaaatttgtcttccatcattctattgattttgaactttctgccactatattttaatttcttaggactcttttgaggatattccatatagcatcctatgtttgttttataatgttaaatgtttcctacatcctttctattgtcttgatgatgcttattaacatttcattcttttggtctgggtctttcctgttggagatattcctcaaacgtatggtgctacttagctttcttagattttgtaaatatctagggatttaaattaagattttttgtatttattttaaagtaattttaagaatagcttttgacacttacatcaagctttgtattactattttcaacaatttttttaagtaacatttttaactggtttcagtaatctcacaaagtaatctacaactatttttttccattatcaagatacactgatggattcatttttagttggattggcatgttttcaactaaatatggtactggaacaatttatttttgctcctgtttaagtgacaatattgttaactttcttttgtacatgaaaggaaactttcatgattctaaattttttcttttctaatctttgtcgctcaaaactcagaaatttataacacaaatttcttgtaaaacttggtcctatagaggggtgtgaagtcagtgtgattcttttctttgtatacagctttagtttcctgtcttgagctcaaatgagtatagttattaaatattaaaaatatccagaatatgtctaaaaatgggtattctccctaatttttctgataatatgcttttttaaaaaacttttcttgtgcaatattttcattagttaggtagagtcaaaaattatatctttgataacttcctttattctagtgtatttagtcattttataattcagtaagcttcttccatattgtattttcacttaaatatttatctctgtgaatttatctagatgtctcaaatttgtctttcccatcaagaattcaatatttgaaaatgacaactgttttttttcactgtatcaattatagattttaattttgtacttgcattattggatttcctataatatttccttatctccaacatctcccttttaatcttaaatgttgcttttttaaaaacatttttccttttgactttctgctacttttttttataaaatctcttaaacttacattttttttgttctatgaactttaaatatcaggcaattttctaatatattctcttgtgcttacccatattcaagaaacatattgttttcctaagcctttagaatgaagttcattttccctttttctgaaggtaatatgttagaaccatgttatctattttccagtgttatttctaccctggaaggcaaacctgtttgacaataatcaaagtatatcatttgctgttcattccactcgaaatggcttcctccaatcttcagctcagaagtggtgtgatgtatatgtctcctaatctaatactcagtgttcatgactccctcatctactgcaactattctaggtcatgtggtattttctcctaaaatctggttcgatgacattttagttttgtgaaatatacactgaactacaattctctctttgctttcttccctctacctatttactttttgggtaactgcatctccctacataagatgaacttctgcccattcttttttttttttttttttttaatttttgtatgtgtttttttttaattatactttaagttttagggtacatgtgcacaatgtgcaggttagttacatatgtatacatgtgccatgctggtgcgctgcacccactaactcgttatctagcattaggtatatctcccgatgctatccctcccccctccccccaccccacaacagtccccagagtgtgatattcccctccctgtgtccatgtgatctcattgttcaattcccacctatgagtgagaatatgcggtgtttggttttttgttcttgcgatagtttactgagaatgatgatttccaatttcatccatgtccctacaaaggacatgaacttctctgcccgttcttatctcccaaacttactgccagatggttctggtgtttcctggaatgtttgaagaaaaagaactgttaaaggccattcggaagaaaagagaattaaggtgctcttttcagagtgatacttgtacatgtacttaaggatgactaactgatgactagctgttaatatggatttactatttggaaactagctaagagacatggggttaagaaaacaatacatgccatctttcactttaacatgtttattctattagagttgccctggctaaagaggctcactgcttgttgtgttttttagtctagatctattaaccttgtaattactttcgaggggaaatctctctcactattgggagcaagttttccaatattactagaatttagtggtggcaagaattttcactttgtacttcccctgagatttttaagttgtttcagtgggagacacttcactagggattttcatcagctcccatttaaataaagttcctcagcaggccaatctttaaaatgatttaactgtcggccgggcatggtggctcacacctgtaatcccagcactttgggaggccaaggcaggcagatcacctgagttcaggagtttgagaccaacctggccaacatggtgaaacaccgtctcttctaaaaatataaaaattagctggccatggtggcaggcacctgtaatcccaggtacttgggaggctgagacaggagaatcgcttgaacccagaaagcggaggttgcagtgagccgagattgtgccactgcactccagcctaggcaacagagtgagactccttctcaaaaataaataaataaataaataaataaataaataaataaataaataaataaataaaaataaaaataaagtgatttaactaactttctatcggagccagctgaattgccttcctctcttttaaattttctgattaacctctgccttttttttatattagaaaaagtaaaacattcaaataagtatctagaaattaaatttttttaaaaaacctttgtttgccaatacattattttgggaaaactttatatttgcactaagaaaaattgtctctttcgtgtagcttacttttagaatatatatttctttatgatcagaagttgaatataaaagtaaatatttctcaaaatagagaaaatttaaactttgtttacaagtgcttcagttatattagcttcattaaagttgatagagtaaattgaatgacatgtttcaaggatttatatttttaccacaaaaatatagtatggatacattagcacaaatatacctaatatttattgccaaactataaccatccaggtgtattatactgtcttcttaaggagtcaaaaaatgtaaaactggttgagagataaatacatatagcttttgctattgtctttattggtgagtcctaattcttatagtttggtagattcacgggatctggtgaggaggaaccaatgtgattctgatactacaggcaagcatccaaactatgtggtttaaagctaagtgttatggcattatcatataacaaagaggaaaatcaaagaagcaaactttagcagtggatacttgtcttttatcaaagctctaaagcaattgtcctgagctgttgagagaaaagaaactatgatttcctagatctttcaactacagaatcagccccaattcttccattcagtagcatgtagtctggggacaatttggagagaatatgggattgaatgaacacttcaactttttttttccccttgaaagtgctatttgtaggatatgattgccactatccagataaagcataatagtgctagggatgaagaacagagagaagtctgtatttcagagctttagagaatgaaatggacagaaattgatggccatttgactgtagtaagtggaggaaggggatattttatgtaactcttatttccaccttgaattaggtaggaaatcactaccaggatagagaatgccagaagacaaacagtattgtgaatgttatctcatatgtagtgttggctggattgaattttatgtacctagaaaacacctgtactaaagatatttaaaagatacttttaaatattggcctgaattacaaagggttgaggaggtcaaagtctagagatataacctgatcagttctacccccaaaatatattttgggttagtttgtttctctcccaccccactaccaggatgcttctttggccattaatcataatctacattctccagctcctatctctaactctataaattgtgtttcatacaacagtcagagtgatattgtgtgaggggttatgccacttttctgcttaaaggctccacattacaattaaatttaaagttatatgtcgtattctgtctctaaggaccttgcatcatctggctcctgggatctcacaccattcctgtgcagttcttgagacttgaagcccactggctttctttccattcttcaagctatcttacttcagactgtggcatgtttcatttcctgtacctggaaagatcttttccagagattacccctgaacccggccccaccctctattcctacttatcaacatttttcttatcctttatatctcagtgtaaacattacttctacagaatgatctgatcaccccacccctcctcacattctccacagtatttcacaactcagtaccatgtttatttcattaacgacacttagaacaatgtgtaatttttttttattatactttaagttctagggtacatgtgcacaatgtacaggtttgttacatacatatacatgtgccatattggtgtgctgcacccattaactcgtcatctacattaggtatttctcctaatgctatccctccccactcccccaccccaccacatgccccggtgtgtgacgttccccaccctgtgtccaagtgttctcattgttcacttcccacatatgagtgagaacatgtggtgtttggttttctgtccttgcaatagtttgctcagattgatggtttctagcttcatccatgtccctacaaaggacgtgaactcatccttttctatggctgcatagtattccatggtatatatgtgccacattttcttaatccagtctatcactgatggacatttgggttggttccaagtctctgctattgtaaatagtgctgcaataaacatacatgtgcacatgtctttatagcagcatgatttataatcctttgggtatatgcccagtaatgagatcactgggtcaaatggtatttctagctctagatccttgaggaatcgccacactgtcttccacaatggttgaactagtttacagtcccaccaacagtgtaaaagtgttcctatttctatacatcctctccagcacctgttgtttcctgaatttttaatgatcgccattctaactggtgtgagatggtatctcattgtggttttgatttgcatttctctgatggcctgtgatgatgagcaaaaatgcataattttttaaaaagtattttcttctttgtagtctaatttgtccagtagactaaatagttcatgggggcaggaaccacatctgacttgtgcccagtgcatggttagactgaatgcccatattccccaggtgcccaggatagccctgtttcatgcctgctgatctgatgattgttaataacaccgtcttcactctcaaaaatgtcttgatttggatgataaattacatgtcaatttatgtatggtaaacactcaataattatttattgaataagtaaataaatgggaaactctgacacatagatgttattaaaatatataaaaaataagacaatttgaagtgcagtgcaatggttcactgatgatgtaaagcataaagggttggaaagactatttattgcagaactcctgtgtatatatgtgggtgtttaattaaaaatataatttttaaaacattattgagacattaagatttcaagtttttttaaaaaagcatttaaaggcagatttaaaaaataactttgcacactgttgatgaatatggtatgttttgatttattacttcagaatactgcatttaaatgcggagaaaaactagggaattatttcatttaattgtgaaacatcttcccattagtgttcaaaatcccagattatatttctctagagtataaatttgattgaatcctttcatttgtctagaaaatatcaagaaacattgagaaagtaatatttcaatctatatgtttatatatatgatatacaatatgaacacatacatatgtacatatatatgtgtataggtatgtttcatacctgaaaaagtacatatgtctattacatacatctatacagatatatatcacatatcacatatgtatgtatttgctcatatacatttatatatatatctaggaatgatgctgaaaactttcattttgttttaaaaataaaacaatattgagatctagattatataaaatactcaaagagaaatagttgcttttatttcaaccttaaaaagctaacagtttatgtttaaaagataactaacattaaaaaatatgaatgctatatgtgtactttatttatagaagaactgagcctggagtagaggaggcagctggatataaaaaagtgcatagactggcatcaaagagagctcactttgaatctgggttttgccaagtgtgttatcttagaaaagtcatttaactccctgaccttcaattttttcacccactaagttaatagtacctagtacaacatgaaattaggaggatgggaaatgatctacataccaccataccattgctatgcaatcgtaagaactctaaatataacttctctctttaatgttcaaacatgcggtgatcaggtctacctgccaggtttttaatggattgtcacagacccaagcactttcctagaaggattatcatgatgagcttaaatccctgtcctgtgagaactatctggggggaaaagaaacaattaatggatgagagatagcttcaaaatcagtggagctgacataaaggaggagttgatttctctgttggcatgtttagggtatgaaattacgagaactgagttttgagcgttgtataaagaaattaggaattattacatagcagacagaactttaatgactgattggagtctatctaaactctaaaatttatataattataaatagtatacaataaggtacataatacaagaaactataataaggagtaggaaaaataatagcagaattttactaggtttcaataattaggacaaatgattgatgaatgtcctgaaaatggtaaggaattttgaaatcaagaatattggcaaggcccggtgcgatggctcacgcttgtaatcccagcactttgggaggccgaggcgggcggatcacgagttcaggagatcaagaccatcctggctaacatggtgaaaccccgtctctactaaaaatacaaaaaattagccgggcgtcgtggcagtgcctgtagtcccagctactcgggaggctgaggcaggagaatggcgtgaacccgggaggcggagcttgcagtgagcggagatcgtgtcactgcactccagcctgggcgacagagcaagactccatctcaaaaaaaaaaaaaaaaaaaaaaaagaatattggcaaagggttagtatagagatatgaggaatatagaaagaaagaataatttcttactcagagacagtagaagggcaattgaatacattaaaaaatctgaagtgaacagacaagaagttaataaacttcatgtctaatggtaacaatcattttagtcaagtggaaagctcattatatagtcagcactatgctataattaagtaaaagtgacaggattcttcttacatattcatatataataaatatacatttataaacctcactgtaagaattacatattgttaatatcactgaatgttgtaaatattgaccttcaaaacattttatgtcagaggcacaatcagaacaaaatgaaatgggcattgaagaaaactgcaaatggtaaaatccaaattagaccgaaaaaaggcttcctgattaaaataaggtctgcaaattgtgacctgtgaaaactgacctgggtagaaataatggctacacataaaataatctatataattagaaaaagtggaaatccgagaggtagttaagaggaagattttatgtttaatggcttgaacaattcattaatattttagattttttaaatcaaaaaatgcaaagaatgtatgtactcagattagaaaaaataatatatatttagattagaaaacaaatactaaggccaatgaataaggagtacttgtactgatcgattgctttaacatctctgtaaatactcacgcacccatttcactgtggcaaagagcatggggtcatataccaggacagcgaagtttgcaccatgtagtcctatgtttgttaaaaattaaataggctgggcatggtggctcatacctgtaatcccagctttttgggaggctgaagtgggcagatggattgagcccaggaatttgagacctgcctgggcagcataatgagaaccagtttctacaaaaataaaaaataaaagaaatgcaaaaattagccaggcatggtgacacgtgtctatagtctagcaacttgggagactgaggtgggaggattgtgtgagcccaggaggttgaggctacagtgaatgaacatagtgccactccctctggcctaggtgacagaggaagacactgtctcaaaaaaaaaaaaaaaagaaaaaagaaagaaagaaatgattgatgctattatgtgtcctattgagaatcaaatattaacataaagccataagaatagctttaattttgatactcttgtatctgtccaatataaggacaatatatatcttcttacatattcatattaatagatatacatttataacaatgtaagctactggctgattatataatcaagtgtgtacagcaggaccctgccactcagttctgtgactgttgctgtctctttaagaaggctcaaatgcctttgaaataagtaatagcagcagaccaaacagctggggaatcagcacgcagagggaaaaagagcaaagctgcaaaatgagtttacaaatgttactagagtaacgagaaaaagttgctgagatgttcaagattcaatgcactctactaaatacaagtcctttgaaaaatgtgtacagaattttcaacattattttggacatatatcgtccaccccccacctttcctactgttttctctgagatgtaatataaagctattgagcaaatatgattcatactctcaaggttactagattggagaaaaatggaacacacagtatgttatgtttgaatgtactcaatatgcatgaacattgcaccattgaaatagtgattacgtacattcaagtttaataagtaggtaacaaaattgtttgattttgatgactttcttttgaggggataaaactccaaggctgctacattttacacaaaatacaagcaaattattttgttttccattttaaacaaacaggagagtttctaaggcctcagtgggttacctttgttcacatcagcttgccattatatttttaaaattcacattttaatggtgatcatataattaatgtagcaactgccaacaatcagattacattcttgttctgtcatttaaatgttactcattataagaataaaatcaacttttaaacagcttgtttattctatttttcaaaacaagatttttttcgatgtctttcctagtaccttctgaagaggcagtgatcaatacatcttttttattgatggaaatataaacaatgaagtgtagacagaaagcaaattttgtgatatggttgtcttctgaatagtaacagctattgaaaaaaaccactcaaagaggaaaaagtttatgatgttaactcgttataagaacaacattaaggaaaggcgtcctgggtatatatacatttttttttctgtatttaagaaaaaagggaacaatttcatttattttataatcagaattgtaaagtatagctgaatgataggctttaattaaatctgaaatttattctttgaaattgaggtaaataaaactctgtgttcatattacatcatataaaacacatgtgttcacaacccctttaaaacattttcatcacaagatggaatatagaatagaaataatgcatatttatgtttgtatatatgtgcatatgaacagagagtcacaaaagatattaggtgaatgtttaagaaatattcttagtccatttttttgtttgtttgtttgtttgtttgtttttctgagacagagtctcgctctgtcgcccaggctggagggcagtggcgcgatctcggctcaatgcaagctccgcctcccgggttcacgccattctcctgcctcagcctcccgagtagctgggactacaggcgcccgccaccatgcccagctaattttttttgtattttttagtagagatggggtttcaccgtgttagccaggatggtctcgatctcctgacttcgtgatccgcccatctcggcttcccaaagtgctgggattacaggtgtgagccaccgtgcccggcctcttagtcccttcctatgtgaggtgtactggggtacattttatcactctttcatctcagtaggtgctgataattcaggtttctctcccacattatcataacccatatgaacaccaggaccccatctttatttactttggaacctaaaagtatattgggacattgtagttagatgctcgtgcacgaagttcagatggggctcaccaaaatctcaggagacgcactcgaagttttctggatgaagcataggcgtgtagcggtggaatgagctgaacagatgaagtagctcctcggcacaggctaagtggaaccctcccttgaatagttagggaatgtctgcagatgtgaactctgtcttcagttagcaatttggcactggcaatttggcactgacaacaaatgggaaagaagagtggggcagattctcaatgataactctggcccactgagatgcacagcccttatcaccagccccagaaacctctatgaaggtccaggtcactcacctcccttgtcagaatcatcaatggttatctgagtatctgtgaggattttggctaatctagatcatcttcagttttcttccaattctattgttctgatacatttgtaatttgctacattgttctggattcttgaatgattttttgtttccccttaaataagcctgttttatccagtcttaggtttggcctttagaaatattattttcatttttagattccagagcctatttttaaaagtaaaaacaaagtattaactgtttctctcaataaatatctttattctctatatggtcatatgcatgcctttgacaaacagaaaaaagtcacttaccaggaaataaagatgtgttaatattttatgcctcacctcactacataggcaccatgcttggcactggaaatttagtgcagaacaggacactgaaggtgccttccctcacagagcataacgtttagtaaaacacgggacacagtgtaggattttaggaaggtatatttgaagatccttaaaatagtctcaagagagaaagtcacaagttccagctgtgatattatcaaggtggtaagagagcttaatgcctattttggaaaactttagaaatcttaatttcagtaagcttatcccttggcaatcagatgctaaaagagttatattctattataaagacactcataatgaaactaaaagtaaaaccttgttattctaaaaatatgttgatttagactttccccacagtaagaacccttactcattgctattgattattaaagaataaagcttttgatgaacttgtgaaaccttgggtaaagctaatttccctttatactatcagtcattgttccaagatttaaatttcataaaaagaacagccgtctgcaaaaggctttgctacttagattgcagttttaatattcatttgagcctggcaatttttgtggaaaccatagatgacaaattataattttgtcttttatgtggagttttattgtgaagactcctgaatgtttcaaatttaatattaaaacagccttggtgaatgacaatgcatgactgtatattgtattaacaaaagaagtaacatcggacacatgttctatccataatatgtggccatggtaattcatggtcacagaagcagaagataatgttacagatctgcacaacagctgttaaaaattaatttattgtttattcattcaacaaatacttactgagcctgtgtcaggctctcttatgggccttataaatcagtgcacatctccctaattttggagcacacattatagtatgggactcgaatgatatattgaattaaatatattaatcagatggttataggtttttttgaagcaaaagaaaataggacaagggagccaggtgcggtggctcacgcctgtaatcccagcactttgggaggccgaggtgggcggatcacgaggtcaggagatcgagaccacggtgaaaccctgtctctactaaaaatacaaaaaattagccgggcatggtggcgggcgcctgtagtcccagctactcgggaggctgaggcgggagaatggcgtgaacccgggaggcggagcttgcagtgagccgagatcgcgccactgcactccagcctgggcgacagagcgagacgccatctcaaaaaaaaaaaaaaaaaaaaaaaaaaaaaagaaaacaggacaagggaatagtggatgatgaaagcaaatgatgctatcaagtagggtgaccagtgaaataatcttaaacaatgtagcatttgaggcccggcgcgatggctcacgcctgtaatcccagcacttcgagaggccgaggcgggtggatcacgagtcaggagatcgagaccacagtgaaaccccgtctctactaaaaatacaaaaaaaattagccaggcgaggtggcgggcgcccgtagtcccagctactcgggaggctgaggcaggagaatggcgtgaacccgggaggcggagcttgcagtgagccgagatcgtgccactgcactccagcctgggcgacagagcaagactctgtcttaaaaaaacaaacaaacaaacaaaaaacaatgtagcatttgagtggaaaactctagggtttaaggaaagctggggaataaatgctccaggaagaacagcaagtacagagactctgaggtagtagcacacttgttgaatcaaggaaaagcaagtgggccagtgtggctggagagagttagaaagaggaagtgagagttgattaggtcagaacggcgactgggagacagaccatcttgggtcttgacataatgattaggactttgtttttattctagataacatttggaagctactatatgccttgtagcagtaaaataatttcacgttgttttagaaggattatgctgcttcttgcatggagaaaaagagactgaaggaaaatagagtagaaaagggaaaccttttagacctagcatagctcaagcatcaccctgcataaatttaaaaatgcagcaagtactgtgcagatactgaaatcagaaagaattttttaattgacctattcgaatgaagctcatcaactgtcagtgacattcaaatgaatctgcataattattcatgtaaagcaagcctaagatttgtattatagctgaaggtctggagcaagatgccttagaatctttcagtatctcaactcaagagtgttcaaccatggtaaaaaagaaaatacgtgttgtagtgtctcaagaatgttcaacaatggtcaaaaaaattcaagatgaaagatgattagtttttttaattagtaatcattgaagttctatccataatattttctacaaagatttttttggagtggtacttaaggtaactgaattttttacattatgattatcacaacgttgatattgctagaaactctgttgtgactgtacagtgtgatttcttgatggactaacactcataccttctttaaagatgtaaccaaaatgcctctcaagaatatatcgcttcaaagagtttatgacatgtttctggccttcacagcttgggaaaagaataataagcaactggcaagaaatatcccatttttttttctcgttggagaaattacttatacattaagcacaatggtgaaattttatatttatatgaatatgaaatacgaactatatataaattgttcatatttatatatacacatacataatttcatatttatatgaaaatatagttcatatatacacatatataattttgtatatatacatgtatatatgtaatttcatatatattttttcatatatatgtgtgtgtgtgtatatacttatatatgcaaatacatataaaatcatttacccatgccttgtagagtacaccagttgttgacacaagcctaatctccagtcatcattgggaagatatcccttatgtcatacatagccagtgtggcagacaataagttacttcgattcattcatttaaccaaacatacctttatttaggaaaaacaaatcagacatggactatctttgaagtatagagttagttgctaggaatatcatattttccatcctcagagagtttaatctttttaaacatcaccatgtgccatactctattttagataccacccactagattatcattcatggggttaaatcccagcctcgccacagaattacctgaattgtctatggcttgtcttttttaaattgggggtaagaaagtcacctactcatatggtacttgtgacgattaagtgatttagaccatgcccctccagaaatgctggcccatactggtaaacaagtggcatataacagtgctttgttgagaactacatcatacctcagctcactgtgtcagagttttctcatatctacattagaacatgatactgaggaatcaattacttactgtaaaattatagagaaagtggcagagaaaaacacagtcattaaataattcaagaatatccactactagctttgggatattgtcattataatgtgtaacaaacgtttttaggaatgttttaaaactataatatcatgctctaattacatgactttatatgatccaggtatctttttggttgcatttatgacttcttctgtagaagagtaaagtcagtgctaataccttgatcacgtatgattgaggattcatttaaatgtttgattttagaagacttttgtaacctacaactttaacatggtcaaattttattgaatctctgattgatatttcttaaattgggtttttagagggaccagtgagaagtaatgctggaatttaagctgttaaggaaccacctattgagccattcaaaagcagctatagggtggaggagaggcaaaaccattccttcctttttatgagactgcagcaggttctggtgtctaggatggactacaacagtggcacctggcacggattccacactaaactgcccaagcagtgagagaatttgagttatatatagccaatttaggaaaaaaaaaattgaactctaaaacaaaattcatacagaagcagaatgctttggggcctagcttgaaagctgtttggcttaacagcttatgtcaccttctaatgtatgaaaatacacattagatagttctaaagaaaaatatctaaacatgttcaaagaagaatcaaaattatgtacaccccaagacctcctctttgtatggactattgaaaggagacttgcagttattgaaattaccagttatgttgactaaggcatgagcagaagataaaccatggagttaaggatcccatgtcaaatttgggctttcatccattcctctggttaatagcaatttgtcccttacttctttccagggtatcattcctttgtttctattgctggatctcagtgccatttgatccaaaagtgatttcctgaaattctgcccctaaggtgatctctgctcactccatattcactttgtatctctacattgggtaagaattctgcaactttgtagttgtttattaaaaatacaatgcagcatttcactttttggtccaaagccattaataaaataaactctcaccgggacagattcaaagtttatttcttattttcccacaagatatttggctctgtttattccttgggccatcttctcaatctggtggctttagacttcagcaagcaacatcacagctacgctgagtcttttccctctgaagtaataaaatgactttccttgaggatattggaaaggagtaagccgtatctgtgggtaatgcatttatttcccagacttcaagaactttagcttcttaaactgaaactcattagaaaaataatgtgtaatattatttgttttagtgtagaaattatttctaattaaacacatattcaatgctattcccagtatctttactctctttggaatattttataataacattattataaatgatgaaggaggatgtggtatgcttttaaaatatgtaagtacaatatagtgactgagatacatgagctgctaaagaatagacaatgagatttaagttgtaactttactaccttccaccatgacttatagatagaaaacacacatttttaatgaataattaaatgcaggaatacattttctatctaaaaaggaacaatgtgatggtaatcatacttttgtttccagaaatgatcctcaagttattttggccatgctttatacagcacatttaagaaagcattagctgatgaatgtcttctgacctcaaattaatgtgtattattgaattaattgtataatgcatgccatgctactatacataatctaccacgggtattgagtcttccatgctaagggttcaagaagctttatacaagaatcaatattgaattttgcaggtgtaatctagagaaaatttcttaattgtgaaagactatttttcaaagtggctcacaaagctcctagtttcatttaatatattgtctccaataatcctagcttagtaccagttatttgcagaacactggctgccagagagtgtagcttctgacaatgggtctgtgtttatttcagttttgataaaagacttgtgaactggaaatttatgctatcaacagacctcaaagaaatggctaggctggaaagatagcgtagattactaagaataacttaaaatagatccagaaagaaaggattggctaagatttgcctgattgatggtgttcaacatgttatttcactcaacttcaggaatgaatcctattaaattaccaatcagttgtcttaatggtcttctcttagataaatatgtttattccagaaaataaaatgtacacctcatctttctttacttgcaccatatatttggccatggctagtaagtagcccaacaaaagttcttgctgttataataaaggacatgttatatatagtatatagtatatagtataggacataaaactcagagtacagatgaaccaatgtaccattcccgtcagtggaaagatatccttctgagactgtctttacaatgaagttcaagtacctcagctccaaagtcattacagtcacaatccaagcaaaagaaaaataaaatttatctatgttatatctaaagaaaacaggataataaatgaatataaaaataacaaaaaaataaggaattttttttttaacttacagccctagtactgagaaactgctcatacaccaatttcattaccaatttctctcttcctttataggaaaacctacaggattcacatattatcctttttggctataataaaaacatgcatcttgtgtgtttatcatatgccatgcattctgctaaaagcttcacatagcatttaatcttcacagtaactctatgtggtatattttctactatccttgttttacagagagaaaagtgaagtttcaacagatgaagtagcttatagtctcaaaataggaaatgataacactataactcaaaacagacgcttaagccttatttaatagaattaatttgagatttatagaaaaattgagaagatggtactgagaggcttcatatatctcatactcagtttcccctattgctaatatattactgtcatgtgtttgttacaattgatggactgatattgttacatttttattgacaaaagttcatagttttctttgatttctttaatttttacataatgtacttttctgttgtttttgttgtttcaggattccatccaggatacaacattacatttagttgtcgtgtctctcaggattcctcctggcatggcagtttctcagaatttccttgtttttgatggcttagacagttttgaggagtagtactcaggggtattatataatgtccttcagctagggttgtccattgtctttttttctcatgctaagactagggctattaataattgagaggaagtgccattttcatcatgtcatgtcaaatatgcataccaccaacataatttataagtattaatatcgtccttgattacttggctgaggtagtgtttgacaggtttctccattgtaaaattactctttccctcattctttgttctgcacactttggaaggaagtcattattcacagtccacatctaaggagtaaggagttatgcttcgtctccctgagggcagagtgtttatatcaattattcggaattcttctacatgggaaatttatctcattttctccacttatgaatttatcatttttgttatggggtattggaatatcaatgtattggatatattattatccaataatcatgtatgttagctgtgatcaagttgaggaagtcccttctgtacttctactttgctgagagatttttatcataaatgggtgttggattttatcaaatgttttctctgcatctaaagatatgatcatgtttttcctttatcagttaatgtggtggattaatattgattgattttgaaatgttgagctggtcttatattcctggaataaatcctactcggttttggtgtgtaattcttttcatgcactgctacatttgatttgctaatattttattgacaatttttacagctacattcatgagaaacattggtctgccgttttcctttcttataatgtctttatacagttttggtattagtttaaggctagcctcatccagtggactaggaagcagtattttcttcactattttctggaagacgttgtataaaattggtatcatttgttctctaatgtttgacagaattcaccagtgatactccttggatctggtgctttctttctcagaaaattattgttgattctatttctttaataggttattcatatttccctacatgagtttggtagtgtgtatcttttaggaaattggttcatttcaacttagttatcaaaatttatgggactaaatatttgtgttcataatattcattattattctttcaatgtccttggcaacagcaaggacttgatttctaatatcaagtaatttgtgtcttcttgtctctttaaaaaaatgaatccactgtaagtttatccattttatttatcttttcagttaagtatcttttgattttgttgatttactctattgttttcctgtttttaatttcaatgacttctgcttcaatttttatttcttcccttctgctttccttaggattaaattgctcttccttctctgattttctgcagtagagcctgagattattgatttttgagctttcttgttttataatatatgcatttaatgcaataaattttcctctaagagacaacagattttgttgcatcccacatattttggtaagttatattgttatttttatttactctaaatatttttgagctactcttgagtcttctcctttgactcgtgttacttagttgtgtgttgtttaatctccaaatatttgaggatttcagtttcctttttattggtgttagcatggtatatttttctccatctcatttaacctatctatgtttttatatttaatgtgggtttcttttttcttttcttttttttttcttttttttgagactgaatctcattctgtcacccaggctggagtgcagtggcatgatctcggctcactgcaagctccgcctcccaggttagcaccattctcctgcctcagcctcccacgtagctgggactacaggtgcctgccatcacgccaggctaattttttgtatttttagtggagacagggtttcaccatgttatccaggatggtctcgatctcctgacctcgtgacccacgcgcctcagcctcccaaaagtgctgggattacaggcatgagccacgatgcccggcctaatgtggggttcttgtagacaacatataattgggtcttgtttttattttttaaatccaccatgacaatctttgccttttaattggtgtatctaaaccattgacatttaaagtgattattgacacagtttgtttaatatgtaccatattgtaatttgtcttaacatttgtagcacttttttctttatgctttttcctctcttttcctatctcctctggtttcagtggaatattttgtataatttcattttttcctcttttagcatatcaattatattttgctttatatttttagtgtttttcctatggtttgcaataaacatttacaattaatctaaggtcactctcaaatagtgccatattacttcatgagtagtacagtttccttataacagagttttccctatttcttcttcacatcccttaaaacattgctgtcattcatttcactaatccatatgctataatcattcactgtattgtttctattattattttaaaaaaacagctatcagagaaattaagaataagtaaattaaaaattttatctttattcctttcctgacacttttactatctttatataggtctgagttttgacttgtatcattttccttctccctgaaggacttcttcaaaatttcttttgcacggcaggattattctcaatttcctcagattctgctcgtttgagaaagtttttatttattcttcaattttgagtaatatagtgtatacagaattctaaattgatgagtttgtttttctttcaacacattaaatatttcataccagtctttttgcttgtttggtttctaatgagaagtctggtgtaacttttatccttgttcttctataggtgaggaattattttggtctctggctgctttcaaaattttatcatctttttatttggttgcctacagtttgaatatgatatgtcttattgtggatagtttagtatttattctgcttagtgttctctgagctttctagatctatggttttgtgtctatcattaattttggaaaatagccattatttcaaatatttcttcagctgtctcttccttctcatttcttttccaataacatgtatattatgccagttaaaattgtgtcgctattcttaaatgttctgttcgttttttattgtccttttgatgattgcattttagctcgagaagtttctactgacatgtctttgagctcactgattctttcgttagctgtattcagtctaactgatgaacccatctaaagcagtttcatttgtgcagtgttttttatttccaccacttacttttaactcgtatagtttccatctctgtgcttacattacccaactgttcttgaatattgtctacttttttcattagagactttaacttataattattgttattggaagtttctggtctgataactccaaaatctctgctattttgtagcccagttctgatgcatgctttgtttctttagactgtttttttctttgccttttagcatgtcatgcaaatttttgtagaaagctagacatgatgtatcaggtttatgaactgaggtaaattgacctttagtgtgtgtgtggttttatgttaacctggcaaggagttggattatgtttaatgtttgccatagctatgggtgtcagcagcttccatttcctctaatgtccttgtctttttctcttctgctgtctttgggtttccctaaaaactacttttcaaagagaggctgagccttgcagctctttcaaatgtaatatattatattattattacactctggttatagtaacaagaggccagtgatttagtggtaaggtttgggggaatgtaaagtatcctagaattctgtgaccaaacttcagttatcagtgggcttctgtcccaggtctgtgaccttcacaagttttcctcagcttcccaactccttaggtgagacactaaggctagaggagaaggagctgggtaattgcccttctccagcatttgatagggctctagtaaagttatttgctgagtaagttctttgtaattgagaattctgagtttattttttaaacgcttacttttccctttcccctgccagaaacatgagggttttttttcttaattcttcactgtgagaacgtggtgacgttcctagaagtaaagcacacaaaaatgtgcagctctcctaagaccgcaagttgaaagagtttctcactcttactaaagtctactgtccatctccagcaattcatccaagttgcttttcaaatgctccttcccatttgtagctatgatggtttgttctcctggtgagctgatctcagctgtggttacctgtatttgcctgtctctccagatttcaggatgatgacatcgatttactgattggtccaagaaagattgttgattttcagttttgcagcttttctcttattgtgcgaaatggagtgatggcttttaagctttttacatgctggagctgaaactagtctgattctttactcttaatcactatgctcttctactgtggctcacaacatttatcatgcaccagaatctcccggaaaacttgttaaaagtcagattgccaggcaccatctccaaaggttctaattaagtaggtctggggtagggcctgagaatttgcatttctgacaagttcccaggtaatgctgatactgcagggccatcaaccacgctataagaaccaccattctactattttagtagctaatttgagttcttttcatgagccaagtaaccagaaatgtgaatggcccaaacagcttgcttctcgcatttgctatgccatgttgaaatcatccatatttctgtggtatcctcactatacttcccattattttgggtttgattgcagtgaaaaaagttttagcactacctgtgtttcttttattatattagtttattgaatttttgtcatgtaaaaatattaaattgcaaaatcaaaatccagatctctaggaaaaatttgtagtaagtgccaatcccattccagagaggtaatatctgtgcagattcacatatatatgtgtgtctttgtatgataggaagatttgctttacatgtgtttgtagtcctgaagcttgcttttgtaaacttacaatgtcataaaattttgttttttatacatatcaatagattacttcattcttcagacaactacatagtattccattttatgaatttgccataatttagttatcacatttttatgtactggactcaggcagtttaaaatacttttctgttacaaaaatcatagcatttgacatttgaatacataagcctgtttttatactggtatactgtagtataaattcctagaagtagactttttgaatcacagggcatatacactgtattagtctgttctggaattgctataaataactacatgatgcccagcatagtggctaacacctgtaatcccaacactttgggaggccaaggggggtggatcgctacaggccaggagtttgagaccagcctagtcaatatggtgaaaccccatgtttaccaaaaatacaaaaaaaaaaaaaaaagaattagctggatatggtggtgcacaactgttgtcccacctacccaggaggctgaagcacaagaatcacctgaacccaggaggcagaggttgcagtgagccaaaatggcgccactgcactccagcttgggtgacagagtgagacctcatctcaaaataaaaaataaaaaagaactacccgagactgggtaatttgtaaagaaagaaggtatagttggtttaaagttctgcagggtgtacaggaagcatggctagggaggcctcaggacacttacaatcatggtagaaggtgaagaggaagcaaggcatggcctatatggctggagcaggaggaagagagtgaagagggaggtgctacacactttcaaacaaacagatctcatgagaactcattatcatgggaacagcaaagggaaattcacctccatgatccaatcacctcccaccagaccccacctccaacactgggaattataattcgacatgagatttgggtggggatgcaaatcctaaccataatatacacttatctttaccaattaattaacaatataaatgataatttgagagtaccaccagttctccataatattgcgaacccagatatcattaatttttttgtactttgcaaatctacacatttgtagtgtgagtgagcttggatagacataatttttttttttttttcgagacagagtctcattctttcgcccaggctggagtgcagtggcaggatctaggctcactgcaagctccgcctcccgggttcatgccattctcctgcctcagcctcccgagtagctgggactacaggcacccgccaccatgcccggctaatttattttttttgtgtgtttttattggagacggggtttcacgtgttagccaggatggtcttgatctcctgacctcgtgatcctcccgcctcggcctcccaaagtgtggggattacagtcgtgagccactgcgcccagccagatagacataattttaaacttggagactagtattttacttggtgtcctctgttctctttctctgtctctctgtcacacacacacatcttgacaccatgtgaaagactagacttgattgtgaaggcaccgcatttcatctgatctctgctggtgtcctggatccactttcaaaggaaagtccttggtaatggcttggtgcctctgtcttatactctgctaaagctgatgctttgtttctgttgcttaacaactgttcagattagtagtctcattactgagaggcacaaaattgagtctctaagttaatttagacttcagacttcaggcagaaaagcctagtttgtcaaagtttttttcgttctatccttttgccatttaactccagtctgctttcatgtctatcttataaaacgttgttgaaagtggcaaagagtgtcttacagataccaatttcatgatttttcctccttactctaaagctgtggttgacaggagatattctttttttctgtatatataaataattaaattggtgtattaaggttctctagagggataggactaataggatagctgtatatgtgaaagggactttattaaggagtattgactcacacaatcacaaggtgaaatcccacaataggctgtctgcaagctaaggagcaaggaagccagtctgactccaaaaacctcaaaagtagggaagctgacagtgcagtcttagtctgtggctgaaggtctgagagtccctggcaaaccactggtgtaggtccaagagtccaaaagctgaagaacaagaacttggagaccgatgttcgagggcaggaagcattcagcacagaagaaaaatggaggccaaaagactctgctaatctagtccttctgcgttcctctgcctgcttttatcctctccatgctggcagctgactcagattagggtgtgtctgcctccagtccaccaactcaaatgttaatctttcaacaccctcgcagacacatccaggaacaataacttgcatccttcaatccaatcaagtcgacactcattattaaccctcacaattggtaaacaatttgtctgtaatatttgagttcttgccacccatatcctcattgctttttctaagccactgtccattttaagttctattattaaagtacttctggtccaaaaaggcagctaggacttcagttttcatattcatactctaggctaaaagtacttcttacacttcttgtcaaaaagtgatagtattcattgagcccttgagaggctgtagaacagtctagttctattttgtttcctgtctttgcagaacatggttgttcttcagaagccacaccataacagtttaaaggtagaatccatgtcaagactgatattcatatattgcatttaaaaattgtgtttttcatagttttcttattgacttgtgggagatctttatatattttatatattaatcttttattgaatattttggatatatttttcccaatatgttacctttggatgatccttatttactcttttttttttttttttaaatggaagctttaaatttttgtgtactcaaatttgctaatctttgtaaatgaattctgggctttcctttgcatacaggaagatattcctgtatctgtaattacttttgaaatatcttccactacattgtttgatgtttgtattttatttattgttactagattttattttttagagcagttttatgttcacagcaaaattgagtaaataaaaagtacagaaattcccacatatgcccttcttccacaaatgaacaaccgcccctatcttgcgtcagagtggtacatttattataatagattaacctatattgatacatcattattctccaaaatccataatttaaattagggttctctcttggtattgcatattctgtgactttcaacaaatatataatgacatttatctaccattgtggtactatacagaatagtttcactgccctaaaatgtatctgtgctctgcctatttatccttccatctcccttaatccctggtaatcactgatctttttacttcctccataggtttgccatagaaggtcatatatggaatcaaatagtatgcagcctttacagattggcttctttaatttagtaatatgcatttaagttttctctatgtcttttcatgtcttggtagctcatttcttcttagcagtgaatagcattccattgcctggatataccacaatttatttatgcatttacctattgagagacatcttgattgcttccaagttttggcaattgcgaataaagctgccataaacaaccatgtacagatttttgtttggacataagttattaactcctatgggtaataatagggtgaatgaatgctggatcatatggtgagagtatatttagttttgtaagaagccacaacacagtctttcaaagtggctgtaccacctaacattcttatcagcagtgaaggagagttcttgttgctctatagccccatcagcattttatgtagtcactgttctggattctaatagagatgtagtagtatctcattgttgttttgatttgcagtttcctaatgacatgtgatgttgaacatcttttcatatgcttatttactatctgtatatcttgtttgatgaggtgtctgttaaggcattttgcccatttttttaagtcaggtgttcatttttctcttgttgagttgtaagtgttttttgtatattatggataacagttcttcattagatgcatgttttgcaaatatattctattagtttgtggcttatcttcctattctcttgacattgtcatttgcagaacaggcttttaagtttaatggactccagcttatcaattacatctttcctggatcatgactttggtgttgccttccattactttttaaaattattgtgttcttttgtcttattgtttacattttatctagattcaaaatacatccaatttatgatcatttatcactaactccattgattccaaattattacaggcatggtcatcttactttgtttatttgagtacctttccagttgacctgcttctacccttctccagagtagttagattgtgaaaaccacagacatcacaactgttcatagtttggttaaaaccctccaatgagcttctcaccttaacctgaaagatcctgcatgttctcctcttcctcctttctctgctcctatttctttttcttatgctctctctttcccggctcctggcctccttgttctgtgaataccctaaacattctcatttcagagctttgacatacgctgtttcttctgcctagaatgttcttccataggaatatgcaatttgccccttctgtctttcagatcacctcctaagacaggccttttgtgattttcccatctaaaggagtatcttttgcaattagtattttacagaaatagttatcacaacatagtatatatgtgtttgttgtctatctcatcaatatataatataaactcaatggacctgatggaaatagagttgattgctttaaaaacaacaacaacaacagggtcttatgctgttgtcaagctggagtgctggagtgcaatcatattataactcactgcagcttgatctcctgttaaatgctatattcccaatccttttaatgacttagggaatatctagcaggtgtggacactcctcagcgataagtatctcaaaataattccaaaggatattaacctggggtgggggtagaagcttgcagagtcagatttgctagatgaatcattgttgaggattagtgttacatttgatgctagaaaaataattgctgagtgtcaggtccaaatggcatggtaaactggtgagtggtgctacagttcgatgccaacgttcttgataaatatttgatttgtgaaatacagagggataggatgcatgaacaagcttcagatttcagaactaaagtttgcatggtatatacagtctgtttgccttgtgagtaggcctaaagtcttcctggcactatattaagaaatttggccgaattttttctgtgagtggataagaagattcaaagttgcatctgagatttatctcttcttgacaacaagcaacctttgtaatgggttcagtcatagctaaattcagttgctagagaattacattgtatttattatttagcttttaaaccatgtggcttggacatttgctagtttctaaaactttttcaaaatatgttttaacagtgattttaaaacaactaagctatatatatatatatatacataaataaaatataatatatattttataaaatatattgagacgaagtctcgctgtgttgcccagattggagtgcagtggcagaatctcgactcactgcaacctccgcctcccaggctcaagcgattctcctgcctcagcctccagagtagctggaattacaggcacataccactgcacccagctaatttctgtatttttagaagagatggggttttactatgttgcccaggctggtcttgaactcctgacctcaggtgatccacccaccttggtctcccaaagtgctgggattacaggagtaagccaccgtgctaggccagcaaaaatattttttagcccaaaataaaaccataggttctttatagtagcataatctattaaaattttgtgtaaattttgacttctttcagatgattactttgacctctgttgatgtttgtattttatttattgttactagatatattgttactttgatataatgccttttgatataatttgtctcagtaaatatttaatttttatctggtgtactagataaggagaaaaaattatatcttttttaaacaaaatgcatttactgtttttctaaaatattctagttttgttttttcttaagggggtcaactttattgcttaaagatgtattttattcaaacaaattgttgtaaactgtagatattataaataaattggtagttacaagcaaattggtcatagaggaaaaggactacaaaattcaagttagtgaaacacaggactgtctagccacacaatgtgactgaagatgttctatttataaactagaaacctggagatgccaaagtagaaattaatgtaagcttaaacatcagctcagtgacattgcatacaatgccttctttccatttttttatgttctaaggccatatttttaaaaatatgtaaattgttcttgtgtgaaacctatttcatatttcatttctccatttctgacttgcaggatttgattgctgatgccttaaaatcagaatagaagcattttgaaatactttcaagatatagttagtaattgaagatagtcagtttaaatgtgggcagtagttaacatgttcccagaattaagatgcttcttaaaaactgatccctgtttagggccacgatcaaatacagaactgattaagcaatcaaacttcactctagtttcagagcaaactgtgagccattctgccattcattcttttttgtattacccctcgttattgtctctttagattctttctttctgttccgaatgatttcctgccttatggccaactaaggaacatagtggaagggtaaaaaattaattaaagttctaatggtgcaattagtagtaagtatgaactgttaaagcatttcctcagatgttttatagcttgtgagaaatcatcttcacctcagccgttgaatactgaccacctgttatctattaccataacattatacaaaccgactgacaggaagcaatctggtctccagtgattggattactgaagcaattgacaggcagtttccacaaaggtaaactgtgaaagctaaatgagatggtaaatagaaattcaggcaggtgtttaatggagaaatactactaaaacaatccagaagctgtaaaatgaatacattgtttatgcatattttcatggtattcattttgtttcaatgtttgaagacagtaagtttaaaaccaatattatatgttgtacatttgtaattacctatatgagtttgtaacttgaatcaaacatattgcacttggtacaaaaagtttgttgtgcaataattttttggtgctaaaccagtcttagttcaaaatgtaaaagtgggtagtgatgctttacaccaaattgatgcttttccttaaatttgatgaagtaaataaattgaatgagaaaataagttagcttacaagaaaaagcatgaattagcagatttcattgaattaaggctgtttgttgctataatgtcctacatgatttcttccgggtgctgaataaaactgaatagctaatatgacttcttcaattattgatttgttgctcatctgttctccaggaaagtcagatgaagatcagcatgacagtatttataggctgcatctcatctgcgggatgtaatccatcttcgttaagttcagtaaaagtgatagatggtgtttggcagtgtaatgatgtgatcactctaccagtacctctttaaatcataagctgttgctttctgttgtgtagatatttaatcagttatacaccccattactgatttaattcagaatgtcagtagcaggtgaataatgtgagtatttgtatattaatatcatattgtattaatgctccctacatttaagtgggttattcatttgaaaatcataaactgttgcttcatgggtagaataaatttaatcaagatggtaggcatctaacacctttagtgtttcatttcagtgtgtcaattaaaaaaaatgttgtttccttatatctctgtctgtgcttcctttactctatagattgtttgacaatatcagtattttcttcttttcttttttttttttttttgagacagagtctcgctctgtcacccaggctggagtgtagtggtgctatctcagctcaccgcaacctctgctcctgagttcatgccatgctcctgcctcagcctccagagtacctgggactacaggcgcccaccaccacacccggctaatttttttttttgtatttttagtagagatggggtttcaccgtgttagccaggatggtctcgaactcctgacctcatgatccacctgcctcggcctcccaaagtgctgggattccagatgtgagccaccacacctggcccaatatcagtattttctatgagtaataaagttaaaaaaactgttactttatacctcatatatgcactttaattttaaaattgcaatagatgagtggaactttgagaaaataacattaacaaattttaatatagaaagaaaacccagcaactgtttaatatatatgctattaaaacaatcctgggggttcaaaagaattcttattttttatgttaacttcatgttaattttagagttcaggataattgttatatctgcaaaagaaaactggtttacaatatcataacctgattttaagggataaggaaatttaatacttgtttccatttcatgtttcttctctcaaatatattattcataacttataacatgtaaatatttataatttaagatattcttcttattttgaaagaatttatggtaccactatcttttgaagatctttacacttactttacagaacatcatattgattctaacacataggaacttaaatacatatccacagaaaaacttaagcatatttttcaatgaagtttaatgatttcacataattaattaaaggttatgttttaaaaatgtataggtagattaatgcatactttccaaaaacattactttgttcttgacatttaggcgaagaggataaatgtaacatttcctaaaacatatatacagaccttctgggagttttctctaggaagtatatagtacaattctctgtatgcagtagttgtgcatgaatgacactgactgacagactaagcaaatttcaacttaatctcattgaactttacagcctccattccatgttcatctctcttaaccaactcgataactgtcatttttgatgtcaccacattcagattgacttggagtggacaatggccttgcactgttattgtgacaggctaacttttctgtctttattaaaattcataattttctcagaagacctcaccaatattttgaataaaatgttgattcctaagtcttaaaaaaatataatttacttcaatgtctcagaatttaagaatccagtggaagaaagaggaaaagacaaaaagacaaaagagaaagaaaaatatgtattctgattgcattaaactttgacaggttttaaatttatagaaaaaatatgatgtttaaaaatatctatattgaaggcatacaatagttatttaattaatgtatgaatctatcatatttgtttgacacttttttggtcataagtatctttctcatttttacttatatgaaatatttaaatatcttcttcattttctgtgtgaagcttctgtaaagtgatagaaagatggaatgttattttgttataatgtattgtacacctctgcattgccataataataccaacatttatttccatagtgcttctttccaacaaatcataaactttacatataaatgatctcatttatcttgataacacacctagagcagttaaggaactgctggttattaatgccattttataaatgagaaacaaggttatacggggactcccacttggtcactcagtcaggcaatagcactgattggattaaaaattagttttcagtttattcacaagacattgacagccctgagtttcatctggttttgagtgccacagtctttcacccattttattccattatccatcttggccatttctgtgattaatttccatctagcaaaatgttttaaaaaagtatatacatatacatacacacacatatctttatagatatgtgtgttacaaaaaccaaaacataagaacaaaaagctgttcatattcaggacagaaaaacttaggaaatacaagcagtttattttctaaacaaatttgtaagtttatttccttgttgatgagcttgaggtcaagagtgtcagggaatgataggggactggaaagggggcagaaaatagcacctggtcccctgaaagaggacagaaacagcagtcatctccttttgagtcagagttgtgtgtgtgtgtgtgtgtgtgtgtgtgtgtgtgtgtgtgtagatagatatacataccatcagattctaaatcattatcaataaatgtttgtcacgttacgaaaacaatccattctgcaattgtaaaaatattcagattttggatatgtgaattgaggagagaggtatgggaagtgcaggaattagaggtcccattttacgaacaaaaaataattatttccccacccacattattataccttcttcgattttcatttgggtaagatcttccagctccgtcttgcccccaactctgactcaaagggatatgactatttctgtcctgaatgaggggaccaggtgttattttctgccaccttcccagacccctgtcattccctgacactcttgacctcaatctcatcagctaggaaataaacttacaaacttgtttagaaaataaactgcttgtatgtcctaagttcttctgtcctgaatatgaacagatttttgttcttatgttttagtttgtgtcttttgtttttctaacttgttctggcatggcatgaagagatattattttctttctctttcagaaggcatatctttgtttctaacttattttctcaaatgtatgcctaaaggattattgaatttttcaattctatccattttctatcacacaattctttctaatctcactcaagaaccttggagtttttcatatatgttgcatttttcatgtataaaaatccattaaaaattggtttttacatcttgtgccatctgttttctttgggagatttgatatttgtgactctttcctattattactttattttagccctagatatttctatagagccctcatttctataaaaccttcttttattatttttattttttctctgtcttaatttattttcttattttttaagcaaagtgtgtttccttctttaatctcttttactctaggaatatatgcatgcaatcaatacacttttgactgtaaatcttttaacatctgttttttcaattattataaccgaatagtaaattttaacaaagttgggaaataaatgtttaaaattagtgtatgatgtcagaatgaaaattcaaataaacaagaaatgtttcttttaacactgaaagtgttttaaaaaggttaaaagacagcaatcagaacttagttcacaggatttcctaagcttccagggtaattttattctactccattcaattttttctcaaaagaatagaaagaaagttctcaacagtttttaaaattttcctaattaagtaggattttggaggaccagatggttagttcaaggaaacaacacaaagctgttaaatgtagatttctcaaaatagaacttactttttatatttttatgaatgataactataattattttcttggaattataaatgttatctactcattttatctgaatagaaagtcctttatctctttttaaactgtttgataaggcagagtactgctgatatatctaaacatttatccttatctgaaattttattttcccttatataacttgaagtgcaaagacaaacttgaagtcaagaaagacaaaagatcagaaagaaatatccctagcatcaaattaatttcttaccacttttgctattaaaaatagtctctgagaaagaaatactgcactgactagatcacattgacacactgatttttatttccataatagatctattttataactagatttgttgataattacccttttactaacttagcaaaacgcagttgagtttctgttttgcaggtatcaccttttccataaaatgcagttacagttatctgtgtgatatttagagtaacacacatcttaagatgcttacattctgtttttgtgttctggtagttttgagataagagggagacagtatttgtgcagttagacaaaaagaaaaagaaaagagcaatcaagtaaatgtgtgcatcctaagattaaatagcataaactcttaaaatagtactgagcacttagtaagtgctcaataaatactattgactagatattatgtaagttttgtgacacccgagtccccacatcattaacctgtgaagtaaattggaattagcacatgtgaagcccaaatacacactataaattttaactatgattgttatttaaataaggttgagaaagttagtattgctgcttctttttgttttcactgagtagtttaataggacaaatggcattcaagatttgtagtcattgaataatgaaagaaatcagctagggcatgaactgatagtgtaaacaaaggataaaagaattgatttttttccataaactattaaagataaacttttgattcctaaaaagtttaatatcacttggtaaataattttctgtcagcatatttaaaaaatgatagttaataaatattaataaacaatttatacctgaatcattcataaatgaagcatcttttaaaaatcagcatatatattttggagccacattaaattattctttaaggcttgtaataataaatccttaggctttagtatgtgcagtaccaaatggactcctggaatgactttatcatttagaaactgactttttttcactccagctttggagtaaaaaaaaaaaaaaagactgagtcactttaaaaatatattttattccaaaattaatttttgaaatccaaatttaattcaggcaaacaactatagattgaataaggagacgatttaaattgagaatgttgggacatgagagttctttatgataacatttaaaattagatatataagtgattgtcttaagttctatttcagtaacacattctttagtaattctgtcctaaagcattgtttcatattgttttcctccaaaatagtttatgttttaagtaggccaatgtacctgaatatgagtacatattactgactgctaataactacagggaaaaaatagctccaaggaaatggtactattaatagctccatcattttaaataacttttttttttagtaactttatgggtaaaaattaagcttaaagttcagataaccaccttcatctgcttagcctttgttggattgctccaaacttaattttaaaattatttttgagtattagggaattcaacaaacgtaagatacactcactacctataatgagtaggttctggagatacagaactgactaagaatatgtagagactattttctgtattctaacaggtcaaagtcagcaagataagtatagaatctttaaggaatttacagatagttggggaaatactaagtatgaagatagcagtttgggcaaaatattattgtatatggacaagtgtaaagaggtgaggaaggcatgttgagaaggtatttatctgagggcatttgttcaaagcaaatggaatttcagggattggaggagttgacaaacagcattgtgatacgtatttcactctaatagctaagagaaacactccatgcaaacaatgtatctgtggcctctctcccccaaccacaaatttatcaaagctagctagatgaaagaacatgctccaaatctttaagcataaccaagtcatgttgggctttgtaattgcccgacaggttcttcttgcccactgcacagatagagccgattcactgagatagcggtattgcagtagagaaagagtttaataattgcagggttatccaagtggtcagacagaagttattattactcaaacagcctccctggaaattaggaggttagggtttattgaagatagtttggcagtcaggggactagggaatggggaatgatgattgttgggtcagggatgaaaccatagagggttgaagctgtctttttacactgagtcagtttctgggtgagattgcaagactagttgtttcttggtatgggttaccagtccaggtggcaccagctggtccatcagaatgcaaggtttgaaaaatacctcaaataacaatcttaggttttgcagtagtgatgttatctctaggagcatttggggaggcctctgttacataactctgttacataaatcttgtggcctctgttacataactcctgagccccaagcaaggaaggagttagtttcaggaaggggctgttatcttcattttaaggttaaactacaaactaaattcttcccatagatagcttggcctatgcccaggaatgaacaatggcagcttggaggttacaagcaagatggagtcagctaggttggatttctctcactgtcataatatttgcaaaggcagttttattttccatgtacagctttaagctctttcctggattttccttgaagccacatccctaggaagtcaacaagcttaaataagaagtcaatgttatatgggagattctattgagaggtagtggaggagagtttcattaaacaccactcaataaatgctcaattacatcgtaatatttgtctcctcaaatttttctctccagccatcagcttataactttttcttctcttctgccacataacattaaaaagtcaactttatttttctgaacgactcagctccaattttctgctcttattctcaacagacaaaaaatatttgtttagaatagatattcaatctatttttccctgaatattctttttaggaaatatcttcaactcttcctttaagtgacttgattattcaaccataataaacaggtttcctttgaggggtgaatagtactcctaggaagaaaaaaaatttactcagtaaagttaataaacaatcttaaaccttaaatctctgaaatcatattctaaagatggaattaaagagaaggatatagcattaggatatagaaggatatagaattaggaataaaaatttggatagatttgatcaataatatgccattgcaataggggtaaggtgcagcataaactaaagtcaactttgatttgtacagaggtgactgagtgatttaaaaggagaatgaggaagtaggggcctgaacaagagagctctctgaagtctggaaagtaaaaaaatataaataatttgtcagggtaaaggcaattaggccagctgtgtctactagctttcaataatcgaagttagaatactattctcccacagaaactgggagacagaggtcctatcttttctgatgattgtgtttctaatggatggctttcaggtccttaagaaaggctttcctgagttgtaggagatacatacacatctcaaggggacaaaggaaaaattcataattgtaaagccttttgaataaatactataaaaaacatgttcagtggactattatcaagtattggctagaaaaacagtaaattactttatcattcttgacttttctggggcaggcacattaaaggggactagggtcatcatatggatgtggctttgtgctgttagaaattatgttagtgcttaagtcttttaatgtgggcagagaagagtggattaagtcctttgtctgagagtctttaatttttaaacgacaaggctgaggcctagttgagaagtaggctccaaggaaaccggctagagttgggtcaagaagataatcattgtcaggggtcatcatgaagattcttatagttggagtcacaaacaatcctacattcactaaaagccttggagtgcactcaccatgggaagtaggaggagatatatatatatttatatgtatataattatatatatatttatatgtatataattatttatatttatatgtatataattatatatatttatatttatataattatttatatttatatgtatataattatatatatttatataattatatataattttatatatataaaatatcaccttgtatataattatatataacataattatataaatataattgtaatatatatatatttatataatgccagggatttagtgccacatcactacaatgaccttagacccctttaatgtgcctgcctaagataactcaaagatgacaaaataatttactgtttttctagccaatacctgacaatagtctgctgactacatatggagagagacagagggaaagagagaaacaaaaacatatgtaatcatgaaaggtaagaaaaagagaattataggaagaaaagaaaaaaaaagagataacttgctgggtggcaaataaatccccaagtcaagactgaagtgtgtcagaaagagcaaaatgccaagcaaaagtggtgctagatgaacttagtccatgcttctgctccttcctccggtaatcttccacttcctaaaaaaagtataataagaaaattcaagaatgccccaatatcaagagaattatgatgtatagaaaggcataagagttgacactaatagtaagacagtattaaaattgttgactttgttgttcattgtttggtaggccagctatcatagtctgagcatggtaattaattgtgtgattaaagacggatcaagcgctcaatcactgagtttcaaacaaagattaaattccaccataatgaaaatgctgacaaataaaaaggtaggagatgagagaggatgcataccaagcttaaacgcaaaggaggtatcggtgacgtgtgacttgttgagtaaagaaattcatagcagttgatacacactgaggataaataagtacaagttctgataaatcaaatttaagtcattaagaatgatggggatgaagatgaaggaaggaaacggagattttaaaatttgttcagaggtaaatgtagaaattaatgctagtaagaaatacaaatcaaaaaataaatttaagaaactcaaatgattaccattagagagtaagaaaatttggttagaatgcctgtgtgattgaagtaaaagtggtgatatgaacatatttaaaaataacatacactttcctgaattattacacctcataaaatatctgccacctaatatttcacttgattaatgtcaatggaaaaatgactttttcttctagtatagactaggattcttctttttgtatgtctctttttacagggctgggcacatagtaggtacttaagaaacaatcatccttattgcttgtaaattagaatcttttcagggaatttaagtttttattttgtcttaaacatcaactaagtgtgtttacatttataccctttccactccatttaaacattttaaggtcaattttatttatagtacatttcaataagaaatctttcataaggtgagcatttatttttcctattgataattttagttggtgagccaaatggtctttccatacattttgggattgtagtattgtgtacacatgcaatatatagtattttcatgtaacaggtaacttattacataacatttattatgtgtatgtaatttggactatatcaaatggtttttaaaatatgagagagtaaataagctttatttacataaaattcttaacaccttttcatattgagttcaatgtcaaagcacactgcttatttactggaaattaaatgtttctattcatctcttatgtttctttgaattttctgtacttattccttttctttgcaaaacttgatgataaacaaccaaactctttctacgatccctaccatctggaatagcctttttctgttttcttacttcattaacttttacctttttaaaaaaatcacttttagtcttttatttactttcttccctctgtttctctatccttctgtctttcacattataccatcaaaatttgatattttctaacattttaattttcgagtagtctcaccacttctccacctaaaagatcagaaaatattcacattgccatcctacaagttatactaaaatttaaagacagtgtaagtggttcaaatgactgagcttattacaaggcataaggaacaaataaactggagcacaacttcttataataaaaacagaattatatttataaatctagattgtagtctcttacagttcagaaactcactcacataattcctattatttctagtattctacctgtagaaaaatggggatgataatttatccaacagagcttcaacattgttaagcataattggctgtagctttgtgtagagcaatgtaataataataacaacaatgctgacatatattgaacccttattttgtgctaggcactgttctaaatacttcacaaatgttaactcacataataatcacaaatgtcttatgaatttgttaccattactatctctgtatttcagacaagggaacgaaaatacagaaagtctaggctgggcactgtgtctcacgcctgtaatcccggcacattgggaggccgaggcgggcggagagcgagaccatcctggctaacactgcgaaatcccgtctccactaaaaatacaaaaaattagccggccatggtggcgggcacctgtagtcccagctactcaggaggctgaggcaggagaatggcgtgcaccccggaggtggagcttgcagtgagccaagatcgcaccactgcactccagcctgggcgacagagcgagattccgtctcaaaaaaataaaatatttttaaaaaatacagaaagcctaaatgaatttttccaggatcatatagctagtaaagtggtagggcggggattcaaagctattagctgaaaccagagtttgtgctctcattcttctatatacctctctgatatattaggtcttgggcatttaagaattaaagcataaatatgcagaccctgcattcagtggattcagaaatacatattgatttattccacaagtgattttgattgctcaatggattcagaaatacatattgatttattccacaagtaattttgattgcttgctctgtacctggaactttgctcagtttgaggggaacaactaagaaaaagacagtcacgttccctgtcctcattccagtagggtgagacaggcaaaaacaacacaaacaacacataaaattttagtacattgtgaaggatattaaaaaagggacagaggaaatgaagtaggtgaagaggatggacaaaggaacgtcagacccggggaagaaaaaggcagagaatattacatgtgtcaagaaaaaaaaaaacaaacctgagtttttatagatggaagccctgaaaagaacaccctgtggccagggcataataaaaaaggagggacactaacccgagataaggtggaagaagcaggcagggagtaaaccacattttattctaaatgtgatgggacatcattgaaggattttaagcaggacaaagatatgatacatgcttttttattacctagagttgctggatggagaatgaattgacaagaatgacatttgggaaggctagttagggacagaagcttagacaagaggtaacggcagtgatcagtgtggaaagggaaaacaaaatggaaacactcaacatacgtttttggcataaaattaaaagcatttactgatgattatatgcaaaaagcaagaaaaagagaagattgaaagacgattgcttaggcttccagtctgagtaactggataaatactactataattcacagatcattaggagaactaatttatatggataattaagattggggtgaaacactttttctatttacatattttatactgagatattgagatacccaaagatatattaattcatggttggacgtacgtatggaatttagattagaaatatggactagaaatgaaaacatgtaaatgatatttaatgccatgggaatagaagtttcacataagagagagaggggaaaaggaagagaggaggaccctaaaggaaaccttaaataatacttaatttagaggttgggttctggttcatagctttcagctgaagatttatttcactttctcactaaggaaaggatggatcccaagtcattttctaattatatttctcaaggagtggctgtacatatagggtctcacagcctctccttggatggcgaattacagcatacctgagggtttcaggcaccgcggagttcatgctctgctctagcagctccggacatgccaatgttagtttaatcttcagaaagtcggtgcttatctccggtgactacagaaggactgacacaatgatatcacatatatgttcaatcttttcatggcttgtattactttccttccagtagtagtgacatgaaatagaggcaattcttgagacatgtctgagtctatataattttcagctgagtctgaaatcctggctgaaactttgatgttgaatatttttaaagccggcaaaagaaatccacactgggtcaaacaaacaaacaaacaaacaaagaaacaaatcactgtcactttaaaacttcaagctgttttaatctgcttcaatactctttcagggcaaattgttttgttgttgttgttgttgttttgggaaaaccaaataaataggcctgttttgctatgcagtgtaaagcaaagactctcttacaacatggaaatatttgagatgctctggttcaggaaattaaaactgcttgggggatgacaataaaagcttgcctttgttaaaaatagagttgcatctctgcaaacatgtttgatttgggaaaatcatgtgttttactaagtgcaataataaggacaaaagaaagagtaagataatattgttccccatttaagccctttgaaagggttggatctcttcttgttagaggggtgagaacctaaacttaacagatccacgatcacgaaaagtagcattattacaatgccttggctacaagaagatctaaattcaggtgatcaacagttgcacagttttttaggtgttctcattcactggaaccagcaggattagcagccacttggactggcatcctctttccattatatattctcactggttatttttgtatatatacaactattgattttaatttacttatttattgcctgccagcttacccaactcagtagttttttagcagattctcttatgtttttctatgcgttcactaacacaaaataatgaaaatttttatttctagtttaattgcttcttgttttaattttcagattacagtgtagatttttaatttgtttaatttttagtaaattagactggtggaaaaaattattattttattttagataataattttattttattaatgtatttactgatgtggggagaaacaaaaatgactctgagcttttaaatcatattagtggtagtctaattcacagtaagcaatccatattaaaatctattgcatcccattcatcgattgaatggttagaaaaaggaaaattatccatgttaatcatttgtgaagcattctaataaggtagtctcaagggaaattgccaggtatttaaattttctataaaatttctactggataacaattaaaccatatctacatattcacatactttaaaataattttctataattgtgtcctgtatgtatatgtatacatatatatatacacacacacgtctatgtgtgtgtgtgtgtgtgtgtgtgtgtaaagagagggggtcgagtttagcatatatgtgtgcttcagtttttatattgttgaataattccaagcgtggatgtactaaattttattcatccacttatcagctgattgacatctgggctgtttcttcttttggttattacaaataaagctgctatgaacatttgttgaacatttgtgtatgtgtggaggtacgttttcgtttctcttgggtatatatttactagtagaaaagctgggtcacttggtaactctatgtttaacattttgtaaaactgacagactgttttacaaagaggctgctccattttacatttccaccatcaatatatattggttcaaatctttccacatctttgtgaaaacttcttactgttgcagtcgtcataatgaatatcaagtgtgattatgatttgcagtactttgatgtctaatagtgttgagcattttttatgtgttcatcagtcatttgtgtatcttctttggagaaatatttattcaaattatttgcccattatttaattggattagttgttgttttattgttgagtgtataaagcattcattatttattcaagatacaagtccattatcacataagtgatttgcaaatattgtctcccattctgtcagttgactttttgtcttttgaagcatacaagtttttcattttgatgagatctaacatctgtttttcttttttcatttgtattttttgtgtcatgtttaagaaggctttgcttaacccaaagttatgaagatttcttcctattttttatcctaagagtttcatcatctaccatctatgtttaggtttaaggtatatttttagttatatgtgtgggtgtatgagtgtgtgtgtgatatgaagaaggaatcaaatatcattcttttacatgtggctatacaattgttgggagtactatatatttgagataattttttttctcattggacttttctggtacatgtagctgtgtctattcttattcaaactctctttattactataaactttatactgaggttgaaatcaggaagtgtgagcccactaactttgtttttttcatttaagattcttttggcttttctgggtcccttgtatttccatatgcattttaaggtcagcttgtcaatttctgggaagaagccagctgggatttctatacattaaatctgtaggtctatttggatagaattgtcatcttcataatattaggccttccattccatgaacattgttatctttccattttttaaaatccttagcttctttcaatgatgtgctgtagtttgggtgcatatgttttaacatttaaaattattttgctaaacttatttctaagtattctatattttaaaattatattataaattaaattgtctttttaatgtcattttcagattgttcattgctcttatatagaatacaaatgattttttgtatgttgcttttgtaacctgcatcctgagtatacatttctattaaattatttaagattttgtatataccagtacttgccatctgcaaatagtgatagtgttacttctttctttccaatctggataccatttatttccttctctctctctgtctctctctctctctttaccccacccccaattacccttgctggaatctccagttttagtcaacattagttgaataaaggcaaaagtggacatgtttgctttggtcctggtctttgagggaaaacattcattttctcaccactaaatataatacgagcctcgggttttggtattccttttatcaagttgaggaagttctattgctagtttgttgaatatttttataatgaaaggttattgaattttgtcaaataagcccgtcattcaaccatgtcaaattgttgtcttattgcaatgagagagaccgtatactagaaaaactatggcgaatctcaaaaaaaggaagaaagaaaaaagggagggagggagggaggaaagaaacggaggcaggcaggcaggcagtaaggaagcagagagagaaagaaagaagagagagaaagaaagagaaataaaaagagaagcaagcaagcaagaaagaaaaagataaaataaagaaaaggaaagaaaagaaaaaagaaaaggaaaataaaagaaacagaacttttagaagatttttacagagggtagaatttagacacaatttcagtaagtagtgttttgttaggcttaaagtagagcacagttatgtgtactatttgtaaagagttcaacatcagatctggatagtgaattggacctgtatccttggaaacttcacagttaatatagatgtggaatattttgtgcaggaacttcttattttaggctctttgcctgggctgcaaattgagagtgcttctgtgtgtcaaaataactcagatcctccaaacaagatttggatgctttatactggtgatataatttcaatcaacaaactgatattctgtggctttggagaacaagccagtaagtaagaaggtagtacacaatcaaggaggacttcattatgatgctttatagttgtagcatgtccttgagataaatgttattttctgctaaatttgtgtgttagtctgttctcatgctgctaataaagacatacccgagactgggtaatttatagagaaaaggaagttcaacaactcacagttccacatgactggggaggcctcacgatcatggtggagagtgaaagaacagcaaaggcacatcttacatggtgacaggcaagagggtgtgtgcagtggaactgctctttataaaatcattagattttgtgagactttttcactatcacgggaacagcatggaaaaacctgccactgtgattcaattacccccgactgggtccctcctacaacacatggagattatgggagctacaattcaagatgagatttgggtgaggacccatccaaaccactttgcaactggatttacctgcgactgttttcctagccggatgaataccagtgtttaatggacgtgactccctatgaataatacccttcactgcctttcccatttggtaagctcttatcctgtctttaagacaatgtgcagaccagaaggggctattgctgttcttcagtggtgatgagatgaaagtatgttctctatgaactgaagtcctttggatagctgcaagagtagtggtttatttctctgccaagctattagaatcaatttccctatcatggctatggaaactagaatccaggaaatagggtacaaccacggttctgagttacttgcctggcttgtattttttgatgtgctgacctccccttatttcttctgcaaaaacatgtcaggacctgactcatgcttagccaatctcaattccctgctcaaaagtgggtaagagggaagaaaactctttttttttttttttcttggcaagtgcatgaggtaaggagacaggatttttactggtttgcattatatttcatatgcctattctacatccttgagttccaagaatttagccctgtattgatttactctgctcaatatttcaagtctggttgggtagataggcattttattttattttcaaactacataattgccttccagaatcagtaattcaaagtcctattctggctgttcaactgttttaggaatctcaatgttcaaacacagatgtgtgtgcacacacacacatatacatgccacatgccctctcactgtcgataaataatcacaaaattgagaaatatgtcttatctcaactaaaatatttcaataattttaattggctttttgttaattaaaatataattttataaggatctaaacatcatttttagaaagaagtacatgactaaaatattttaaaatgtagcaacagatcattattaactgtaatttctgtttatcatctattacaaaaataaagtaaaacagattatatgtggatattgagatgtattatgttctctagtaactctggaattatgttaaccatagaaaagaaacatctgtcacatctcaatggtgatacgaagtgttttcttcctgaattggcaagagaaagttacgaagaggaagatatgtcatggttactggaagagaagatgtagaatcaggatggattattctcatttgcttaaattttctcagagctatgccatttctcattctatttgtgaacgatgaaaggcgtgtaatgctatagatactactactagagttcattgcatttctgaaatgatttggaagtttaaaaaatacactggcaaaggtgatttattaattaatgatttaaacatccttaaccatgatcaacttttcttccactcactccaaataggagaactatgtgcatcacataaaattagcttaactgattttacagtgactgtgttttataatttttcttccgtcatctctaggctacattttcatactaatcaccctcattaataccttgtagactgctttgttgactgtgtgagaggagactatctatggtatattactagatatacaattctcctagagtcaaacaagttaagactaatgaatcattcctttggtttcaggttggtatagattgaggttaagtagtaaccattataaacccatatccaaatagtggtgctactaagaacataggcttttggaatcaggtgaatgggggagccaggcggtaaaaattttgtgttaatattatcagccctgtgactataagtttcagctttcttcttgggaaatggaaaattatgacacaaacttcacattttattttatgtataaaataaaatgatgtatgaaaagcagtttttatcatttctagcatgtggcaactaaaatgatagccattaattgcattattattggatatttcatgttgtatgtaaaaaaagaaataaaaaaatatgaaaaaaaacattgttcaaaaactttaattattgttttgccctcccacaaaatcctattgatccccccaaactaaatattaactcatcttaaacctggaaacagctcttttcagatacctatttttatagcagctggatagttcctattagggattctttgagagaaaagcaggggaaatgctctgtctgtaataatgttaatttcttggtatgactgaaaaaagtgtatacgttctttgttaaattaaacatgctcagaataataattctgagtaaagcaaataacatgtaggaaaagtgtaataatttgattatacttaaagatgcactcatagcatgtctgtgaaaaataaaacagctacttatgttaccctagagattgggaatacaattttaagaaataattacttttgtttttcaccttgtcacttttatgtattaggatctgtgtaccatcatttatctttgtctgacatttaaagcatgctttagctggcaattaatttctttttctcttgctttgtttttttttatctcattagttggatagaagcaaataaattgacacattaacctattaaaacattatctaccactgtttgatagttgcaagtaaggagttagattttggatttctcatactgttgtagttttcgatgtgtttgcttttcctggacatctccagatctatagtatcaagagaaaactcatgatgattgtatctaagtcgtattgctgacataaggttttccaaaacatctctaagttgttgcacgttggatatttttgaaaattgattaagatacaagaaagagagccaccattttccaaaatgaaaggcaattatttaattttattttatttgtgagaagattaagtctataatgacattttttgcaaaaattgctcccattatatatgtataataagctgtcaattgtaggtatcacaatgactgcatttttattttggagattttgtggagaaatggttgatgaaataacaggtatacatgtatgtcttaaatgctttttctgtccagaagtcatttttttgtaaataaaagtatatattttttctttttcttcccccactagatgtgggttctgtggaaggacttgcctatcacagagcctgggatacactgtactggacaagctctaccacctcatccatcaccagacacactgtggaccagactcggcctggagcatttgacagggaagctgtcatcaccatgtcagaagatgaccatccacatgtgctagccttggatgaatgtcaaaagtaagaaacagtgtagttttatttcttcattatagttataagtcaaaagaatatcagagttctgttaattttaagaattaactttaaaaataaagtttttatttgaagttttattttcacaattcataaaacttttttttttatgtaagagcattataaatgtgaaaaatctggtccctttaaaagccaggcttcatcttcctgagagatccagtaaaaacaaatttaaataattaaaggcaaactagagacaataccatgctggaaaaggcctatgaagaagactttaatacatagctgattggaaccatatatttaaaaaaattaacatacacggaagactaagagtgttttttttttttttgcattttaatcaagtaattatagcatctggagatctcccaaattgcaatacaaaagaaagcaaactgcaaccatacaaaaatctttgtgtgcagctatttttcagcactaggtgcttgataatagtctaagtagtctacagctgtttgatgatatattgtacagacacctaaaataatgcttgtaaaaatttcatgacaaaagaaaatgctccggatataaaatatactcagtgaataaaaacaaagaaaaaaattgtgttttggaggatgtcttaaagaaagcagttatgtaaaaaaaaaaaaaaaaaaaaaaaaaaccccgaagaacaaagcacaggtaaggaacaaaaaaatacctatctatggactttcactctcatatacaatatggtaaagttgtttgttaactataagaaaattctttttatttttaaatgaaatgagtaaacaaaaatcagaccaatctggccttcctgagcaaaactagaagagctagaagagttcgttttaggtgtgattaaaacaaaaaaaagattgaagaataaaaagcaatgacagataatcactgacccagaccacttgtcagaagaaaggactaaataacagaaattggtcagtgtgaaaatagttgtaaatctgaacccttttatagagctaaaagtgaggtcagatttaattcacttaattgaacatcatcttatatgtgaaaattcttaagactgagcaatgtaatgactcatggagcttgggagactgctcccaccactgtcctatgagaatacggtttgctgactcagctgcatttaccccaacacatcaccagaagaatctcaggacaataataaatgtcccacagtaggaataaaagagttgggcaaaggaatttgtaagtcagttttgaaataaaaataaagcagtcactcatgatattatatatgatgagttttaattagcaagtgttttatcctgtaattatttattacataggctaacatttacacttttcaccttgcatatggtgaactgtaaattaaaattaaacacataaaatatttcaatttgataattatttgtaaataaagtataataaaggcaatttatcatcatatatgtaaatgacaccttcaaaccaccattgtatgttaatagattaacagatattttaaaatgaaatcctaaatcgcaaatcaaagttaggttctctaagtttaaaatttggctcagttactaattatttgtgaaaactttaattacttaagctctctgggccgttctgttttcttacctgtgaaatgaaggggggaaatgaaaggaacactaacacctctaaaattctcttattataaagcctacaatctaggaaaatattgtaaataaattgtgagtttaatactttacattctatgcataacttttaaaatgttttaattcagtattttttattttaaatgtcacaacttataagtaaaattaccaacaatgaaaattgaatacaaacatttttgttgtgaatttgaaaattatttggtaataagtgtcataaaatactcaaaaccacatattgaataactttgttggctgtaatgctaaactgcctttaaatggttatacatgggaatccatagagaacagatactatgctgaaggatttaagagtcactcctagagttttagaaatgatattgtaatttatagaaaaatcacactgagagaaaaaaagaaatgtaaaaaacaggagtttagtaattttctttctccaaaacatatacaaaagagaaggcagaatttaaaaagtaaaattggaaggggaagaagatttttattttcatcaattgaagcaaataagtatacttaggataagaatgattgtactggatcagctgaaatgtggtaataagttagggtatatttgcagtttgtggaaaacaaacttaagatcactgttttgttcttgattaaaataaatcctcattatgcatctaacagtttaaccaaattatcatttgaaggaatacacaggataattattttttagaagtaggttctaggtttcatttaagaacctggggaaaattaacatgcatatataatatgcatatctccttttattacctagactttgttaaagatagaatatgaggtaaataattctgcttcttttaaaatagcttggtattgccatgtttctattagtatttttactcttgatgagaagtttaatttatagttacaattttcattttaattagtttaatgttttggaccaactggaatgaacaacatccaagtatcatgagatctactctgactgggaaaaatgctcaagtggtggtcagtacagacatactcactccaaatggacttactatcgactaccgtgcagagaagctgtatttctcagatggcagtctaggaaaaattgaaaggtgtgaatacgatggatcccagagacatgtaagttaatcaggaatttcttggttatagagttatacaatgatatatttaaaacatgtgatttatactctcctaaaatgtacatatcaaggaatttcaaaatagccagttgattgaaacaatccaattgaataactaatctatcacacacataagaaaattgtggatagtattttgaaaacttctttcaaatgcatttgctaccatagagacagctcaacacataaactttttctggagcaatagtaactaatttccttctagttattaatagaactggaattgttagagtgatttgcatatgcttcattgttatgtatagtttttaaaaatgtgaaataaaattgattagttgtcccaggataaaagaaaattagaaaagaatgaaatgatcctctgtgtttgtgtccttaaagcaacctaagaagctctgaagagaggagaatgggtcaaatctgttctaatcactggactctcttttctctgggttcaaaatgaaatgttagtggaagagttgctatgctatcccttgagagcacttacagcaggtatttagggcctgaagaatggtgagatgctagggcgcccccttgtcctgtgaggagtagctgccttggtgactgggaacctcagtggttagatctgggtggctacagcactagagaaatctggacccatgtccctaccactgtacaggcctgaaggacaaaatgatcctcaggctcctcatgcctccactgcactgaagaaggtctggaatgtaacacaatttttttcttaaagggccagatagtaaatatttgaagcctcatggaccatgtgatctctatcacaactacagtgtttcacggcactaacacagacatagagaatatataaatgaatagacctgacagtattcaaataaagttttatttacagaaacaggcaacaaatcagcaaattctatacatatagaacaaattctctatggctaagcacactgtttaattcagttgaagattgaattgaccttaggcaaattatttagcctttataaactttagatttctgacatgcaaattttctttcagggcaattatgaagatataatgcaaaagtatatgactcagaatgcagcatagaaattctaaataaacctagtatataatgcttttgaaaagacaggtaaaacattgtcctgaatgtggtgtcattttttattatgtcatgatattgaaaaaaatgagtttataactcattctcctcaattgatttttgtatatacctattttgcacttccccacccatttattcttatgtatggtaattatagctacagtaagtggtcgagtaataagatagcactaacataatttaaaggattttttctgacagttaaaagatgtgcattgtttaattgcaactcatcattttccatccctgtccaaggcaggatgatttctgattgggccccgaagttagaaaactatttcaaagtttactgcattcttacatgcatctagattacctcatctttatcctcatatgaattcaaattaatttttaaaagttaatatttttgttaataaaatgagcaatacattttaaaaattctttattttgcaaaagttaatttagggactatttatggactgttttaaagactttgtgcagatttattaagacttcagactgtatcaatttactaatcgccctactagctaaatcactgattgctaattgtgttctagatactgtgccaagcactttatatttcatgtttttatagccctccccgtggaaggcattattatgatgatccccatttgcagatgaagaaaatgaggcacaaagaagtttagtacttgttcgggaacacctagccacatacgtagcaggaaggtgattctacccctggtgatctcacttcagcgcctgtgcaaaccatcatgctaaatttgaaaacacttaaaaaggacccaactaagtgtacaaaacatgaccacttcctcatgccttgcaattagcaatacatttgttctctccttcttcctcacatatctttaatatgttacccataaacactttgcacagtaaatatttcaattcattactgaatatgaaactatgcctagtaaaatttgaagttctgctgatttacgtagtaaaccaagtagatttactcaacttgtcagcagacatcacattactttgatacacattttaagaacatcagtaaaatcgacagggaagaaaatgaacagcatccaactctaagtgacacattatcccctttaaaactgctctctaatagagacatagagcttctgcgtaatctttttgaaatactctttacatagttttcgccattatgtcaagacaagctaatcatttgaagctggggtcatcaaagctcttttaaaagagaaagatcactattgcaccctcacaccattgcaaggacctttattataactttgtgtctaaaactgtttaatagatattctgaagccttagacagatgttacagcaactctactatggcctgttatataagaattttctctttgcttttagtattcttttcactttcatgtttagatatacccattgcttagctgtgtgacaaatagtgcaatcagggaaggggaagactaaatgcttattattcatttcagaaattaatatttattaaattcatattctgtaattattagtaaagataattttacaaaataaatactagaatgaaagttggaagtttacttctttaaaaattatactttttatgcaatgttaaatttaatcctcacatttggtattgactaattgcatgaacattaccaagtcatttaaaatccttatgcttttttaaaaatgtaattttattttagattcagggagtacatgtgcatgttttgtttattacatggtataatgcatactagtgggaatcaaagctcttatactttataattaatttagttgtaaaaacaaatgacagctaaaatcaacataattgtgatgttctctaattttgtggaaattagcagaagtcattgttaattcaaaaaggtaaaataaacgttctttgtccccatatctagttgaggaagtaaaacatatgctcaaagataattaatgatatggaattaaatctgcgacattttaatgataattctcaatattttaattctcaatctttccttgttctgaaaagccaaaaattcatacacagggtgttcttttataaatgggacctttataaacagcactatcatttagtgtgcttgtacctagatttgccttgaaatccaactgttattgttagttcgccttgaaaagagcagataatctaacacatgccagtgttcacaggaaccagtgacttccacttactacatgaaatgaaagcattgtcaattgttgtaatccattcaagctgctataacaaaatattactcctatttttttctactccttattttattccctttgggcaaccatactaatatatatatatatatatatatatatatatatatatatatatatatatattcaatttatattttatttttaagtagatctgcaaaacaacaggataaattccatttttatattttggagtacactgtaaaaggcactgaagaaatgtgtgacaggtaaaaactatagatttagaaagaatgatatttaggaaatagaaagtatagttacgaagattgaaggattctataaaagacttaaaatagtcaccatgaaatataagaagagacgcaaaacatcgttcattctataatgtcaaaaaatgctgaagcaatacaataaaaaggagtgctggaaaagtgacagttacagaagggaacatttattttgcataattgcatattttctaactttgggtaaagcaagtgatagcagaaggcaatctcaagagtagggaaatcagatatccccaggggagtgaaaagattagaaagaagctagacatcataatctggaatattagatacagtgtatctttaatgagaaagaagtaacctatatttaagttaattgattttaaagtgttggagagattcttataaatttagaccttgtgtgccctcgaatgcagtatgatgaagtgggtcttccaaagcctgttggaaaagtgttccttcttttgaatatctttaggaattagaccatagtcaagtaaattttcaaaactatgttttaaacaaagtctgataggcttagtcattgcattacatcttaaagcttttaatatgctcgtgaacattatgaatattctgaatggaaaacagcatgtagctttgttctgatcagaaaacagatgatttttgcttgtttgttttaatttttttaacatgggccaggcgcggtggctcatgcctgttatcccagagctttgggaggctgaggcaagtggatcacccgaggtcgggagttcgagaccagcctgaccaagatggtgaaaccccatttctactaaaaatacaaaaaattagccgggcatggtggcacgtcccagctactcgggaggctgaggcaggagaatcgcttgaacccaggaggtggaggttgcagtaagccgacatcatgtcactgcactccagcctggcaatggaatgagactttgtctcaaaaaaaaaaaattaacatgatgtgtcatgggcatgtgtttgtagagatttgaaaaatgctgatacactatttacaactcacacttacaactcatatttatcatataaatattatataacccattgcttatcagtagaccagagaaacagatcctttcaaacagcaaaaataaatcaaaaaagggttttttaaatacatttttattttttgatttttttaatctgaagtttaataaacccattagtttttttctatcaaactgaatgtcgagttttattattctgttttatcttagaatgtggtcacaataaaatacaagtccgcacagttcaattttgacttgcattgataaaaataatatgattggctgggtttttctgattttaataacacattaacttatgtggtggttctacctaaatatcgaggaatgcattctttattcagtgataggaaactgaatgtttttgggaaatttagttattaaggcaaaaaaatccagaaaataattctgtaatgtttctttttaattttttctgttttgtatctatcatcatctctgttcgttccagtagctgaaacaataaatcatgttgacaggggctaagacagcatgattataacctatctccctgcagttaccctgtaagtgttaatcatttcttggaaagtatgtgctacctgcatgatacaaacctttccaaaagagatatttatgttcctagaaattggaattgctcatgtttcttaccactgacattcttttaaaaactgaatccaagattgtttaaggaatatattcccaggaagaaatcttaaatcttatgacttttctttagaatgaaaaggatttttatgactaacttgacccctaaataaacatgctctgattacatgaactcttttaagtaagaataggagagcaagttaaataaataaactagttttaattctaagaacaatcagaaagtaatgagatattttatctttttatggcactaaatatttcctttctactttgtgtgtatgtgtgtgtgtgtgtgtgtgtgtgtgtgtgtgtcaggatctcactttgtcatccaggctggagttcagtgttgtgatcaaggctcactgtagccctctaaccctgggctcaaatgatcctcccactttggcctcctaagtagttgggactacaagcctgaaccaccatacttggctaattttttactttgagtagtgatgggggtctctctatctttctacttttaaaatcagttgttttattccataaataaatcaaggcatcaacttatcatctatatgcatctatatatttacctatcttctatctttcttatctatatatctacgctgtcttcttttattgataatatagttttaatgacgttcaagggcctgaactctgaaacttacagaataagttttgatgcccagaaaagtgaattttctcacaacataggtttgaaatgcttacccaagtcaaaaccatttgctatcaccaaagacaagaaagaagatgagtgtcaacttctaaaaaaaaaaaggaaatatttgatttaaaaattaaagtataagtataagcatccatttcaatgaactgaaaacctttccaccattaactggaataaaccagtattatttcacagattaggaaacaggcccagaaaaggtaaattaatttctaatgttactatgtctaatatttaatgccaattatggttcttaactctctattagagccagtgatctttatttttaatttaaaaacttaatatccttatttctgttctaataaaattttatattatatctgcctttataaataacttttccaagttctatttagtacctgaactataatataaaggagatatatagaaaaagtaatttacaatgaatgatacatgtcccagtacacactaaatgatcaaaggaaacatgagaaagtggtcagatattttcacatgcatagactcatcatgaatgtgacagctgtgaaggcagatacatatcaagtaggttttactactcaaatactgagagtagtgctgacttgggtgataggattttcaaaactgatgatgagttcttgaaaatgttgtatacaaaatgagataaagtcatctctcaatttacatagaagttatggtccctgaaaaataataagtatatattaaatctcctgaaatacttatgtatatatgtaaaatggaattaaattctaggatcagataattataagcaggttttcatctttgagaatatcttgtaggacatttgaaatctgggcagagtctcagacaagtcgttgtacagaactgctccgtgtattgcagggcatccagattcctggttctttaccactagactatatagctatcatccccaccttaccccactcctattaagcaaaaatgctgccaacattttccaaagtcgtagaaggaataggactgccttgattgagagccaataagatgggtaattgtcttaaagggagatatgaagaaagttctcctgacagcagtgatctttctattctgtctcacatgcctcaaatacatgggatgttgggtctgtcaatagctggataaatcatagacaagaagcagagtacctaactgtcagcataagacttctctggactttaattttaacagatcagccaattgaatagatagaactgtatatatccagtaccttttacatgatggacattgcaatcaagtatattataaaaaagcccattatctactaaattctgagaggctgctggatatcggacgttttgttgtctttgacatttttctgaactcaggaggcatcattcaatattcagactattaggtccaatattgatttcagtatattttaagtattcttgggcatgaatagttattcaaattataatcagaccttaataactttctaatttatttaaaaatgatctttataactttctaatctttagaacagtaagtgactaaatagaaatgtgataaaagtaaagaatacagcaagtctatgaattctattaatccattaaaaattatcatgtaaaacatatttttccatggggagatttagtatacattaagtgataagcgtagagtgaacactttaatatgctgtctctcaggctagatgtataaaaatatttcttgaatgaaaaaatgaatgctgttgtcttagtgtgctctgtttgccataacacaatactttagactgggtggcttaaaaaacagaaatttactttctcacagttctagaggctggaattctgacatcagggtgccagcatagtcaggttggtgagggcctcttttcctggcttatggatggtcatcttctcactgtgtcttcacgtggccttcccttgatgtgcatggggactgggttgggggctggggagagagagagagagagagagagaaagagatctaggccacaaattctataaaattagtaacctacccttatgaccttatttaatcttaattatctccttaatggtcatgtctccaagtacagtcatattgggagtcagggcttcaacatgtaaattttgcaaggaggcacagttcagtccatagccactataaatcattttctataggaaaaaagcattcatctatatatatatatacacacacacatttgtatacattatatattacatataaatatatattatatatgcatatatagatatatatacatatatacattatatattatgtatatatatatacacatttaaaaattcccaaaattgttaatagaagcctttaggttgtgaaattataagtgatttgtttttacctgtgtgcatttctagaacagataacaaatattaatgagtgaaggacgacatatgcatttgtgcttatgaatttttaattaaacatttttatttggagataactgtagattcacatgaagttgtacaaagtaatacagaaggatcaagtgtactctttacccagttttccctaatgattacatcttggaaaagtatagtacaatctcacaaccagggtatagacacttatgtggtcaagatacagaacatttccttcattccaatgatcccacatgttgcttttttgcatagctgtgcacacttcccttctttcccactcctttcttaatcacctgcaaccactaatttgttttccacttccataactttgtcactttaagaaacttacatagaaactttgtaaagaaactttataacttctttataaagaaactttaagaaacttatataatggaattatatagtgcatttcctttagggactgaccctttccattcagtaaaattctctggagattcattcaggttgttgcaaatatgactagtctgttctctttcctgctgagtagtatctatgatatgaataagccacagtatctttattcacttgttgaaagtcatcagggcggtttctagtgtttggctattgtgaatgaagctttcatgaatatctgtgtactgattctagaatgaacataattcttcactctctgtaataaatgtctaagagttcaatcactgggtcatacattagtggcttgtttagtttttttttaagaaactgacaaactgctttccagaatgactgtaccattttacattcccacttacagtttatgagttatttatatattctagatgatacttttttgttggctatgtggtttgtaaatattttcccccactttgtagtttgtttttccattcttttcacatgagatttatgctgagcaaaatttattttgattatttttaatttatatttctttgtcatggttcatgcttttgatgctaagactaagaattctttgcctagccttagattccaaagattttattctattttttctaaaaatgttatagtttcacatttcacatttacattcgtaattcattttgaacttatttttgcatttggtcagaaacttaggtcaaggtccacttttttgcctatggatgtccatcttttttttttttttttctttgagacggagtctcgttctgttgcccaggctggatggagtgcgtggtgcagtctcggctcactgcaacctctgcctcctgggttcaagagattctcctgcctcagcctcccgagttagctgggactacaggcgtgtgccaccacacccggctgattttttgtatttttaggagagacagggtttcaccgtgttagccaggctgatctcctgacctcgtgatccacccgccttggcctcccaaagtgctgggattacaggcacgagccaatgcacccagctggatgtccatcttttctctaattgcttgtatacttttttcaaaaatcatttgggcataattgtaggtgtctatattggggttccctgttcttttccatttatttaatgagtttgccactctgtcaataacacacagccttgattttcaaagttattttagttattttattttctttgccattttgcataagttttagaataatctatccacatctacaaaatgtctttcatatatctatagtgtcgtcaggtatattctctgtctaacttttttagcagttgctttaggtactgcagtatatattcattacttatcagtctacaagcatcaccatttacccagtaaagcgaagcatagaaactttacatccctttatgtttctttagcctcccctgtttgtaatataattatcttcaagatttactctgcacacaacagtgttagattttttttgcttcaaccatcaaacaacttagaaaactcagtataaggaaagcctacttttatgtacccgtatttttgctcacagtgttctttcttttttcttgatgttcacaggcttcttctttaattgcttacttccctattgctttcgaaaattccttttgtccattctttgccatctgttgtggcatattatcttaatttcctttcatctgagactgttttgatgttctctttatttctgatattttcacttggcataggtcactgggttgacagttttcatttcatatttgagaaatattgggccacttctttctgttctctgtgatttctgatgagatatctattattattaaaattgttttcttctatgtaacatgtcatttccccctcgctgctattaagatttgcttcttgtctctagttttcagaagtttatttttatttttaatcagcaaataataattgtgtatatctcaggagtacaaggtgatgttttgatatatgtatgtattgtggaatgattcttcaggctaattaacatgttaatcataacacccatgtacttactaatttttgtgctatttatctccaaagttaatttctcgtgtctaactggaaatttgtatcctttgaccaacatcttattccccatcccatcttcactccagcctttggtagctactattctactctctactaataagagtctgactttttagataccacgtgtgagctcatgaagtatttgtctttctgtgtctggctcatttcatttagcataatgtactccaagttcacccatgttgtcacaaatcacaatttcagaagttaaattatgatgcgtcttgggtttatagtctctgagctttagtctgcttctcgaatctgtaggtatatgtctcttgccagattggtggttttcagccttgacatttttcaagtcctttttagccccacgctttctcctctccttgtaggactctttgacatgaatgttaggtcttttactatagtctcacaggtcactggagcttcgttcagttttctttctttctgctttttctttgttgttgtgactggctattttctattattctactttttagtttactgacacatcttccatttcctccattctgctgttgagtttattcactgaactttttatttaagttattttacgttcagttctaaaatttccattttgttccggtttctttcttctattttttttactgagattttccatttctttcctaaagcctttatttttaaaaaaattttattatagctacttttaaatctttttcagataatttttacacccctgtcatcttggtgttggcatctattagttgtgattttttcagtctctttgaaatcttcctagttctcggtatgatgagtaattttgtttgaacttgaacatgttctactgcatgtatctccgtattttcaacccttctgtttttaactgtctttccctgacatcggtctaggaggggaaagtgaggggtgctaccctatcggagtagcaggtcccccattcagcattcattggcaccagagatgaaattgggactcctctgtgctactggatgaagagtgggagttcaggctacctagatggcctctacagtgtcacctagaggatgatggtggaagtcctgaccctccagtgagctgcttctgacaccacctcagcagagaaggggtggacacttcattaccatcaggggtgtgtggaagcccaggatccccacttggcctttgctggtgtgggtgtgtcacagcctttttcctgtggtggctggctatagtaaagttttctgctgtgcttgctaggttgtttctttcctggtcttttagctagagagagcagattattatttttattttttctgtgtatgttgccatttctgggttgccagcttatacgatttgagtctgagatatatgagacaaaatgacacttaggaaacacacttccatggaatttcttggtcccaagatacccagctgggttgctttttctctctacttttatagtcaccttatgtttgttttatgtataatttctagagttttaagttgtacataaggatcaagaaatgtctgtctagtccatttttctaggagcataagttagtgtgctcatagatttttagacattcagaatagaaaaaaagggaaacatctatttgagtttttttaaagacacttttaaagatctaagctgatttatgttctataagtctgtaaaacaaggcccttgcattgccaatgaatttaaacaggaataagacttattaaagacttattaaacacacatgatatggcatgagctgcaggccaaagacattgaaatcactgattttccacctaagggaaataaagattatgaaaataaagatggttgattgtgttgtctaaattttattgtctttaatgataatgtgtagatgtgatcacagagtatataataaagtttatatgaatatatgacattgccaaatataggtgtctaagtgagaataagaaataagtgaaaagaaaactaaaattagtgttagataacattgtttcagtgttggactggttcaaaaaaactgtgtgatcttgagcaattattttaatctttttgaatctcagatttgacattttgggctagacttaaaattattttccaactctaagatcagccatttgatatatattttataacacattcatatacataagaagatggtgccacatcttgaatattttagacatggaggcagtcttggtagtaaaatagaacatactgcttttcaggaagcagtatgatgtgggagaaattaataaacttagattgtttagacatgaatttgaaacttagatataagacctgttgtttagtaagccgaggacatttcttaatccttctacaccttaatttctgctgtagaatatgactaatagtttatgcctcataggatgcattttgaggagttaaaacgttaattcttgtaaatccccccttgaattatgaaatttaaaaaataaaccaagtttaaaattgtgtaactacattcactacacacatacacatttgtataaacatgaatgataactatataattaatcataagttgcctcatttcctcttttgtaggaataataacatctaaagaaaggcaatttgtttttcatctttgtatctccaaaagcaatatacccaaagtctgatgcattgctatgttcagcaaaattcactgaagaaatgagtatacgagtaaataaactaaaagacaaattataaaaaggatgctctgaataaaatgaaaaaaacaaagagcttaaaaaaaagaaaaggccaaaatcaaaattttgctattttgaaggcctcagctatccagggtaactgatattcctatccagtaagataggaatgatattgcagtaggcttaatagtgtttatttcttacacaattcctttgatttaagtccacatacatttcagtgatggttcagcttggttagtcttgcaaattaaagtattactgaagccagactgtctgaaaagagatgtgttcttacagaagaataatggtcagtatctagggcaactagtgtattcatccagaaaataactggtgtcccttcagcatgagatactgatactgatggattgatttaacatttcctagaaactttcaatttttaggcatcagatagaatttatcaaaaggccagcagccacctctcctacctgcctcattgtataaattcatctacaaagattaaaataacagatagctaacaaaagccattctgctcatatatatatatatatatatatgagcacatttcttccaaattaactttgcttacaaactgaacagagggagaagcatacaaataagcttaaaaatatttcctttggtgaaataattgagcagataaaaggaaaagtagttttaaaagtttcatgtttgaattcataaaattctcaaataacttatattaatttttctcttctctgaatttcttattttttgtattgttcttgagcaggttataatgtgttttttgtaagttttacacataagaaaactaacatgaatttatttgagcttgaggcaatatttccctgtgtttgactctctgagaacatttaaaatgataaaaaagattaaaactaattattattttaaccatttaaatattatttaaactagtttacaataaaaactcaggtattgtatgactacagctaaataactcaagcatgtgctttttctgaacttcctagcaaccaagacattatgggaagactgttaagttatacagtgctttgatttgatagaagagaacaaaactgtttagcagaaaagtcatttttttatagtcctttgatttaaaatgttattataacaagatcttttatttacacaggaattttgagaatataaaaaaataaaaatcaagatgctaaattatttctagcagcacataataataaataagtcatcaaaaggaatatggttgaccattaatatataaaatacatttaataatgtacaattacattgttaaattactaaaagaagctaacatttaaaactaaagtcagtaagatacatgaccttaattattgcataattatgaaatgttaagaaataaaaacagagaaaatataaataatataagtaaagacgtatcttagagggaagaaaaactaaatagttttacacatattaaaggagaaactggctgggcacagtggctcacgcctgtaataccagcagtttgggaggtcaaggcaagtggatcacttgaagccaagcgttcaagacaagcctggccagcgtggtgaaaccccatctatactaaaaatataaaaagttagctggatgtggtggtgctcgcctgtaatcccagctatttgggtggccgaggcacgagaattgcttgaacctggaaggcagaagttgagtgagctgagatcacattacttcactccagcctgggcaacagagagagatgctgtctcaaaaaaaaaaaaaaaaaaaaaagaaaaaaaaggagaaactgtcaatagaaactttcagtagactcatgctctcatgctaatatttccatgaagatgccaacagaatcctatgaccactgatgtagctactgcaaatgtgtacaatctgtagtttattctgctaacatgataattctgctcattgaagggtaaagtaccctagtatttatttgtaggatccagagctgggactgagcacaaatggggaaagaaggtcaaatcaccccaacatgtaaaagctgaacctaatcaactggccagtccatttgcatttgggcctgctgaatggttggaaaattaaagggcttgttaactgaatgaaaaataaatgctgcagtatcttagtccgtttatgcttctataaccaactaccagagatggggtaatttataaataatagaaatttatttcccacagttctggaggctgagaagtgaaagatcaaggcaccagcaggcctggtgtctggtgaaggcctgcctctcatagacggtgctttattgttgcatcctcgcatgacagaaggaatgaacatggtttcctcgcatggcagcagagcggaagagatcaaacccacacacttaggctcttgtataaggacgggctaatgagatctcttccctcacggttttatcagctcctaaaagtcccacctcttaatactatcatattggcaattaagtttcaacacataaattttggaagacattcgaaccgtagcaccaattataaccctgctttgggcagaaataagagcacatttgtcaatgacatatcagaagaggtagaagagtttcttaccacagaatgtacattagcatcccttagggggcttttacgtgatagtgatgcctaaccccaatctgagaacaattaaatcagaattcctgtatgaggcatgggtctcatttttcaaagcttcacaatttgcatagtgaaaattgagaataattattgtagtctactataggcataacagagaatttacccaaggtacaatcaaatacgcggtaaatgagaatttttttttaattatggttttggcagacctaaaccaggtatagatatatgtgtgtcacgaccatgttctctcacctgattcagaatatctgagataattcgcatgagaatcttcataattttggcctttcacagtgccttgcattttctccaagacatgggactcatattaccgatattaggggatacacggaaacaatatcaatttaaagtgaatgatgtagtatgaaaaatcattctttagttaatgctctttcaatcctctgattgacccagaaagaaaatttaagtttactgctaataggtatttaatatccctgtgatacttaatgaaagagagagaaaaatacagagagaagagggggagagaaaaagagaacaggagagagggagggagagaaagataattcaggctaacatttggttggcaatactatttagctataatttgatagtttcagtttcattgtagaattttttggagttgcagtctattctgatactagatttccatttatggtaaagagtcaatttaaagaacaattcaaagcaaatgatagtagaaattgtatttagataaggacaaaaaacgtgaagacatttatctcagttcagattagatttgtaaaagcataaacaaaaaaaaaataacaaagcctgaggcaagagcttatgttgtgcttctctattaggtatgcgatcccgggaagcaatagtgtgtgcaagcaaaatgtgctgagaaggacaaaaagcgtatctgaagaggtgtgctacagagttggaaaagaaatagttaaatgaggaccttgatcatcatcaccaccatactatttaaggcttattgtgctttttaatttagttgaacagaaatagtaaatcaaaggcgaaaactttgaataatgttaccttcgttaaagtgtctaaagtcattttgacaattatgcaaaagaacctttcaattctgacttcaggtcctcccactctgtcttcttatatcaaacttaaatagagaaagtaaataaaagcaatgatgcaaggttcatgtctgtaactcatgctcctggaggactcaccctgctgatatactgccataacaaattacacaactagtgcagttcttttgatttattgctgcaatagatcataagcgtgctgactgacataaacatgtgtaccatagacagctgggcttcacaatattttatttctctctcctcattttcaagtgcttagtttggaaagtaagaaagaaaacaaattgacacatccaggaggatatttctggagcagccctccccatagactgttgaagtaatagcttttcagttgagaagtcccagtgctcttctctgcttctagttcctcccaaaggactgtttaaaaaagataaaaagccattaactcatatgaattaggttttgataattcagtctgtagtttttctttttcatttttttgactgtataaatacataatgacagacttcatccgcatttcctcattctttctctgagctattatgagctatcatggaaattggaattacagacatttaaaatcaaagtaattatttaataggctgttacacccctactttcaaaaggaaaacagttgttctgtcatgagtccaatcattttttcaaacttaagatttatactgaggtgtaaatgatcgctttttatttcgtggttaaaatgatgcttcatcacgtctcctgagagcatttctgcaattggcaacacagggccttttaatgatttgtgtggtcatctgttctcctagttctttgtatctacctggggagctgtgtggaatgcatgatagtatttgatcataagaattcttttgaccctccccaatatttaatatttccagaccttgcgtcttttttgttatgaactgtgactggtctaagatattactcaatttgctgagttacatattctatatttattaatattgcagaaacacaagacacttggtcaacaaatatagctctttattgataccaccagatcagcagccacagtaacaatgagaccattagtttcccacatctagaccaccagcaatgccatgagagctgatggaatctttccaagtgggtggtgggttagttcacatggacagaaatagagaacaatggattttctccatttgcatatataggatacggtcagccatcctatttccttcttccaaaaggagagaaggaaagcagaaatgaaaactttattcttctgaaaatggtttttaccctaacctttttattttattttattattattttttgagatggagtctcactctgtagcccaggctggagtgcagtggcgcgatctcggttcactgcaacccccgcctcccggcttcaagcgattctcctgcctcagcctcccaagtagctgggattacaggtgtgtgctatcacgcccggctgatttttgtatttttagtagagatggggttatgccctgttggtcaggctggtcttgaactcctgacctcaggtgatctgcccacctcggcatcccaaagggctgagattacaggcctgagccaccgcaccggcctaccctagccttttaaaatgtaaagatgtctctccaagggcaagataaagcccaggtgtctccagctttcagggtgtggagatgtgtccaaattgaggattcatcccttttgacatttgagatagtggtcatgtcttctggtactttggccttaagttagggacctaatccagctatcatttggtcctgatgggggagacaagttgtattatcctttcagatcagagaaattagctaaaaaaaaagctactgatctaatttttatgacatgataatatgtgaggagtacagtatttctggggaaggtgaaagcaaatgttctctatctttcttcaatatatattcctgtgtctcatgaggctagggctttggcaggagcactgagaaatccaaggaaattttgttctcccgaagtgtcatattatgcaattttcttacttagttcaaggagtttaagatttctccccttctcctttgctccctttcctctttttttctttctttgtctccttgttcccctgttccgtctcctcgttccccttgtctcccttgctgagagaagggagatagacttcctccttctgtttacttctgtattttgctgagagaagggaaatttacctcctttctctctgaaaaatatgagtaaacaaaatgacaaaaatccttgcccttagggtatattatattttagtgagagaacagacattaaacaagattaattaagtaaataaatgctagttaggtagtaataagtacttagaaaaaatcatctcagggagaaagggattgattttttttatttattttatttttttttattatactttaagttttagggtacatgtgcactacgtgcaggtttgttacatatgtatacatgtgccatgttggtgtgctgcacacattaactcatttttgaaagtggttggaaaagtcttcagcaagaggatgactgaggtttgaagaaagtgagggagttaggctgccagttgggtattttggggaatggcattctaggcagagtgcactgcaaatgcaaaggccttgagcagggatcgtaactgctgagtagaaggaggccagggtggctggaggagaagtaaaaggagagcagtaaaagaatttattttcttattcaatactcatttcctttgtcattctcacattctaccttgcatggtactacgttaatggaaaatcaccaatatgttaacttcattaaaaggggttaaagtcgtccgcccccacctaaaaagttgtgtcattgtagatgagaacgaaagtgaaaaaaaaaactgtaagtgttttagctttgatagaccaggctgccttggaaaaaagaaaagtcaaaatcacataattaggatttgtcaaatggtgcttttctctataaaattgggttgtttaaacttgtccagttttttcttgatcaaaattattatgctcattggtaattttcaaagaacacatcagaagttagaaatatgcatcatgaacatttaagctgatgtgactttatatttttattataaagtttaatcattcttttatattgatggaatttttaatgattaaactattgaacatcatttattttgaaagagattagagaggaaggttaaaaactcatctttaaataacagttaaatcagaattgcttttccattaagattttttaagcaatataattagattcaactgcatccttatttttcctgccactatatatgactaaaatttgaaggcaaaaaactgattttgatcaaaatttaaaaaataaggaattcaataaatcaagcaaatatggttttagcaaattctaaaatctgtagtgcaaccaggtttggtggctcatgtccatatctcagcactttgggaggctggggggtggggaaaatcccctgagcccaggagtttcatactagcctgagtaaaatagtgagactctgtttctgcaaaactgaaaaaaataaaattagccagcatggtggcacgtacctgtaagcccagctactcaggaggctgaggtgggaagatcgcttgagcccaggagtttgaggctgcagtgagccataattgcaccactgcactcctgcttgggtgacagtgaaaccttgtctcaaaaaaaaaaaaaaattcagtagtggataaagttcaagcgattctcctgcctcagcctcccgagtagctgggactacaggtgcgcaccaccaggcccagctaatttttgtatctttagtagaaatggggtttcaccatgttggccaggatggtccggatctcttgaccttgtgatttgcccgcctcagcctcccaaagtgctgggattacaggcatgagcaaccacacctggccaaggtatcctatttcttgcagtgttgtacttggcttaactttcaaagttgatctcccagtagacctctctatcttccagtggcaaatctttattggtaacagagtgagtgcgatggaacatggactgaatttgtgtggtaatgtttttatttgtatgcaacatcttttgtccactcactactaactgcactgggatagaattcaaaacacaaaactcttacattgaaaaaaaaggaatcagtttaattaaaagaaacaaaatactctaaatttaaaaactcaggagaacatctagactagaaaaagcaaacaaacattaatggaagcctgtaagaaaggagagagacttcaatgtgtttacttttggaagtatagaatgaggtgagtataaaatagcaaccatcagaatgaagctcaggccaaaagtcgactgggataaaaactagttagtccccgcaggtgtagactacttttatggtaatgatattataatgaaaaaagccagaaacaattgaactacacaataattgataatggtgtgatgagtgttgggagaatttgggggcaggaagtggcaagggtttgtatagtgaataacagatgatctttgaagctgatcttagattatatatggtgaataaaagtgttctggatatctgacctcaaaaataattggattccgatggtcttgtatcttccggtggcatggttaattttggcgaatccatacacaaccaagtctgagtaactacgttctgaaataaaacacttcctttttctgataacatttttaagttggcttgctttaccaacaattgttctccttttgttctttctctgacttacgtcttacaaagcaagtaaaagctttcccaaaggaagtaggaaggaaaagtttgagagtcaacacatttgagagtctgcaaaaatcactgagaaattgttttgtggagcaaagtctagagttagaaattgtgccccaagcttctgagatatagctagtatcacgaatgcttgaatgaccacaaacatgggtagtggcttttaaattctttattataatatgatggaagcatttccatggatcgtcttcagcacctgaagtgtggagcttatcaaaactttacatgtcctgttggtttagcatgtggactgcatttcaaaagatcaagagtaccaagatcaagcattgttgttgtgatacttttttgaatgactgcttcctgcttggctgaacgcgttctttgatactttttttttgttttttgttttttgtttttttgagacagagtcttgctttgtctccaggctggagtgcagtggcgtgatctcggctcattgcaacctccaccttcagggttcaagcactcctgcctcagcctcccgagtagctgagactacaggcacacaccaccatgcacagctaatttttgtatttttggtagagatggggtttcactatgttggccaggatggtcttgatgatctcctgacctcatgatcctcccgcttcagcctccgaaagtgctgggattacaggcatgaaccacagcgcccagcctgattctttttagaatttttcctgagctaaaaccctattccttagctgcttttcttccattcttattaaaattcacagagaatattgaaagtaaccaattatgaaatatgtagaactaaaagtaagatgattttgaacataagccatggcatggttaacaaaaatgccattaactctattggaaaacataccttacatgaataataatacaccatgatatgagcacacattaattaatttagttaattatgtctatatggattactcatgtctgcaaaattaggaggacattattagaccttatttctgccaatagggagagttagcatttagtttaaataatatagctgttggaaatagatgggcacttagagattatgcagataacttttcccatttcatagagttgtaatttgatcatagttgttgagctagttcctctctcacccctaaccccctctgcacatactcaactcctcatatctatacacttagttcaggactcttttgagttcatcgcaggatcacagtaatgttcagttataaagcatccccagggcgaaatgtatatgatttgtccatccatagctaggtatcagggctaaggtgaggagctgaagattaagttggagagtgtaacaatataataatttactgtaagtatttaaagaagcttctattttatttatgtgcaagggcaagctagcaccaaattatttgctatgaatgctgaatatttcttttttatcacatattacacttaacacctaaaaatgaattcattgagaaatattggttaattacttttttcagtatgatttaatattggttttaacatttgagtgatactgaagtcactggttagttatcaaaattcagttaaagggagaaggttttattatctgacatgactaaaggaatgccaggaagtgatttatatactgattagttcagaacatgtccttgaacaattatagctgcttattttttgtcatcttcctggcagctgccaaattgtaatgcttaatgattcaacttaaattaactaaaatgaatccttgtggaaaactataatacctgtctagtacaagagagctgattatattgccttcatttacacagaatgtattcataattcactgacaccctccaatcactaagttatggatatttttttccctgagcaaatggagaaatagaactttgtgcagatgttcatgccatttatggcacattgtgtagaatggtcaaagtgctgttgctacctcatggaaatactcaactgaagtttaaatcacaaaccaaaatacaagaacaatttgaagatacatactatatataatgttgtttcttcaagcatttatctttactataatttttaataaatagttttaaatgcatgggaaatgttactaaaattttaaaataaatgatgtggacaatattaaattacagcagagcacaacatttcatggaatacttgaatgttcttgatttttccaatttttaattaaaccaattacaggaaagtaaatgcaaactgtcagagtttgaaatatagataaatgcatataacatatagagaaagtaaaacattaaattttaaattaatttcaaaaatggaaacattcccgttatcctcaaatctttctttttttctattgtaaaagatcttatttataggccataagaagcattagtagtacagctatttaaaatgtacagcttaattaattatttttactctaatctgtccttgagtgaaatagttcaaagtgtgagaattgccgggccaacatcctccaggttgtaatggctcttgaaaaatcacaggagtggaactagtgaactgaatgactacttcaatagcagaaaccagatattaagagggccttaggaaaacacactgacttggaaatagttgatttcatggtttcatgtagattctgtcaattttgttttcttaaagataacttttttcagcataggagaactgtcctcttattctctacctttgttttccatagaatgactgtcatcaaatcccaaatggtcaagttggaacagaataaaaactcagtgcattctatcatttttacttaaatatttaagaaaatatcactcaaagataatttccttccatttacaaatttggggtgattagttattcttgtttttgaagaaatttgaaaatctttaaatcgtttgatttctaaaatactgcatagtctgttgggagtcataaacactgacaagtaattcttttagttataatgaagacactaaatctgatcctttatttctgatccttcatttttaccctaaattttcttaatttactactttttggattttattaatattttaattgacagctaataattgtacatatttatggtatacagtgtgattttttgatacatgtatacagtatgtaatgatgaaattatgttaaccatcaccatttgcattttctttgtgttgggaacattgaaaattcactcttttaactatttggaaatattcaataaattgttgttaactatagtcaccctacagtgctatagaacactagaacttatttctctcttatctagttgtaattttgcatttgttaaccgacatctcctttttctacttctgccaccctctagtaaccactattccattctctactatgggatcgatgtttttagcttctacacatgagtgaaaacatgtgatatttatctttctgtgcctggtttatttcacttaaaataatgtcctacaaacttccatgttgccatgaatgatagtgttttattttattttattttattttattttattttattttattttatggctgaatagtatctcattgtgtatacgtaccacattttctttatctattgccctgctgatgaacagttaggttgattctgtatttcggctattgtgaatagtgctgtaataacacatgggaatgcagatatctttttgacatactaattttctttcccatggatataagctcagttgcaggattgctggttcatatagtaactctattttttattttttgagacccttcaatatttttttcataatggctgttttatgttcccaccaacagtatatgagtccccctttccacacatttgttattttttgtctttttgataatagccttcctaactggggtgagatgatatcttattttggttttgatttgcatttccctcatgattagtgatgttgaccgttttttcagatacctgttggccatttatttgcatgtcgtcttttgagagatgtctattcagcttatttgcccactttttttaattgaatgatttttttttctgttgagctttttaggttccttatgtattgtggatattaatcacttaccaaataaatagtttacaaatattttcttctctgtagattgtctcttcactctattaattgttttctttgctgtgcagaagctttttagattcatataatcccaattgtctatttttgcttatgttgtctctgtttgtgaggtctttttcataaaatatttttcaagacctataatatcttaaagcatttcctttatgttttcttttagtagttttatagcttcaagttttacatttaagtctttaatccattttgaatttttttatatgatgagatacaaggttctagtttcattcatctgcatatggatatctagttttcccaacaccacttattgaggggactatccccaatcaatattcttcaagtctttgtcaaaaatgagttggctgtaaaaacataactttatttttaagttatctgttgttgcattggtctaattgtccattgttatgccagcagcatgctgttttggatttttacaactatattttgaagttaggttttgtgatgtctttatctttgtttttttacttttctcaggattgctttggttatttgggaaattttgtgatttcatataagttttagggttctttctatttctgtaaaaaaatgtcattggtattttgatagggattgcattgaatttataaatcacttttggtagtgtcattttcacagtattgattcatctaaaccatagacatgggatgtctttccaccttggtgtcctcttcaatttcttttatcagtgttttatagttttccttgttaaaatatttcacttctttggttaaatttattcctaggcattgtatttccttaaaactattgtaaatggaattgctttcatgatttctttttcagttagcttgttgttggtgtatagaaatgttaccattttttgtattttaatcattttattcttcaagattactaaattatttatcagttataagagttttttggtggagcttttagggtttcctatatggaagatcatgttgtctatgcacagggacactctgacattcccgtttccaattttgatgccttttatttctttctgttacctaattgctcagactgagacatccagtattatgttgagtgatagtgatgagagtgggagtgcattcttatcttgttccagttcttaaagaaaaagctttcagctttgcttcattaagtatgatgttagctttgtgcttgtcatatatggcctttatgcattacttatttacttaatttgttgagagcttttataatgaagggattttgaattttgtcacatgctttttctgtgtctattaagatgattatatggtttctgtttcttattctgtaacataatgtatcacatttattgatttgcatacactgaaccatccttgaatctctataataaactcaacttgatcgtggtgaatgatcttttcagtgtgctgctagatccagtttgctagtattttgttgagaatttttgtactgatattcatcatggatatgggtctatactttcttttttgtggtgtccttatttggttttgatatcaaggtatgctgagattataaaatgagatttgaggaattccttcttttttaattttctggaaaagtttgaaaaaaattatattagttcttcaaatgtttggtagaattcaactgtgaaaccatccagtcctgggcctttctctgatgggagaccatttatgaatgatacaatcttgtttttcctaaatgctatgtttacattttctttttcttcttggttcagtgttggtaggttttatgtgtttataaatgtatccctttctgttaggttttccaatttgtcagtatgtagttgtccataatagattctactaatcttttgtatttctgtggtaacagttgtaatgtctcctttttgattatgatttttggggtcttttgtttttttttcctggttaccctagataatggtttgtcaattttgtttacctttttgtaaaatgacttttcattttatgatttattgattttattttttattttcaatttcatttatttctgctccaatctatagtatttctatccttctactaatgttgagttttgtttactcttgcttttaagttccttagggtgcattattaggctgttaatttgatatctttctacttgatgatgaagacatttatttttatagccttgcctattaacaatgcctttgctgtatcccataggtgttgacatgttctgtttctattttcgtttgtttgaagaagtttttaaatgtccttcttaatttttttattaacccaatggtcattcaggagcatgttgtttaatttcagtgtgctttcaagagtttctcttttaattgatttctagttttgtcccattgttaaaaaatatacttggtatgacttccatttttaaaaaatttgatgaaatttgttttgtggcctaaaatatggtctatcctggagaatgtcccatgtgctcatgaaaagaatgtttattctgtagctgttgcataaaatgttctataaatgtctgttaggtccatttggtttaaagtgttatttaaatccaatgtttccttattgaatgtctatctagatcctctgttcaatactgaaagtggagtgttgaagtttctattattggagcctatcttcctttcttcaaaattaataacatttggtttatattgtgtgctctaatgttgggtgtatatataattatttacaattattccatcctctttgccattacataatgaccttctttgtctcttttcacactttttgactaaaagttacttttgtctgatgcagatatagttacttatgctcacttttgggttttgtttgcgtggaatatcttctttctcccttcactttcagtctatgtttgtctttataggtcaaagaaattcctttttaagtagcatactgctgggtcttgttttattattctttcagccagtctatatgttttaattgaggaatttaatcattttcattcgaggttattattaataggatatactcctgttgttttttaaattgttttattgttttgtgtagtttgttcctttatccacctcttattatttatcattgtggtttttttgttgatgttgttgtgataaggtttggtttctttctctttctcttttgtgcatcttgtgcatctgctttaccactttatacttttgagtgttttcatgtagattatccttttgcttctagatgtaggactcacttgagcatttcttgtaaggttggtctggtgataatgaattccctcattttcacttgtctgggaaatatttgatttctccttaattactaaaggttagcttttcttggcataattttttggctggcaatttttttatctttcatttctttgaaataatgtaaaaacctttacattatttcctggtctgtaaggttttagctgagaagtctgctgttaatgtaatggggatacccttatatatgactttacactgtcgtctttcagtttgtagcattctgtctttgacttttgacaatttaactagaatgtgcttcagaaaggaacttttttgagttgaatatattttgagatctgcaagcttcctgaatctgactgtttatatctctatcaagatttggacaattttcaactattatttaattaaataggttttctacagattttctcatctcttttccttcataattaccacaatgaaaatatttgttcatttaatggtgtctcatagttctgtagacttcctttactttttttcattatttcttctttctctgacagaataattataagtaatctatcttcagattaagaaattctttattctgcttgatctagtctgatgttgaaactctcagttatatttttttattttattcatggaattagtttcagggtttatgtttggttctttttatgatatttatctttttattaaaattctaatccatttggtatttttcctctctgattttgttgaattgtttacctgtattttttttttttttttggaccatggtgcattatcttaagattattattttgaatttctcttctggcaatttatagattttcttttcctttgggtcagtttctggagagttattttgctcctttggtagtgtcatatttccttcttttttttgtttcttgtgtccctgctttgttgtctgtgcttctggtggaacaatcacctcttcaaatgttatggtgtgggcgttacagagaaagatgtttatccacagatgggtcttagtgtactggttacgaagggtgtgatgactcaggttctgagtaaaagcagtgatacagtctctgtgaaacttcttaagcagcaatcaacatcagtaataactatgagtgtctcaataattttgactatggaagtttgtggtagcagcagaggtagcatatgttgttaaggtctttggtggcaatgggttttgatggagatttagccaaggagatccctctttgttttgggtctgacataggcgacaagcaactgtggtggcacagggttctagttgtttggagtagctatggagcctgggtcataggcttaaggtcttgtgaacctactttggcacctgggtcatgaggtgcaacttcactctttgttccagaattggatgttgattgctcagacaaccaggatctatgactctgagacaacccctagcagcttgggctcagtgggtcaggatgtagctgtgattctgcccctgtgggcacaacacgggccaaactctgaggaagaaaggattctctggaggtttgggcgtgaggagcaaagtatggctgaatttgggaatcagagacaataggtctcagtggtaacttggctcccaaggaataagtcagcagatagtggtgactctagaccctgggattgtaggacttgtcagtatcccagattctgaggccaagtgcagtagcagtaagtagtccaaaatggcagaacacagctgttgcttggaccctgggggcaaggggcagctcaataataattgtacttcccagagagaaggtatctcagcagcttggactcaaggagtctagtcgagctttagggaaatggagtattagagttgtttgtcttatggggcagggtgtctcagcctagccatttttgtttccatggaatgtggggtactatagcagctcagacttgggatgtgccgctgcttagttcagccaagctaccaattccccaggttgcaatgtgtcacttcagctcaggatcgggggtgagggtgtgattgttctaggtagcccaggaactgtttccctgggatgtagtgcatcccttcagcttaagtattgtgcatgatcactgtgggtgaccacacccccatttcataggagtcaggctgctgctttaacttaggcactgttgaggttctggctgaccagggtacagtatgttttcccaggaggtgtgatactgcttcagctcaggcacaggtatgttacttctctgagaggccaaggaacagtttccctgagaagctaggcattgcttcagctttagcgtagtgggcaaagtgcagccaaaactgggaggggtatatggagtggctccatcaaagcatcatgtccctgggaggcagtgcacagcttcagcttgaataccatggggcaaatctcagcagcaactgggatgggtttttgaagtgtctctaccagggcactcttccctccggaggcagtgctcaactccagctgaggcccctagggacaagtgcagcagtggctagaaggtatagataaagcaactctggccaggtactgttttttcaggaggaggtgaacaactttagctccagcccctagttgctgggctcagcagtgactcttgggtatacatgggatggttctgccaaggcactgttttcatgagaagcagtaagagcttcagctcagccttctaggggtagggctcacctgcaactgggaagggtagggtggaggacttctacaactgcttgaccccctggcgaaggggttagcagctacttgtggaatggcttgggaatgtcaggacactgggcagggctggtttggcagcagcttagtctcagtgataaaagagtgccatggccactcacctctggagccacatacacaccatcagtagttgcagttccaaaatggcatagcagagaagccatgcagggtacagggagtgggacacagtgtcactccttctctgggggaagcatagccgtgtggactccaggcagctccttcagctgggcttcgtgcctgtgaggactgcgggggtccccagtggtgagtactgtaagtgtccaaggtgttaatgggagctactgggatccttttgtttaccttttccccactgggagaagttcctcctgactcccagctcatcccaggagaggaatgaagtggtgagggccaggtgtttctttcagttttctgtgtggctatcctgagcttttctgctcactagggtttctgttactccttcgatgtactctggtgctctcctttatttactttcatgaaaatgcagttgtttatttgttgttttggctgtttttgttgggaaatgagcactagggatttcttatcaaacatcttgctaatgtcagaatcccttgccacttattttaaactgtgcagaatttcaggtgaaaatataatttctttataagtaaatatccttatttaattaaaacaaaaaatgtaaataagtaaaacttcccatataatgagggatctggtaaattggcaccatttcaatttttgttgagaatattaatatagaaaagtaaacatgttttctaagtgtaaaaattgaagaatcttaaatcctaattttcaaacattttattattacatgggttaaaatatgctgtggccaataatatatcttcaaaaaattacaattcagaaaaaatgatatataaaacaatttttatgacatatattcatcatatctttaaatgttcatgtaaaagttcagcaatgtgtgtatatatacagatatatatgtcataaaataaaatatatattatatattattacgtaataaacaattagaggaatatggagtatgtttgccatattcttcaggctactttttttccacttagaatctgccgtgaaaaaaaatctgtttttctcagtgtgcttccatttttcctctgaaaattgcaataaaaaaatcctaaagtaatactatcttcttaaattgcagctaaatcataccagtgtttcttgaaagacacactttaaaaaatatacaagtagatctttcaggatatcaatgtttctgaaacaacaagagtggctttaagttatgctgaaatgctaaaacttagtatatcttaagctcctgactagatttaatttgaaatacttttataacaaagagcttctcagagtctatttggtgccttgctttcttctgatttttaattaaactgtatacatcacaagaagtcctgtaattctgtatatatttgtttctctatttaaaaattttactttttaattgaggaaagccattgatgactggaataagagagtttccatttttatgctgtcaaggttaatcattttggaagtcaggaggatatcttagtattgaatgccaaatagctttcaatgacatttatctcctagcataacattttttattgattatatgagtattcatattttagtgtttgctttttgaatgttacataagcagtattgaaaataaacttgataaatgtgtgctgaaagttctggtaccatttagaaataacacttatatgatatatttgattaaagtggttttaaattctaatagaaaatctgaaatccaaggatatctcttagtttttgttattgtatgtggaaaacaatacatattgctaaagtgaatatctaaaggatttttaatttgctaccaggtttcaaaaataaggaaaaaaatttcagttgtgccacattacaagttagtaaaataggaaaatcttagttcagaaaaactaaagaatgtaaggagagtttatattgtaatgtggcattgtattcatctaattaaatcttccattacccaatttcaatcacatttcaaagtcatgtattctttgaataaaattctctttcaatgaatgcaaaatgcactaactctatattactatcagaggagagataaattattgacaaaacaacccaaagagtgttatctccttgttaccctgtctacccctccctcccatagggcttgcacttgtgttagtaatgaagaagcatcagaattatgactgtgtcaaaagacaacagaccttaggcttctgtccatctacttcaatccattcatcttctcactttttctgtctattcggtaaaatatgaataaagtatgtagttcttcatttaaaagacatttggcctggattaagatataataagtggtcacaatagctttaaaactcctctgaatattttgttttgaatgtaattccagatacactcaacacggaaagcagtactcttagtattaaaacatgattgaatgtcctataaaatgttggcatgatgaatcaattttctcatgaaattgctttgataaaagtactccattttctgagtaacacattgttctgtaggtgtaaatcaatagaatgacaccagtagaggaaaagtggttacagtattagaagacagtaatctgcttcgtaaggctgagctgtacaattgtgaactgtcagactgctttccatttcagattagttttgccttctaaagtaatgcttcataaattttttaaaattatcatgacaagtaaaagaaaaagcatttatatagcttgaattatctaagcaatagaagaatgaaatagaaaatatcaaattttatttcatggcactattcagtattagtaatctctaatatctctccaactatcactttaataattttctttgaagccttgattagactttgtctgttgtttcacagtagtgcatgtgtgtatgtgtgtgtgtttgtgtgtgtgggtgtgtgtgtgtgtgtgaaataatagagcatttagcttatcatggattcatggattagatatgggaaactttgagttctatgcttggttctgtaacttagtgtttaatatttaagaaaacatttaacactttgaacagtttcctggtattaaaaatatgtaccatcttataccctagaattgttattataagcacaacagtaatttaagttccttgtcttacatttaatttttttatttaattttactttacttttcaacttaaaaaaatctcagctggggcatggtggctcatgcttgtaatcctagcactttgggacgctgaagcagacagatcgtttgaggccaggagttggagaccagcctggctaacatggtgaaaccctatctctactaaaaatacaaaaataggtgtggtggtgcatgcctgtaaatccagctactcaggaggctgaggcaggagaatcacttgaacccaggaggtggaggttgcaatgagccaagatcgtgccactgcaccccagcctgggtgacagagcaagactgtgtctcaaaataaataaataaataaataacagaaaagaaaagaaatttaaaaaagaaaaaaatctcaaatggctacaatatagagagaaaattattattaatctcatgtgccaatcacccagctttaatacttctcaacttacagcaaattttgtttgccaaacaccccctctaatgtctagtctctagataattgtgaatcaaatctcacacagtaagacattgtatctgtaaacatgttagtactttgtatctataaacatgttagtgaatgttagttacactaaacatgttagtgtaaacaaaaagaaattgtttttatcagtttccattattgcaaaaccattagtatattttcgaataatggttccttaatttatcaaatattcagtcaaaatatctgcagctgtcttttaaaaatcatactgagtcacaatttatataagataaagtcactaaacttttaaaagtaactttgaaaatatatagggtcttataatcaccaccaccactaggtattgtgttagcttgtagattgtccattgatattctttatcagtttgaggaaatttccttttatttctaatttgctgtatcttcttctcatgaatcagggttaaattttgtcaaatgctttttctttatctgttgcaaggatctcatgtattttctggtttattttgtttatatagtaaattacattaatcttttttaaatattaaagcattcctgagataaaccatcttaataatcatgtattattttttatatagtgttaaatttgaattactaatattttgcttaaaatatttagattggtagtcataaaatatattgatatattatttcttgtagtgtctgttaaatttaggtattagggttactctagttttataaaatgaattggaaagtatttccaatttttctatttttttgaggaaatttgtatagatgttatttttttctttacttatatgagtttatattaattacttgagacaattcatccttgaaacaatctaattctttccttcattctgtcgggctgaaaaggcatgatacctttcctctttatcctaagagtcacagccgacacttctataacaaaagataggctaacaagagaaaagcataacaatttaatcacagctttacgtgacatgggaaccttcagaatgaatacccaaagacacaaggaaaatgattcatttttatgtttaagttcaatgaagaatggacagccatgtagaaatatgatcggacaagaagggtatgatcaaatgctagcagactgaggtgagaaaactcaaccaggcctgtgtggtcagattctttttggattctgtgtgtcggtatggggcaggatctctatgaaatgagggacttatgacctactgtagtacaagggtaggatagaaaatttcttcacggccagctcctagacagagaggtgggaaaagttacagtaatcattctaccttttacggctggctgtgaagaaaaggagttttagtttctatcactcacattggggaagaggaattgtattttttatggcttgcctccagggagaatgaggggccagagataggaggacaggagaaagtcagggagaaactttgcttctgaggctgcttctgaggtcttcacttcggggtattgttttctgagcaccagtacattccactaaatccccatttatctttctttttgtgtgtacacaatcacaaacatgtatatatatagttgttccaacttcatttattgaagagcaccttttcctcatgtaattgcctttacacctttgtcaaaaattaagtaagtataatgtgtgagctattttggtttcttttcattttcctatacattttagaattagtttgagaatttcaacaaaaacttatgttaaaattttgaatgggattttactgtattatagataagtcagggtagaatttatatcataattgtaatgagttttgctattgttaaatatggcaagcatacaataacttatttaggttctttaattctggcatcagtttattagttttcagtgtagagatcttgtacatattttagtaaatgtatttcatgtttattgttatgaaattgttttatgtttaatgatttaatttttaaaataatgttaggctgcaaaaaagttacaaaatagtacagagagttcctatagaaccttgaccaagcttccccaaatgttaacattttaaatacccataatagttatgaaaactgacattgatacattattaattaatctacagatctttttcaaatttctgcaactgtattaataaactctcttctaaaccagggtcaaatcctggatcacacattacatttgatgaccagatttccttgttgagagttaatattagatattaccccagtcttgctttctcttgctttaactttatgtatttgaggagtattggcctgttgttttttagcatgtccctcaatttgggtttatttgatattgtctcatgattaaattctggttataaatgttgggagggagattataatagtgacatttgcccttctcagtaatgctaactttgatcacttggttaaagtgacattttattccactgtaaagttactatttattccctatgaaactaattaatattcttgtaggaagagtttttgaaactatgtaaatattgtaatcctcattgtatcttagcccactaattttagcatttgtttcatgtttttgcctgaaacagtgatttaatgtaaatcttgccaagtgataattttcaatttcaattagtttcttccatatttattaaccagaaatctcctctaaggaagaactttcccttgtttatttgttaacttggtttttttttttcaattatttatgtcagtgtggaatcatggaaatttattttatttattccatagattataatctaaaactatttttatttgtttctccaatgtccccccatatggccattaagaggtcctccaagtgtactcccatgttctcttgacatgcctcgtcagtttttcaacaagttctttatttctggccccacaagatattccaggctggcactggacttttttctgcactgagtacttaatatgtttctgctgctgttacaaatctgcagttgatttaattttaatttctattttttccttcctagtatacagaaatacaattgttctttgtattctctgtacttactctggtcatttcttagttctaataactttttgtggaacttttaatatattctacatatatgagcctgttgtgtgtgtctctgaattgggatccagataaagtccatatattgcaaataactgatatgtctcttaaatatttttaatctagttttcctttttatcttggttatttaggaggcttggaaattttcggttgttaaaaaaaaacagttaatttatcttgtagaattttgaagtctagatttgcatactgtatactatgacattgtttaacatgttcaattgtccttgtattacatagtatgtcagttagatctataaaccaattagatatttttgcaagactattatctgtttttctgtactattatcaaaaatcataaaatgtttttgatattgtagcctatacttatatttccttacttgtttgacagcacaaattgtgatttaaagtttgttttttttttttttccttttggagacagggtctggctctgttgcccaggctggagtgcagtggtggcattacaactcactgcagcctctacctcccaggtttaagctatcctcccacctcagcctcctgagtagctggaactacaggcacatggcaccacacccagctttttttttgtattttttgtagaggttgttgccatgttgcccaggctgttctcaaactcttgggctcaagtgatcccctcgccttggcctcctaaagtgctgggatttcaagtgtgaagcactgcacccatcctaaaacatttttatcacaccaaaaagaaacccttccccacttagctgtcagtcctcaaactctcactcccctcagccctaagcaaccaggtatctacttccttatagatttgcctattctggaaatttcctacaaattaaatcatataatatgtggtcctttctgattagcttctttaattggaataatattttcatggttcatttatattgtagcatgcattcatacttcacttacttttaaccatgaatgatattctatgatatgggtataccacatttattcatcattagatggacatttgagttatttctactttttgactactataaatattgctgctatgatcctttctgtacaaattttagtgtagacatatattttcattttacttgggtaaactcggatttgttcggccatacagacactatgtttaaccatttgaggcactgtgaaactgctctctaaagtggctgtgccattctccattccctccagcactgtaggagaattctacttttccacatccttgctaatacttgttattatcttttccatgatagccatcttaacacgtgtgaggtgatatttcatcgtggatttgacttgcattttcctggtgactaaccactttattcttttgttcaacaagtatttgttgagcgcctaatatgcatcaggtgatattctttggagcttaggcttcgtcactgaactgcacagaaagagatccctactgccaagaagaatatattcctgggaagacagataataagccataaacctagcaagtacaaaggagagctgaataagggcattgagtgtggtatagtaaagagaggcaagctgcaatagggaactcaagataagcctccttcatagaaaaagtgatatttgagcaaaatcctgaaggggtgagccagatggttgtgtgaatattttggggaagagactcacaggcatagagaacagccaatacaaagacattatatgtgtttgatgcatttgaggcataatcctgatgcatttgtggctagcacagagagaacggaagagcataggggagcacagtagataatagttccagagaggtcacagggggtcaggccatatagggcactagagagcatttcaataacttttgaggcccttggaaaggattagatgtgcagacactcaaatctggatataggaaagatgccacttttacacattttttaacttttgtattactgttaaatttttgtattgaatttctgtttcattaatagcattctaatgaagaagatgaattttaaattgagacaagtttctaaagcatatatttaattttaaagattatgggtaaacagacttaatgataatccaaaattttttgcaagtctaaaaataaacaacattttccaaatgtcttattcaagaaattgatgagagtttgcttatgaggaagaaaattgttgggagttgaaggtgggaagtaatgtatgcataattattgtgattgttaaaaatgaattaaaactcacttggtatgtaaatcgtactgtaataaatttgattgaaaactagatgcatagttaagaagatgtgtatatgaaaatgcaaatagtcatgtagtcagaacccgtagtagtttttactttttatttttaaaatatttgccttttaatttgatatattaagaaatatcttaggatgacatcaacacatatttatgaaaattcaaatacagaacttactttcccaccattacatatacatttgataaatatttccatatttatcaaagtgactctgaggtggcctatggacatgtatgtaatttaattctatagtaaagtaaacattttagatataacctccagtcacaaagctttgtcactttcttaaagagacactgaaaaaaaattgttttttttttaaatttgtttgttttggttggcaatcatgagaatgttcagaacagtatgtttcaaacagatgtagggacgaaggtaagtctttccttgcccattgttaagttcatagctgagacccttataacaaaagacacagtaacaagagaacagcatataagtttattttatataacttttaagtgacattggagtcttcagaaataaacccaagaaatagtgaaatctgtgaatttttgtgctaagtttgatgacgaagtggatagttgtggggtaatatgatgggaggaccgtgtgggttatgatctaatagtaatatactagactgtggggggaacttagtaaggcctgtttattcagattcttctccatgtcactgtgcgacattcccttcctccacgtatagagtacattgtgggggggcctttcctccaagtatagggcagattagggtgtcctttcctccaagggcagattagagtcctatgacctacttcacaaaaaggctagataattcatttatggcttgtttcaggggagaaaggagagagaaggtcagagttgccttcctgcttctgctgttttctcaaatgccaaggttccatattttggggtaatgtgtcctgagccccgttggagacaccctgcctcccctcatgtatacaacaaacaaacacaattatttgatttccagaattgaaaatcttgtagatgatcagggtaacttcatctacttgtaacagctgcagttttaatattgtatgtgaatagaagcatcgggccagccaatgtccatatcgtatgacttgcttagataaaactctgcttttttatttacctcaaagttactaaatagacataacaacctttgtacccttagtagaacttttcagttgacatgccagcaaaaaataaattggaacacaaagatttctctaaagtagacattagttttacctctaagcatagatttgatgatgtgataaaatcagaagtttaaaaagcattaaatttacaaatgaaaatccattctaaaagttaatttttaagttgattttttagtttgcaacactttaaaaaataaagattcaaagaatatttaagattttaaagcttatttaacaggtctaaaccaacttatttaactcctacaatattcaggcaagaatattaataattatagctaacaattattaagagcttactgtgttgccatgccaagtgttttatgtatattatttaacattttccagaatcttatgacaaacacaattactaatatatactaataagaggtattgctagatatgaatccaaacctctgactctagcacccatgctaatagtcctaggctgtatttttttcaaatgtatggaatgtcaaattaaattggcctttccttgttattcatacatgcaaacacattgaaagacacatattcatgcgtatgtataactacaggatagtttttgacttgtaatctagcatctaaagtaatatttgttttttttttttcctgagcgtctgtgaatctcaatttgaaagattaatactggcatttcagaatggtgtggacatatgaggttttgatttaatatatcctcttttgactagctcttcactttttctactaaaatattaaaaatccaggagagttgtatttagacagcgagatccagagagtaaaatcattgaaatatttatcaaaggtatgagtttgatcctgggaagattatgtctatagttcttcagtaaaatacaaatgttggtaataccattccacaaagaaaagattttattttgtgtacatacgcaaataaagtacaaagcctagctagtagttcatatacatatacacacacacacacacacacacacacacacatacacacactttaaaagaagcagcagcagcagaagaaataaactcatacagcagaagaaaatgtttttttaatcactcatttatttactattctatcagtaaataattattgaaagttaagtatgttttaagcacttgggttacaaaaataaaaagatacaattactggtttcaaatatttcagtctttccagagagactgagaaaataaaagctcttgtaatatcctctattagtgttctaatgaatgtatacaaaaactgttccggatatggagaggaaaaagaagccattttaccttgggcagctggaggaggattcccaaagaaaaacactgttgaattgactgtcaaaatgaatgtgtctgaaaggaattcaaagtagaaggaactcactaaaaatatatattcatcttttaaagtaaaatactcttcattgacacaaatcagcttatgaatcacaaactgtttaaatgtacttaattcaaaatttttgataagctataaatttaataattgcagtcatacataacggcaagaaaataaaaatataaaacttgcccagattccatttagcagtggctataacacctccataatctcacagtttatatttattctcatgagtcctctgggtgacctcaggcaatattttaccttttctctccttagaaagggagcagaggtgagccattgatttttcactatcttattttacagattaggagactgagtcctaagaatcagaaagagttatccaaagaaaaatgaaaaataatgagtctcagaatagagttctttccactactactctctggtgtatcttccatatcttttctctatcctccttcttctgtttcttcctccaggggcttccccatagaaaaactggctctctttcccgtcggcttctggttgagttagataaatagattagaaagggtctacataaaatcaaagggattcattctttaaaatccctctctgaaggatctgcctctttaatgaaagctggtggctcttctcaatgtggctctcttctctaggcttctgaaaacctctccagctcattggcctttcagacctaaggatgtacagctccagggtcctctaccatcacttatggcgtccctatactctccaaaaatccttgttaagagtcccttgattcagccctcctcaaagtattgtaatttgagcacactagctatttcttgcttcaggcttaactgatacaatcttcctaaagacttgagggtatactgagaagctcagagtaatagaaattaggcaatcatgttttctatttgaaggtagttatctagagggttgatttcactattagaagagtttccttagagattattagaagaaatagaatattcaatattaaggaactttattgcatgtgtgtgtgtgtgtgtgtgtgtgtgttaagagcacaatagacacaataaaggaatattttagatcaatgctttgaatgttgttctttacaaatttgggtagacactagtgtcatttaggcatcttgtatttgttctacaaactccctcaggtaagttaaatataataatctattttatattaaatattttattttagttttttggttttaagttactgatttaccacattaccaatttaccacatttctttgaaatcagtaacattctatcatacccagccatggcagggaccaagctgtcatttctcataatgattgtttataatcttgtcaatgaggcaatcagttggggagtttgggaagcctcccagttcctggtttttaaatcgtttggtttaacatttagcatctgggtgttggaaatatgttgtctggtttatgaaactgaatatttttacattcaggtttattttttactggtttgagtgctttcaccaacaaggcaccagtgaagttccaagatgcaaagggcatgtgactagcgactatgaattcctgaaaaaagaaaattcaagtctgtatgacaatagatatagacatagtttatctatgacgacacacttaagaataagtagctgtgtcaagaaatgtgttttgtgaagaaacatgaattaccattttgaaacatgaacccatttctaggatcaagctaaaagtgccttaagattatgccataatggtgcattaccatatagcatggtagagtgcaatttgtgatgacaaggcttctgcgctctacataaagactctgactaggcttgtaaggggcagcattcatgaacttttaatagaagtgttttaacatggaaattgaaacaggtaatttaatggatttcattttctgttccatatgaaatttaatgaaaaacgagatggcaggagttagctcagttcttagtgaaacttgttgtaccctacaaaggcaacgtgcataattatggactaaatttaatatttttttctcctctctctatgtcagcagaagtaaaaactaaactattagacttagtgttaaagttaataaaaggttgttataatggcttctggtgataacattgaaaaactgtcatttttcataagaatatccataataactgtttttatttatgtcaagtatcaacattttcattcttaatgattcaaaaatgtttgttgatggtctatttcattagtctgtaatacgatactagggaaatcaaagaaatgactatcttccctaacttgaaggggcatcaatttaattataaaaatagcacatatacacctgctaataaatcaaaaaagagtttctctagtccctgtcaccaagtcaaaattaattcaaatcttggatgcttcgagtctgacgttgtatcagattgcttagtaaatctgtgaccttgagctaacttcttcaagcttcagtcattaccagtaaaatgtggtttaaaatagtatctatcacaggggttattatgtagattaaattatgtattgcacatgaaatacatatacttcctgtgcattaaaagcatccatgaaatgttagctcttactgataactaaaaaggatgaaaactcatgaattctggtaaaatgtgatttagggagtctttcatttgtacatactgctgtattaattgggttcttcacttttctctcttactcaaaatatcagaagtattatactttggatgaatgttctggatcttgactggtctctctgaaactcttttggttcttatctaagctagtctgtacagcagaggcagaatctttaaaactacaaaccaataatgacattaacctgctttaaaaatgttaatagctgaccgctgctttcagaataaaactcagaatcacaaaccatagcctgtagaaaggaatgtgttatatattagcccttcctgcctttctcatcaggcctgtgtccttctcagatgtctgagggagagtcatactcacttagcctttgttcagtttcccagcacttcatgctccctgttgttgttggattttgcaccaaatattccctctgtcaaagtcctttcttcccagtccccctcctctttgcttatttgcccttccctttcccaggacaatcttagatggcataccagagcagttattatttttacactctcatagcaagcaatctgtccttcatactgattttaaaaatatatatttactaaaatttaaagcagctgtaaatctcaaagtgtggcttttagctcaggctgctataataaaatgccatagactgggtggcttaaacaacagagatttatttctcacaattctgggggctggaaaatgtgagttcaaggtgtcagcatgatgagggtctagtgatggctttaccgcttcctggctttcagacagctgctttcttgctgtgtcctcacatgacagagagaaagggctctcatttctcttcctctacttataaggacattaattacatcactggggccccacctacatgactttgtctaagcctaattacctctaaaggccccacctccaattatcatcatactggggcttcaacacctgaatttgcgggaaggggacacaaacactcagttcataatactattacagatgactttttatattcctgaaatactgactaggaaatgacatgctatctctaaagaaatccaaacgagaaatactatatttaatctgtgtacttactaggtattagcagtcgtttcagatttccaataggataaacttctgcattagttttccaagcctccagtgcgtgtttgtttgcatgtgtgtgtgtgtttggaggactgacagtgatgtgaaaatcactgttttacagcagtgtgtcctgcacttacattgataaaatttttctaagcacaagagaacttaagaaagaactctcttgtcattttgtaaaatgggatgttctaatatattacagataaaggtagacattttcctttcctctctaaaaaggttgaagtttggggatatttgcttttttcaggttaaaattttattttactcacaacttagggtactttgtagtgctccagcgcctgtcactttgagtactgtgctctttcccctaggaggaaaagacaaagaagttggacaaaccatctgcatagcagtgggtaatgaagtgaagcgcttagaaaagaaaacagatgaagaaaccccccagttcaatgccaaaatactcctatggggttgcaattttcaatccaggtttttaaaagtcttgagtgcagccaggtcatttgagcaggtgcagtgcaaaggcctcaaaactcacaacgactcacgttcttactcataagcaggagttgaacaatgagaacacatggacacaaggaggggaacatcacatatcggggcccgtcagagggtgggggctaggggagggagagtgttaggagaaatacctaatctaggtgacgggttgatgggtgcagcaagccaccatggcacgtgtatacctatgtaacaaaactgcacgttctgcacatgtaccccggaacttaaagtattgaaaaaaaaaacaacaacaactcacaacactacagccgatgctaggccccgctgtatgcttgcagagctaatgcaaggccgccaccatctccccatgatctctgtgtgaatttgggaaactaatgggaactaaaagggacattgaaactataccctttgagagtaagtagcaaaggcgtacctagcgtgttgacagctgtttcatttactgggcagcaccagatgcaaagtagggaaaacaaaacataaacagtgacagtaaaaatagtattttactttgctcctgtccttctatgtgctgctactcaactttccattactgcttttcttttctcgtctccatgacagtgatacaatgagaaagttgcagtgagttggacagataggctgtagtgggcttacaccattttggctggcagcagaagtcccatcaactcacttttaattgaatacaaaagcatacatttgataccaatttgtaaggtagaaaaggaaagaaatataaatttctagtccaaattggtgaatacttatatatccgtgtggcaagattattattttgtttattttcccacttttctttattttaaaattctcagctacccaaagtgagtccctgaatcagcatcattggcatctggaagcttctgagaaatgcggaatctcagggtcaatacctgacctagtgaatccaagtctgaatttcaacaacatctcaaagtgattcagatgcatgttgaagtttgataaatattgattcataaaacagaaattacttatatattctgaaaaaaaatggaagtgattgctcatatgggagggtaattagcagttaatttagaatgaatgtggcagggttttgggaaatcagaaagataatgttgttaattacctcacaataatttacagtttttttgtttttgtttgtttgtttgtgttggtttttttgagacagagtcttgctctgtcacccaggctggagtgcggtggcatgatcttggctcactgcaacctttgcctcccgggttcaagcgattttcctgccttagcctcctgagtagctgggattacaggcacgcacaaccatgcccggctaattttttgtgttattagtagagacggggatttcaccatgttggccaggctggtcacgaactcttgacctcaggtgatctgcctaccttggcctcctaaaatgcttggattacaggcatgagccaccacgcctgacaatttatattttgatagaggatgagggagagagatgtggtattcttttaattatcatattccttaaattatctgttttctccaaactatgccaatttcagtagttgctaaatgttttaatgttagagtatattaattcctaaggaggcgatgtgtggcaaaaggagggggttgggatatggagatgaaataagaagatggttaacaatgtgaacactgggtgcaactttgccactttggccaggttacctaatttctctgtgtttaaactttctcatacatgtaaagaagattatgtcttcctcacagtttattagtaaaacacttaaattagtaactggcatgtaagcttgatacatttgctgttataatttggagttaaaccttatatcaagttccagatcctacattaatgaggtgtatcactgttggcaagttgcaaaatctctccaagcccgtctcttcatatctgaatacaatttgcaataatacttgcctacctaaatgatcttaagaattaaatgaatactatgtataagtacttactaaatactttgtataattctcttattggctagaatcattatatgcattaatttttgtttattttgctaaatatttatttcttgattaccattcctttgcagtaatcattcctgtaaaagtttcttttttttttttttcctgattacagggaaaagtaacccagtgagtcctgtttggaatattaatactgaggccaaataatcaaatcgatacctttatttaaaaaattatatttaggctatttaatttgattttaaaatacaaaaaattagaacaactctgcaagcggaaatcacaaaagtctatagttctaaagtggatactgattaccaagctctcttggcttggaatttggtaaggcagaaggcccatttcttcattctaagtatgccacagtgcctccactcatataatttatccataaaaggaaggaattacttcctatattacataacaggaaggcacagatttgttccaaatgaaaccaggggctggttttctgaaaaaaaaattaataaactagatagaccactggctaaattaataaagaagaagtgagaaaagatccaaataaacaattagaaacgagaaaggagatattaccactgaccccacagaaatagaaataaccatcagagaatattatgagcacctctgtgcacacacactagaaaatcgagaataaatagattaattcctggacacatataccctcccaagattgagccaggaaaaaaattgaatccctgagcagaccaataattagctctgaaatggaaaagtaataaatagcccaccaaccaaaaaaaacccaggaccagatgattcacagccaaagtctaccaaatgtataaaaataagctggtaccattcctgctgaaattagtacaaaaaaattgaggaggagggaatcttcaacaactcattccatgaggccagcatcatcctgataccaaaacctggtagagatacaacaaataaagaaaacttcggaccaatatccttgatgaacattgatagcaaaagttctcaagaaaatactagcaaactgaatccagcagcacatcaaaaagcttatcctacaatcaagtaggctttatccctcggatgcaagcttggttcaacatatgcaaatcaataaaggtgattcatcacatacacagaactaaatacaaaaaaaacacatgattatctcaatagatgcaaaaaaggcttttgataaaattcaacaccccaaacctcaataaaccaggtattaaaggaacatatctcaaaataataagaaccatctatgacaaatccacagccaacatcatactgaataggcaaaagctggaagcattccgattgaaaatcagcacaaggcaagtgatatggtttggctgtgtctccacccaaatctcattttgaaatgtagttcccataatccccatgtgtcacgggagggaccctgtgggaggtacttgaatcatgaggatggttacctccatgctgttctcatgatagtgagtgagttatcacaagaactgatggttttataagaggtttcccccttctttgctctgcacttctcctcgctgctgccatattaagaagaacgtgtttgctaccccttctgccattattgtaagtttcctgaggcctccacagccatgctgaactgtgggtcaattaaaccttttttcctttataagttacccagtctcaggtatgtctttattagcagcataagaatgtactaatacaacaaggatgccctctctcaccaacccttttcaatatagtattggaagtcctgggcagagcaatcaggcaagagaaagaaagaaggggcatccaagtgaaagaggaaatcaaaatatccttgtttgcagacaatatgattctatatctagagaacaccatagtctcagcccaaaagcttcttaagctgataaacaatttcagcaaagtcccaggatacaaaaaccaatgtacacaaattaccaggattcctgtacactaacaactaccaaaccaacaaccaaatcagagatgcagtcccattcacaattgcaacagacacacacacacacacacacacacacacacacacaacctaataatacagctaaccagtgaggtgaaagatctctgcaaggagtactacaaaacactgctcaatgaagtcggaggtgacacaagtaaatggaaaaacattccatgctcatggatacgaataatcaatattttaaaaatggccatactacctaaagcaatttatagattaaatactattctggttaaactaccattgaaattcttcctagagctagaaaaaaaaggttttaaaattcatatgaaaccaaaaaaatgcccaaatagtcaaggtgtcctaatcacacaaactgacttcaaactgtactacagggctacagtaaccaaacagcaagatactcatacaaaaactgacgtatagaccaatgcaacagaatagagattccagaaataaggctgcatacctacaactgtctggtgttcaacaaagctgacaaaaacaagcaaaggggaaaggactctattcaataaatggtgctgggataaatagctagccatatgcagaagattgaaactgaacccctttcttaaaccatatacaaaaactgactcaaaatgcattaaataattaaatgtaaaactcaaaactataaaaaccctggaagacaagctaggcaataccattctagacataggaacaggcaaagattttatgacaaaggcaccaaaagcaattgcaacaaaagcaaaaattgacaaatgtaatagaattaaactaaagagctctccacagccatagaaactatcggcagggtaaacagaccacctacagaatggaagaaaaattttgcaaactatgagtccgacaaaggactaatacctagcattaataagaaacttaaatttacaaaaaaaaaaaactcataaaaatgtgggcaaaggacataaacagacacttttctaaagaagacatatatgcagtgaaaaaacatatgaaaaaaagctcaacatgactgatcattagagaaatgcaaatcaaaaccacgatgagataccatctcacaccagtcagaatggctattattaaaaagtcaataagtaacagatgctgccaaggttgtagagaaaaagaaaaatgttttcaaccattgtggaaaacagtgtgatgatttctcaaaggcctaaaaatagagataccattcgacccagcagtcccattactgggtatatacccaaaggaatataaatcattctattgtaaagatacatgcacatggatgttaattacagccctactcacaatagcaaagacatggaatcgacctaatgcccatcaatggtagactgggtaaagaagatgtgctgtatttataccatggaataccatgcaatcataaaaaataacaagatcttgtcctttgtagaaatatggatggagctagaggacattatctttagcaaactaatgcagaaacagaaaaccaattatcacatgttctcacttataattggaagctaaatgatgagaacacgtggacatatagaggagaacaatagacactgggacccactggagggcagagggtgagaggagcgagaggatcaggaaaaataatgaaaataatcagtgggtactaaatccctgagggatgaaacaatctgtacagtgaacccctgtgatacaaatttacctgtataacaaacttgcacatatatccctgaacttaaaagttaatacccctgtgatacaaatttacctatataacaaacctgaacatatacccctgaatttaaaagttaatacccctgtgatacaaatttacctacataacaaacctgcacatatgccctgaactcaaaagttaatacccctgtgatacaaatttacctatataacaaacctgcacatatacccctgaacttaaaagttattaaaggaatataaatgtttttattaccactgaattgtgcacttaaagattgtaaagatgataaatgacacatatatattatacttcttcttctccatacgtctctttatttaggattttgttaatttctcttagcaatgttttatagttttcagattcttgtacatgttttcatatttaaatattttatatttgtagaggctattgtaaatagttatttcctatttcaatttccaattgttcatagctagtatacagaaatacaattgattttttaataacagcctggtatcctgcaattttactaaattaatttattcattctagcagcatttgttgtagattctgttaaatgtttttttatgtagaagatttagtcacctgcaaataaatacagtttgacttctcttttcccatgtagattctttttattttatttatttatttatttttgccttattatactagttagaaacgccaggataatgttaaatagaagtagtgagagtgatcacccctgttttgtgcctcgttatatttctattcatattttttgagtttttgtcaataatagaagccatatcttatcaaatggtttttctgcatgtattgggacatgtatatgagttttcttctttagtcagctattatggtgaattatgctgaatgattttttaatattgaatcaggttgtattcctgggacaaacctaattttatcatgatgtattaaccattttattgacataaaaaaacccagtttttagttttactgatttcgctctattgtttttctgtcttctatttttttaaatttcccttctttagtttcttccttttattactttaagttgcttttcttctagtttcttaaagtgaaagcaaaagtcattgatttgagaattttcttcctttttatattttccttgcatagtactttgctggtatacatttttatattctcataaaaaattattgacagttaagctagtttgaaacagttttctcctttcaggcttggcttttacgatttgttagagaagactagaacaaagtttatttagtctaggttaatagttccccactgctaaggcagaccctgcggagtactcagagtctcatgaattagaatttgaattaaatatttgaatctggttggtgttaacaggcatgatttctggacccgtgtgaacttggggactctcctctctaattctttcctgtggttctttcaccagcctggaggagttggctcgcacacatgtgcacgcacttatcagtacttgactgaatgctccaggatgactcttttcagatacccacagttccctctgctgaactgtcaactcttgaccctctgcccagtgagatatagccacccataactttcacttcccgtaacttttattcatggagttctctgggctctgtttctgtcctgtgtgtgctgctacctataatctctctctggtaaacggtggatgccatgggatgcacccagtatttcctattacccaggaatcactgcctttcatttcctgatgtgcaatgtgttgaaaagtgttgtttactatattttgctgttgtgtagttgttttagatgaaaagatcaatctagtcccttttactccatcttgatctgagtgaaagtatggtctttacttctaaacttttattctcagacatgtgcaactagtttagtcactcatgcggtgaacttcctgaagaaagaacctagatcttatggttctttatatgccatatgtagttctgggaacttgatgagtatctaacatatatctggtgatttcttactaaaggttaataaatgttgataatcttcgtctaatattttggcttgttgatttttgtttataatacaaaacaatacacttgttatacacattgaataattaaataaaagtatacttgaaatattatgtaaacacactgcaagcactaacaatgactacaacattttaaataaaatataaagcatattatcataattcatttagtaaaattttatttttatctgatgatttctgttaattaaatccaactaatcctaatcttttatttttgaagcaaaaataggtgtggacgtataaatgtctatatattcatcataaaaatacagtattttaatttatttcaggtgatagttaaatctgggccagggactttcctcagtttggctgtttatgacaattatatattctggtcggactggggaagaagagctatactgcggtccaacaagtacacaggaggagatacaaaaattcttcgttccgatattccacatcagccaatgggaatcatagctgttgccaatgacaccaatagctgtaagttataatagaaagcaaatgtgttttttcattgtataatctctgatctctaaaaatgtatatatgttttctagtaatagttggatttgctttttcttttaaaaaatattattttttgttactatgactgtggattttgtttttttctagttcttaggaatagtgttcaagatttggctgttcaaaatattgaaattatctgaaatattcaaggcaacttctatattgcataatttatcatcacaggagcagttcatttttaattatttcttctaaaaatcttatttcatcctcactcttcataacttcagattttcagatcaagttgtttccatgaaaattacacttgatagataaactttgcacctgggcttaacagttctttagtcaatgcagtgcttacaaaattacagtttgaagcatcaatgtggtttctagcagaactagttcatttgatgccgtggtatcaaatgtgttagaaagatttgattagtgttacatacttttgtaatgtacttagccttaggaatgcttagattttcaaaaatcctgaatgttcctttttaatgacatattattgagagattgaggcagtctaatagtttacgattaatatttatctaacatagaacaggaattcgatataaaatgttaccaatacaccctctttattgtaggtgaactttctccatgtgcattattgaatggaggctgccatgacttgtgccttttaactcccaatgggagagtgaattgttcctgcagaggggaccgaatattgctagaggacaacagatgtgtgagtaagtaaagggaattgaaatgtaatatgacaaatctgttccaaattccacacacatcactgaaattgtgttagtgtattcatgaagttatactctcttctaatattagaagcttagtcatgttatctctctgctctaaagaaaaccgagttcactgttctgcttagttataggaccatgtgctagttagtgataaccaaaatggtaacaaatgtttttaccctcctgttgtgcactagaaagtgctggggctagctagagaagtgtctgcacacaatgatcatctgaaaacttccagttgtgactttgtgaattcaatcaatagcaaaagtaattgaagctgaaataaactggtatacaggcagtatatcagtagccttgcagtaaaaccactcacagtccatcatagtatgtaaatgagagagaatggctcatgcagcttatgtgtaatcatttccaaactgttaattaagaatgcaacattgcagccttgcatggtgtttatacctcccaaaggcattacaaactttaattagcaccattacaatacacacttattaacagctaagtttccaaaactgtttccaaaataaatcagggttcaagtgtttcaatattgccatgaaaaatttgcaagcaaaatttaaaaaaggttaatttccttttaacgttaaggcaatttatgtataaggtaggagagaaatatcttgttggaaatcagtgaaatcattctcaggatgtgtcagatttgatacattttttgtctctcctcacctattaatatatcctcatctcatatcttttcattcagaaaattaacagagttggatatgtctacataataaaaataagtatttttcatcttcatcttcagtcgatttttactctctttccactggaaggattttatctcttacctgctcttcaatgcaagtgcttgggcataattttctttagcttgaaaattcttataccatatacaaaataacatagacatattttctcactgtgaaagttgatactacaacccaaaaaggcacctcttagcaaaaaaagtaaaagttgatttatttaagactatgccaaagcaaatgagaaaatgatgcaattggtcaaaattttaaatgcagatggccaatttccatatttcgggccacaaattcccatatttctttgtcacttaacacttctctgaattgctcaggcaattgcttaaactctttcagtttgcctttgtggtttcagctgtaatggtctggatctgatgccatctgtaagcccggagtgttagccatgcgttagaatcactcatgtttctttcacaggtcacttcaggctagtagtgaagcaatgcctttagtcaaaatggcaaagcttatttctgttcggtggaggcctgtccttgctgcataataccttcaatacaactgtccctactaagcttctctctgttgacgagaggaaatgaatcaggaagaaaactgacatcttaaacaagcacaattgtattcacatggaactgtagagtgatattggatttcccagagctcacaatctgttgtagaggcagacgacgtccattgtgcattcatattgaaatcctgtagcccagcagagagattagaaagtaactcttggctcctccttgtcaaatttatctttaggaacatgagaatgtttctggcacatctgtgtcctcatctaagtgattttacccagagtggttcatgaatgttaatggcagcattaaaggggtgaaaggccatgtactaacacctacctgagggcaaaggagggaaaaccatttgttgtcataactgttgacaagaagattaggcagtccccttgcttacaacattgctaatcttattgtaatccataaaagaaatagatacagtaaatataattagatgaagtaattgctgtgcaagagaataagggcagctgaaccatgatgtttccagaaagaagcagaaaacactcaatactatttcatcaaatgaacatacctgaggaagaattgtattcatacaatgtttgtttttgcataatgtaaaaaacatatttatctttgaatagtttttgtcttttccccaaaggcactaagattataaaagattaaaaatggacttttccatcctaacaattattttttcattggaaaatacacagtaaataatatacacttaaaataggaaaaataagtcaggaatctcaatagactttcaagaagtggctgaattttgttctatgctaagatgattgcatttagcaatattagcacccttttattttttttaatttaatattgttctgttttaaattatttgctaccttgtcttaaatgacattctgccttagctaatgactgaacaatgaagtttagactgcaccaagagaaaagaaatatatctttggaacatgttgttatcatcgagagagttaaattagaagtcaaataaataaggtgaattgactcgggaacagaaaaccaaataccacgtgttctaatttataactgggagctaaacattcgatgctcatggacataaagatggcaaccatggacacctggatctgttagagtggggagagaaagacggtggacaaaggttgaaaaattaactattggtactatgctcagtacccgggtgacagaatcaatcatatcttaaacctcagtatcatgtagtaaacccatgtaacaaacctgcacatgtacctgctgaatctaaaataaaggttgacataataaataaaaaagaagccttagatagaccctctactaaattaattaaattctaggaataataaataaataaaaccttggaaacttcaaatagtattagtggctgtttaattgaatattcctgaactaaagctcaaaaattaatactaaattatagaattaagctatattctttcattagcagagatgaatgaattctacttacctccaacataattaatacaactggatttaaacgtacaattattcagcaagcaatggggtgagtacgtacatgcaagcagacagtataccccaaaaattggatcccaaaatttgctagtaaatctattactgaataataaaaataagtccattgtcctcaatagagacccttcaaaatagggatcacatattgccattataaggatgaaactcacctgtagaaaataactttttgtactttcagactcttggcttacaaactaggacaaatcacctaaaaactcaaactcttaatttttaataaaaattctgagatttagaaatgtgactttctgacagcggtcatctggagtccatagcatcaggtacacatgctttccacttgaccattgtcctcctgcacctcatcccactgattcctgtacatttcatggagtaggtgctcatcatgtatggcagcaagaaagagtctgctcccgggaacctcccacacatggatgggacaagtgacttattttaacaattctaatatttccaaacaatataacttgctactgaggtttcatcagaagatagttagggaggaagaccagacggtggggaaaagtccggattgttcatttgactgagatgattcacatcaaacattcaaaaatgggtactctatgcactgaaaaatagtagtatattgaaaaatatataatagatcccagtaagaaaacacaaaaacactttcagtatgtacagagttcatttaactggctgttttaaaaaacaataataataattattatattattattatatattatattatatattcttatatataataataattattattttgatacagagtctcaccctgttgcccaggctggagtgcagtggcaagatctccactcactacaacctctgcctcccgggttcaaacaattctcctgcctcaacctcccaagtagctgggactacaggcgcgtgccaccatgcctggctaattttttgtatttttagtagacggggtttcaccatgttatctaggatggtctcaatctcctgacctcatgatctacccacctcagcctccaaaagtgctgagattacaggcgtgagccaccgcgcctggccaaaaaattatttcttaagatcttaatttcataaagaaatgtcataaaccattgctctttaattgtacattttgataaattttagtttatctttataattaaaattaagaaaaataattgtagtggtgtcaaaaaatatttgccattgcacaaaagtattgactttttttttttttcttgcagctaaaaattcctcctgcaacgcttattcggagtttgaatgtggaaatggtgagtgcattgactaccagctcacctgtgatggcattcctcactgtaaagataaatcagatgaaaaactgctctactgtggtaagtgtccaatatgggtttgctcgtttcagataaagttttctgattctttacagtttttggtttgcttgtctcggtgtggtttacgtggataatttatttaatgtctctcattaacctgtatctaaggcaattgatgtggctttgcttgtgttaaaatgaggtactttatctcctgtttgatagccatgatattcactaaataatttcctcatggttttctatccacaaaatagcctttttttttttttttttttttttttttttttaaagagacggggtctcattgtgttgcccagactggtctcaaactcctgagctcaagcaatcctcccacttcagcctcacagagtgctaggataacagcactccgtgaatgtgaataaaaatattcacattctgagcaccacacccagccagaatgtgaatatttttcaaagtagtagctaatcttttgaacccccgacttattcatctttagcaataggttttaggcttactttctttaaaatgtaactcagaaacatcgtgatttttggatatggacaggcttactctgaagcagagtttcaccaacagacaatagcacatcgttggcttgttatcaaagtcttgtcgattctatttctgtctccaggattagcatgggggctagtgtcctttggtacaaaggctcattgccttaggcatggtccacatcaaacatagaattgcaccagctatgcttctcttggcaacaccaagtgatagtcaacatctaccctcaggagtagagattaacttttatactctagtaagcaactgagatttcccttcattgcaacaatattttttcctggaaatatgtctttgcatgatcattgataatcattgtatatttgatccagatttttaaaaaattgtcctgatttatttttaatcctagaaatccaatagcattgggatcgtgtactatgcaaaatttaggaatctacatctgaaactgcctcattttatatctgcttttctcctctattccattatccgggtaataattacacctaaataattaaagaaaagttagaataagagaaagacagaatctgtgagatccacagacatcttctcactcttttacgttacaagacaacacaccatcgtttaaaatgagagtctaatgtaatttgtccataattgatgtgtaaccaatgtcttaaagaatttgtctcaacatattcgctttaatgaatggctatattctataagatataaaaatattaaagcatataaattgtattgcaataaagtcacaggcttgcatttactataagttgacttgagattatatttcatgttatttttatctttgtagaagtcagatgatatttgtgtagagcaggagttggcaagcattttctgtaaaggttcagctggtaaatatgttaggttttgtggatcatatatgctttctgtcacatatcctctgttgtttattatttaccatcctttaaaaatgtaaaaactattcttagtcccagagccatacgaaaacagtctcacaggctagatctggcctatgggcaatagtttgccaatgccaggtgtagagtatgggctttggactcacacctgaggttaaatctttgttcccaaacctgctagtgtaattagcctagtttgcaaaccctagtgtgactagggtaagtaacataactcacttctctgtgttttggttttccactacgaaacaactagctcttatggtagtcgagagcatgaaaccagcaagtgtttatctacatatactcaatacagagcctggggcaaagctggcatttaatacgtggcagctattattattgtaagtggtagcttctgccccaaatcagagaatgtcaagaaactttcataatggtaaatagaactcagaaggtaattctttctcagggaattctgtagatattttaagataatttttaagagaaatttattgatatttagatgactccatgagacactgattcaggaatacgtgctttgttgctttatttccttattataaaatccttgcagatagatgcaaaggatataggaaatggatgttggtgtgtttttgttacatttgagttacatatttattgcttcagaattgaatatgtgatatatgtttatttctgtgctacttgacagaagtgccagaaacaataacgtgggtataacttgaaaagatctcccggaatgaatcactaaagttaaaacactaagtcaaaaagggcccttgctgaatgaactgctctttgacaacacataaacattctaatccagagctattatatggcacagcacttgttttatagatccataatccagtcattatgaatgaaatattatctgtgattttcattttgtacaaatatttctatatgatctctggttgtgtgtttctacttttatttataagaaaacagaagctgtcgaagaggcttcaagccatgctataatcgccgctgcattcctcatggcaagttatgtgatggagaaaatgactgcggagacaactctgatgaattagattgtaaaggtaaatacttgttccatcaatctcagaatattggtgtgctaagtgtttcctgaacttttccaacattcgtttctgagagctctgtggcatataacacctagtaacatctatggatcacactttggtaaatgctgttggaatggagttgctaaagttacttgaaaattctgactgtgttctccatttctgttttctactcctttcctccccttaaaactcttataatttctcgcctcttcagttccaccttcctggattcggacatttctaccagaatgtgtaatattgaattttctgttccaaaaatgttcccctttattccttagttctctgttttactcatgatcacattttcctaaccactggacgggaaactttggtgttctccttaatttctccttcccacatatccagtcatcaacaaatcttccagttctttgaaatatcttccatttcaatccactttaagcctgggctaacagagtatgcctttacctggtttccctgcctatactttttccagttcatccctatgtcatcagtcatgctaatactgtttaacattttccaaaagtgactattaggatagatgatgaagccaaactacctgagttagaactgctgccccaacactttactgtctaaatttggatatcacacttaactattctgtgtctcagtttcccaaatagcaaggtagaaaaaataattaaataagaaaaacaatattaaataaggttagaacagtatttggcaatagtgtatgctatgttagcactggcttttatatatatatgtatattgcattgataaagaaacttttaatggaataccaatgtttgctgaataaatgataagttttagtctgacattgaaagccttcttaaatctggaccccacagatatttccaaagcattatcactttagagacttgccattcaatgaacacactttattgagtgcaatgcattaaggttcgagacgcaaaattcatgagacacgtgcctgtactcaagaatatcaaattctaactctaagacagccatgtaaacagatcgagatatatatgtgtatatatatatatatatatcttgtgctgtgattgcacacgtaagaacacccatatgtcttttttgttttttggcttgcaagtatcctcaaaggtttcataggctatactgaatttaaactgagtcttaaactaaaaataaggtagaatgaatgaaacaaaagagaattccaagtagagggactaccattgaaactgaaagtaatttgatatagtcacagacagattacatataagagagtggtaaaaacagaagggccaggcgtggtggctcatgcctgtaatcccagcactttgggaggctgaggtgggcatatcacaaggtcaagagattgagaccatcctggtcaacatggtgaaaccccatctcgactaaaaatacaaaaattagccaggcgtggttgcactcgcctgtagtcccagctactcgggatgctgaggcaggagaatcgcttgaacccgagaggtgaaggttgcagtgagttgagatcacatcactgcactccagcttggtgatagagtgagactccataccccccaccccccaaaaaaaccaaaacaaacaaacaaacaaaaaacagagaaggtatgggaaggagccagggcatgaaggtgcattttgtgccatgtgaagtaactcaaactttttcttgtagtcactagaaagtcactaaaggtttaaagcaggccaaatataatcaaatttacatttcaaaaaggaatgaaaagaataggattgtgttaacgaaacctataataataagatttgtttgtgtgggaatggggataagacaataaggatggtttgcattttgagattggagcacttgaggaaatctaaatgaagctgtttcacaggcatgtagataggtagagatttggaactcaggtaatagatgttgatcagaagtattgatttggggctcattaaggagaaaaactcagaggaagtgtggagtaatgattgcatgagtagagtgcatcaaaattacttatttaaataacaaattatatatgaaaaggtgaagtagcctgcaggactaatagagggatatgcttaagaaattattttctcaagaaaggaggatcattcagcattttcaagtgctacagaaagggtaagagggcaggcatgaactggaggtatccgtcatatttggccaatagtagatactcgcttgatgacattcatgtgtgtcagttcagtggaacagtagaggaaagcaagagcacgttggttgaagacagaaaatgggtggtaagggagtaaagacagtgaatgtaaacagtttttagaaaagattgatgtaaaggaaaggtatgaagtacagttgtgatgagaggactatgcagagttgaggaagagggcagaatgtgtgcaaattatttcatagctgtatggaatgttgggaagttactctgccatcttagacagtgtgactttggggaaacacttgcatagattatcatctaaggttgacactgtagtttaggaagagctaattacatttgccaattaagttacctagtacccataaaagattttaaaaagtcaaatatagtcagacactggaagtaagcggagagaaataaattagcatttggaagaaaggaggaaaagaaatgagaagacctagaaatagataggttctgtcaattatttgtaagcaggagaggaaaatataatataggcattaagccaggttaaaggtaaagctatcaagaaagaatgtgcaggaactgagcaataaatacagaaaatagattttaaggcaagattcatcaaaagaaactatgggaagatgatatgttactatgggttttctccagaaatgaaagtatattttcaaaagtggtaaatgaattagtgtgtttgggtttatgaaatataatacctcatgtatggtaggtgtttattaaattcttatgtggctggttgaagcagtaagtcttctaaaatataaatagattttattctgcctaatgatatcaataccagctgctgaataacaataaaataactcaaatagatatttcctcttttttagtcgaaactcttgatttctgtgttataactatctcagtcatactcttgggcgcagaacagtgcctttgcaaatgaagcttctcccttaacctttcttttatggtaaaattataacagttggatatcttaaaaataaacaagcaaaacttatgccttaaagctggtcacgctgaatgcaggacatttgaaactaaaatttctcatggaaacacaagcatatactttattacttaatagaaattagtgaatttaattcaatggaccagctcctttaggataaacgaatgggtagctatttggatgaaagattactcttacttgaatcttttagttttgatttttctctcattttaagtttattaacatagtgtccttgtagagtacctttcaagatatagaaggaagacttccctgggtccataacccataagccgggctgtctgataaagacttatattatgcaaatgtgtttccaccaaatatctcccttatagtacaaaaagatgataaaggaaaaggcatagataatggctcagggagaatggaaaagaggtctctttccaagccctttcttccagttaccccttctctctttctattgtcagtgcaatgaagagatgcagtgcttttttgtacatatatgcagacacacaaatcacctatcactttttaatcaaaataaaatataaaagataaagtgatacaattggaagtcagtatatacagggagattttgatagactgtagtaagaggctatggtggagccatctgtaaattatctaaagtactattatactttgctgaatttagatgtcagtagtaattattactgttttttaaatttcacaagagtagagagtctgtttacagagtagaaagggtgttgcaatgaattgcttttggtttcttctctttttggggaaaagaaacatgccaaatcttcatcattttttttaatttactgcccctttatagaggccctttcatgacaggagagctttagacttcaggccatctggaggtggggagatgaggcattgttcataagttcgtcattttgtactcctcttctggttgcatggcaggtcgagtgaatatattcaggaagagtgcatgatatgcttccttccctgctgagatgagtacagactgctccctttgggaagtacatgaaattctttgggctatggaagtacttttaggtagactgggaactagcagttctgatcctccctaaaggagaggaaactggcatttgttttttcctaagttcatagcaaacctttgaaagattccataaacaacaagctaaaggaaaaggataaacatagctggagaagaaatcggcattccttctagatttgtgcacccttagaacctaaggggtgaattaaataattaaataaaagatgttgtttgaaagtaaatgaaaaggagatatgagagcaaacttaatgcttccccccccccttttcagcttccctttgctacgagttgggtaagggatgttggaagagagaattgacttaggttatttataagaaacatcctaagaactacagaaaggccattgatttttaagtctttcaaatctcactaaatattttagctgacatgctaaaaagaaagtggaagaaatagtaaaattaaagtatattagagagagtggttttactttctctcttgctgctacttttgatccacaatccctgacagatcttcttcctttgtagtgcctcattgctattcctgctgtggctgtagggtgttttcactcatgtttcataagcttactttttctttcggactacctggagggaaaagtgtagtatctctcccttggcttatctttatttggaccctattatttcattttctctctttatcaggactcttagcccgaggaaatattgtcagaaaactttcatattcacttggcaaattagagatttcagtatctttcttcctcaaaaatcaccttatggatgaaacaaatttcaatacttaactgaccacaacgaagtgaagatgaaatatagttgaagcaacagagagaaagaggttttggcaagagatgtgtttacttatttaatgaagttcctactatttctgtagattttttttttcctcacaggattctccttccttgcctgttaatgaaggcaatattaatccccacagtcaccttgctcctactgcttacaaaactctgcaacaactttcatcaccctgtctaactctctggtggttctcaaaccctacaccaaataatgcaatatgtggagacaggatcaggtacaaagggacaatctgttcctacttgcacctcttacacactctgatagcccatccttgtccccctcccaaagattcattagccctattgttattttggaaaataggaaaaaaaaaatacatcctgcaaatcttctactctttgttctgtcctgcgaacttcttcctttatctatttccttatgcttattaatacagttttttaaattactactttctaaccgctcttctgaacttcaaagttaaaatttattttcatgtagttcaaggtcctctatttctttcttgtttccagaactcaatctaagactgtgttccatttgtcccacatgtccttccactcttctctcaagttatcctttactttctctgttacctcagaactaccagtgctggtttttaaaacgctattacgtgaaatcgctgaatttccagttttcttgactgtctgaaatgccattccctacatttgcctcctcattgtctctgccactacttctcactcagacagagaattctctatgggagattggaggcagattgtgatggtgaaacgagttgcaagtgtccctattagtatcttcctggcatcctaaactctaacttcaagcagacagaaactcaagtgcattatgagatgaacaattataggcttacttaggaatatcataactacctaaaatgttattaaacagagaaatgcaatttgtcttctaaaaagagattataagcaatctttcggaacaaagttagtaagaaactactagtagacagtgaagccaaaaacaaaaggtaaatgattgacatgattatatttatgttatatattgcatttactatttctattgaaaaaaattgaatatgaaatgtaacacaaatgaatataaaagaggttttgctcttatagacataaaagaaaaaaaacttttttccgttttggaacaatgcatttatctctacttacaatagcattatctgtttcacatgttgtgttatcatttttaataaaaaagtgaagcaattataattgcaaattgtaaataaaacatttattctaatcatcatttaaacagataagtatgcaattttgagatacaattcaatataataagaaccatacattatgaaatacaaatgacatacacacccttttgtaaaatctgcgtattttaaaatagcattttaaccatttgtgattgatataatttctatttataattaaataggctctttaaaatatcaacactagtaaaagtggcataatcaaagggcccttctggttgtcctttaatgtaatcaacttgtagaaatttgaatttggaatagaaatatcacctaagttaatttaacatacatagcatgtcatgtacccattcacagcattttactggaaaccactatatgattatcaatgggtaagcaacttagaaaggaacatatggttaaaaataagatactttatacaaaatgtatataatgacaatagcatattgaatctaattttcatttaagtagagcagagaattggatgacttttataataacaataataaggaatgacacgtgtatatgttccttgacatgaggcatcctatttattatattaaatattaatgatgatatggccatgtaacagagtatgagatagcatagatgactttctagtagtggtaagctgttccctctgagaaacaaagtcagtgttcagtggttcccccctgcccatctctttgtttctgtttctatctctgtctctctctattatagcaggaaatgctttacttcttggcaaccaggttgggatttcccagtaggcatttaatcaggcatttgcctactgtcataaccttggaatgttgaaggtggaaagagagagaatttccagcaacattcttttttttttttttttggctcagtgctagggtgatattaccacagcaatatgatatcaacacagcatggtccctgctctcatggagcttacatttagttagtgagacttcaggtacttaaacaggcagctgcaatgcaatatgctaaataccacaacagagagaagaattgtgtgataggggaagacatataagaggcatctaacccacgcttgaaggtggggttcaggggtcaagtttggcttcccagagttacgaaagcaaaaccaaacaaaattatataaaataattgaaatattcaaaatgtaaaagcaaggagtcattctgtcccatctttgcatttgtttatgtacctgtttttctagtttcaacctgtgccacggttgagttccgctgtgcagatgggacttgtattccaagatcagcacgatgcaaccagaacatagattgtgcagatgcttcagatgaaaagaactgcagtaagatattccactaccttttgtctgtttatgcttgggcacttttggcattgcattgaacactgtgcaagattttactgaactttgtccaaaattggtatgtaattaacccctgttgtgtgggataattacgtatctatttcctcaaatgaagttaacttttctcatctctatgacctacatagaaggctcataatctttgaaaatgaggtactttttcattttttgtttaccttcttctagataacacagactgcacacatttctataagcttggagtgaaaaccacagggttcataagatgtaattctacctcactgtgtgttctgccaacctggatatgcgacgggtctaatgactgtggagactattcagatgaattaaagtgcccaggtaatactagaatttagaaaaacacaggctttgccttggagattttgaggctacctggttgtatagagtgaatttttaaaattttattcttaatatcaattattgacattaaaatttaaatggcacagactgaaatgtaattaacctgttctaaacataccgcttgatctttttaagtgagttacaaaatgatattcaagaaaccatcctaaacttggatcaattttttatgtttagttattaaccctttcaaaattggtgattaagtctttcaagtttgtaatttataatccttcaacagaattattacatacctagaaataacttcataaaagaagagaaacaatgtttcttacgactggccttactcagtgttattgtacagcaatgttttaatgcagtttacaaaatcctttggtgtagtaatttgagtaatagttataatcattattgaatcaagttaagacaggttcatttatatctgactgttaaccatctttacatacataagccctgaaaactgtcatctacattcttagaagaatgccttccagcaaagttcttgactgtttctttctatttgaggacatgaaattaaaaaaaaattataaaaagaactatgtataactggaagtagagattctatataggacactattaaattttgtctcatattggtttgcctctctccaccctgctgctacacccatgtttttcatgtttagttgatatataataatttttaaacaattttaagaaattatattcataagtattttacacaaaagtttatacacacacaatctactatgaaagtctgattttttagtagatgacacatttattatttctaaatttgtgatggttcttttatcatgtatataattgtttaaattttgattttacacttagagtggacatgtgcaggcttattacttgggtatactgcatgatgctgaggtttgggcttgtattgatcctgtcacgcatttagtgaacatggtacctaatagtttttcagtcctttgcctccttcctccctctccccttttggagtccccagtatctattgttccatatttacttcgttgtgtactcaatgtttagctcccacttgcaactgggaacatgtgatatatggttttctgttcttgcattgatttacttaggataatgctcttgagctgcattcatgttactgcaaaggacatgatttcacttttttatgactgcatagaattccatggtgtatgtgtaccatatattctttatccggtgcaccactgatggacatctacattaatttaatatatttgctattgtgagtagtatttcaataaacatatatgagtgcatgtatctttattttcctttgagtatgtgatgagattggcttaaatcatagttctacttttagtttttgagaaatctccaaactacttttcacaggggctgaactaatttacactccgatcaacagtgtataagtgtttctttttctcgacaacctcaccaacatcttactttttgactttttaaacaaaaggcattctgactactatgagatggtacctcgtggttttgatttgcatttctctcatgattagtgatattgagcacttttttatgtgtttgttggccacttttatgtcttcttttgagaagtgtctgtttctatactcgacccatttttaatggggttatttgttttttttatttcttattgatttatttaaattccttatagattctggatattttttctttgccagatacatagttggaaaatattttctcccagggtacctgtttactctgttgatagtttttttgttgttgtcgtgcagaagctctttcgtttaatgaagtcccatttgtcaatttctgtttttgttgcaattgcttttgaggacttagtcataaattcttttcctaggactgtgtccagaaaagcatttcttaggatttcttgcagtatttttatagtttgagatcatacatttaagtcttcaaacttctttgacttaatttttgaatatgataagaggtaggagtccagtttcgttcttttgcgtatggtaagtgggattgtgctttttatttagccctcagcttgaactttgtgtatagtaatgctactgatttttatacattaattttgcatcttcactaaacttgattatgagatctaggggccttttttgcagagtctttaggtgtacatttatgatgtcagtgaagagaaatagtttggtttcctatttttctatttgcatgcctttaaatttctttctctagcctgattgctcgggctaagatttcctatactatgttgaaaaggagtggtgagagtgagcatccttgttttgttccagatctcaggggcaatgaatgattccagcttttgcaccttcaatttgagattggctttgggcttgtcacagatggctcttattgttctttccatgactagtttgtcgaggattgttatcatgaagcgatattggattttattgaatgctttttctgtgtctattgagatgatcacatgggttttgttcttaattctgtttatgtagtgaatcatacttattgatttgcatatgttgcaccgacctggaatcccaggaataaagcctacttgcccattgtgaattagatttttgatgtgacacaggatttggtttgctagtattttgttaaaggtttttgttcctatgttcattagggatattggtctgtagttttgctgtggtggttgttgtatctttgtcagattttggtattaggatgatcctgatttcatagaatgagttagggagaaatctcacctccttaattatttggaacagtttcagcagcattggtatcagctcttctttgtacatctggtagaatttggctgtgaatatatctgttccagggctttttttatttgtatattttttattactgattcagttttagaactcattgatctattcatgttttcaatgtcttccttactcaattttgggagattgtgcctttccagaaatttattcattttctctaaattttagagtatgttcacaatagtttctgatgatattttgtgggatcagttgttatgttgcctttgtcatttctgattgtgcttgttttagacttatctcttttttttttgttaatctagcaagcggtccatcaacattgtctaacctttaaaagaaccagcattttatttcattgatccttgtatagttttgggggtctcattttattttcttctgctctgattttagtttttttcttctgttgactctgggattagtttttttctttccttggttcgtttaggtgcagtcagattgttatttgagctctttctatctttttgatgtggacatttagtactataaaccttccttttaatactgtttttgccacatctcagagattttggtatgttgtgtctctgctttcatttgtttcaaataatcatttgttatctgctttaatttcattgtttacccaaaattcattcggagcaagttttagtttccatattatgtggttttgagtattcctctggttattgatttctactttttctatttttatttcactgaggcctgagaatttggtatttttaaaaaatttattgagacttgttttatgaccacacctgtggttaactttagagtatattttgtgtacagatgagaagaatgtatatgctacggtagtctggagtgttttgtggatgtctattaggtccaataggtcaagtgttgaattacattcagaatttccttgttagttttctgcctcattgaccgaatgatgtcactggagtattgaattctgctactgttattgtggctatcaagttgttttgtaggtctagaagtactagttttatgaatctaggtgctcttctttatttttttctactgttgttgtttaaagtctattatatctgatatacgaatagcaaatactgctctttttttgttttccatttgcatgatagatctttctccatccttttctttgagcctatgggtgtcattatgtcagatagatctcttgaagatggcagaaggataggttttgcttttttatccagtttacaactgtatgtcttttaaggccatttacattgaaggttaatattgatatgtgagattttattcttgttgtagtgttgttagctaggtgatttttagtgtcatttgtgtagttgctttgtagggttcatgggctgtgtgcttatgtgttcttttgtggtagtatcattctttcatttccattcaaagaaccccctcaggctctcttctagtactgatctggtggtgatctagtcctttaacaattgcttgtctgggaaagactttatttctcctttatctatggaggttagtgtaaaattcttaactggcatttattttccttaagaatgctaaaaataggtccccaatctcttctagattttaaggtttctgctgagaagtctgttgttagtctgctaggtttcactttacaggtgatgtggccaatttttgtagctgctttcaaacttcttttatgttgatgttggatagcccaatgaccgtgtgctgtgccttggggatgattgtcttgttcagtatcttgcaggagatctctggctatcttgaatctgtctgttgatttctctagcaagattggggatattttcatgaattataccatcaaatatgttttctaagttgcatactttctcttctctctcatgaatctcaataagtcatagattttatcacttttcttgatcctatatttctcaaaagctttgttcattttctaaaattcttttttatttttgaaaaaaattaatatgaaggaccagtcttaaagctttggaattctttcttctgcttggtctaatctattgttaaggctttcaattgtattttgaaattctgcagtgattttttttaattccaaaagttctgtttagttctttcttaatcctgctatgttgtctttcaaatcctgaattttcttttttttttttttttctgttttcttagtgttagatttcaaacttcttttgggttttgttgagtattcttgctatgcatgtcctaaattctagagcatttgactgtagctcactgcaggtctttcacattaaaaaaattaattatataaagtatttaaaagaaatatagacacttattactttagactcatgaaactggcaccaaaaaaaattatactttaagttctagggtacatgtgcacaatgtgcaggttttttacatatgtgtacatgtgccatgttggtttgctgcacccatcaactcgccatccacattaggcatttctcctaatgctattcctccctcatcccccaaccccaaaacagaccccagtgtgtgatgttccctgccctgtgtccaagtgttctcattgttcaatttccacctatgagtgagaacatgtggtgtttggttttctgtccttgcgatagtttgctcagaatgatggtttccagcttcatccatgtccttacaaaggacatgaactcatccttttctatggttgcatagtattccatggtgtacatgtgcacattttcttaatccagtctatcattgatggacatttgggttggttacaagtctttgctattgtgaatagtgccgcaataaacatacatgtgcatgtgtgtttatagtagcatgatttataatcctttgggtatatacccagtaataggatcactaggtcaaatgatatttctagttctagatccttgaggaatcgtcacactgtcttccacaatggttgaacactcccaaaaacagtgtaaaagcattcctatttctccacatcctctccagcacctgttgtttcctgactttttaatgatcgccattctaactggtgtgagatggtatctcattgcggttttgatttgcatttctctgatgaccagtggatgatgagcatttttttcatgtgtctgttggctgcataaatgtcttctttggagaagtgtctgtttatatcctttgtccacttgttgatggggttgtttgattttttcttgtaaatttgtttgagttctttgtagattctggatattagccctttgtcagatgggtagagtgcaaacattttctcccattctgtaggttgcctgttcactctgatggtagtttcttctgctgtgcagaatctctttagttttattagatcccatttgtctattttggcttttgttgccattgcttttggtgttttagtcatgaagtccttgcccttacctatgtcctgaatggtattgccgaggttttcttctagggtttttatggttttaggtctaacatttaagtctttaatccatcttgaattaatttttgtataaggtgtaaggaagggatccagtttcagctttccacatatggctagccaattttcccagcaccatttattaaatagagaatcctttccccatttcttgtttttgttaggtttgtcaaagatcagatggttgtagacgtgtagtgttatttctgaggcctctgttctgttccattggtctatatctctgttttgttaccagtatcatgctgttttggttactgtggccttgtagtatagtttgaagtcaggtagtgtgatgcttccagctttgttctttttgcttaggattgtcttggcaatgtgggctctattttggttccatatggactttaacgtagttttttccaattctgtgaagaaagtcattggtagcttgatggggatggcattgcgtctataaattaccttgggcagtatggccagttttatgatattgattcttcctatgcataagcatggactgttcttccatttatttgtgtcctcttttatttctggccagggcaatcaggcaagagaaagaaataaaggaaagaaattaggaaaagaggaagtcaaattgtccgtgtttgcagatgacgtgattgtatatttagaaaaccccattgtctcagcccaaaatctccttaagctgataaacaacttcaagcaaagtctcaggatacaaaatcaatgtgcaaaaatcgcaagcattcttatacaccaataacagacagagagccaaatcatgagtgaactcccattcacagttgttacaaagagaataaaatacctaggaatccaacttacaagggatgtgaaggacctcttcagggagaactacaaaccactgctctacgaaactggtgccaagattcttaattttctgtttacaacaacacattctttacctcagtatgactgtagttaattttgaaattatcttgaggtcagcatatgatagatattaattaaactaaaattttatttttcttttttgtgatctccatctctttctagtattaataagttatcttaaaattaactttcaacactaatagagaatcacaacttttatatttggtaagaaagaaagggacatgcatgcaggcttatgaggcaggtagacagacagacaggaagccagcaatgggtcagcctaaatacttcagattagatccaggaaacatcctaagcatcctaaaatgttttggtttaatgctgaattcactcaaaaaatatattttcatctttaattacatctacaaagtcaacatataaaaaataaaatgcctacaatttttgttatcttaaaatagccataatagaccattatagtgtgattgggatatatacactagggtttacttcctgcttggctatagatcaaacatgtaaaatcatgtaaacctgaaggagcaatggaacagatgacacccagttaaaagataaatttaggctgggcacagtggctcacacctgtaatcccagcactttgggaggccgaggcgggaggatcatgacgtcagaagttcaagaccagcctgaccagtatggtaaaacctcatctctattaaaaatacaaaaattagccgggcatggtggcacaagcctgtagtcctagctattcaggagtctgaggcaggagaatcacttgaacccgggaggcggagtttgtagtgagccaagattgtgccactgcactccagcctgggtgacagagtgaaactccatctcaacaaaaaaaaaaaaaaaaggaaagataaatatagtattctatatgtactcttgaaggttaaaataatgataatactccataatttaaaaaatatatataatttacaaaataattttacatacaggtacttttttatgataattctgaaaggcataataatttcagatttgccagtgtaactcgtttattcttccttaaaatacagaataattgtttaaatcctgttaaggaatactccaaatagatggccacagaaacactagattcacacttttccagcaaagatacaccaatgtattaattttattattttgtgctatgaatatggaattaagagtattttccacccaaatattattctttggccttaggctcactcaatttagagtcgtatctattttttaactttattttatgtttattaactaagtgctactgttataatttaaaccaattttacattactataatctttctgttctaggactcaatcctggattggatttgattatcatgtctcatgggtctctgttctgggacagtttctgaatctttcctttattttcataaccttgacattctttaggagaaaatcttagctatttttaagcttacttgttatttatctctttcagtttagggagtattaatgatttatctacctatatttcagaagtctaaaatgaaattgtttgacattccatattttatcacagttcaaaacaaacacaaatgtgaagaaaattattttagttgtcctagtggaagatgcattttgaatacctggatatgcgatggtcagaaagattgtgaggatggacgtgatgaattccactgtggtgagacattgtatttagcttagtttttgttaaccttactattacttatatgttagtattctcttatgtagggattttatacaaaacattgtcagctgattttaacattaattttcatttttattaaataatacaaaaatggtaaagattaaaattaaaacagaagagcttataatgaagactaacactctttggtcctagacttttcttttaacctctgtttttgttgaataattacttccatcagtttataatatagatataataaagttataccttttcttaatttattaactttaggtggtacctgatgtatttgctttctgctataaaaaataaggatttgacacatgctacttgttatatttcccccacctattattggtatctgcatgggggattgggtctaacaccctgtggacaccaaaatccatggatgctcaagtcccttatataaagcagcctagtagttgcatataacctatgcacatcatcctgtacattttaaataacctcttgattacttataatgcctaatacaatgtaaatattatgttaattattgttttattgtattgtttttatttgtattatattttattcttgtattgttattatttaatcttattttttcaaatacttctgatgtgtagtttgttgaatccatggatattaaaggcacagatgtggagagctgactgaatattattatcctgaaattttgtactaattacatgtatagctttcaataatatatataaacttctatttctttaaacttttgcctttcatcttctacctcctaatttctgtgtgtgtacactttatttcatgttacattgtcaaactaagaaagcatttttacgttttgtttctaaaatgtatggattttgtgatttgcaaatcaaagaaatttccaataggaaaacaaggtatatattcactatttacatttagcacaaataacatacactgtggtgaatagatagagtagaaaaaagattaaaaacggattttctgtgaaatgtcaaactctcctaaaagtaaatgtcatcatgaaatgtgaaggtgcattttattttactaagatgccatatatctttacattagagccagattttgaacaagactaacagagaacttccaaaatattgtatgtggattcataatttctgaacactggccattatctgatcatatcttctttaattttattttttccaaactccagttttctaatgttctctgtttcacaggtcatctaattaagcattttaaatgaaaatgcaaagttttgcaattgtttatgaaatcaaaagcagaattgctatttttacaagagtttatattttgaacaccttaatttagaaggattttacttttgaaggttttctagtgacaaatatactgggtagaaggggaggctgggaatggaggagagcaataacaaaattggctttggaaataaatggagtgtgttattattataaaaatataatctaataataaaaaagccagccactatgccaattaatttaggtgttattagtcaggtataacaaacccaagtgtttccaaggaagcaacacaaaaacatcagcacagttgctacgtacaaaactgtcaggttgtcttcaagctataacctccttagtcacccacctttaaaaacaaacatatctgctgattagtccaccatattgttaccttacttaggacgtaagtgttttctcttggctcaaagatagatttaaagttaaaaagtatgactagactataccagaaatatatattttatatctatgcattacacattcaaaaaataataataacagacaaatatacctggagtagagtgaccgcattaggactacctcaaaggcaagccttataagaatcatgttgaacaaatcgtggttgtatcacctggaaacacagagggaatatgcaagctgatgccaaaattttatagaattgtcatagaaaagaagaagttggcttcttttattataggattgttgattttagcaaagtctaagaaagaatcttctcactgtcggatctgttgtaagacggtctcaaactatttttttttttccttttgtttgtttcctagattcttcttgctcttggaaccaatttgcttgttccgcacaaaaatgtatttctaagcattggatttgtgatggagaagatgactgtggggatgggttagatgaaagtgacagcatttgtggtaagttgtgtatcttctgtcctcaatcagtttttaagcattatatatgctctatcattttatagcatacacaaaatttgctaatttattaaaattaacataaaatttatgtgtacctttctaggtagctgtttttattattttcatgacaatccattattctaatatttttatatataaagctgttattcaatatttggtatttttccttaatattgccacaacaaatgtatttgtacattttatttctagctttcggtgaattctttgaagcaaatatcaatgattgagattacagggtcaaataatcaaacttatttttcattatgctgcctatgtaccaccaagttaccctccaaaattagtatactaatttatactgccacaagccacacgtgctgtttatgtgcatatgtgtgtgttgttttcatccttattgctgaattgttttaaataagaagtaaaggaaagtggctattttatatgatattaaaatgcactttaaaatgtagctttataagattagaggtattagtgtcacgtatctatacttaactactatatgtcaactacaagcccagtatgattgctttgtaatattcacaaatatttaacaaatagttaaatagaattattcactgaatttcctaaggggtaaaagaaggaaacaagctagtctttaaaatttgttcttaccggccaagaatttcactatttttatagatgtctattggttgtctatctaatctatttctgtacatgcatttgtacctgtagctatatattctttactcattacatcagcctttggtggcagctgttatcatcctcttttaggaagagaaggacccaagtcatagaataaggtgtatgtatagattttagtatacttaacacctcttttaaatttcaggggttgtggactgctatttctgtcacaaacatatagagaaaggcggtattttttagtattcaagctcaactgaagttctctttagtaatatgaaattggagatattcttgaaagtaggcaatttactttcttgtatttaagtcactcaaaatctactttttatttacacagctgaaaccatttacagttatacaacagacaaatatagaaagatcactatcaaaaagctgtgaaagaaaaaaagtcagtaatcaattagatgactgtctgtttctctttgctattacttttaaaaataaatttaataaaagaattacctatttacaataggatgagcactgtttcaatctctaaaattatcttacttttgacttttgttaaactctacactaaactgccccgttgataacactgtgctttctgagtggacacagtattataggggcaaagtctctaaagtcatgtagacttgacttctcccacatctgcattttcaagctgtgtgatcatagaccacttcatttttttccttatcttgttattccttacctattaattggatacaaaaagatttgtacttatatacctgtatacctaatatgatcatccaacataaccaatgtacactatatttatgaggtttttctgattttatttctcctgcctcctttctttgtcgaagtattgtcagtgtcctaataatgcttttttattaaagactaataagaaaatggacatgtttacctgcaatcaaaatactgagcttatttacgttaattatgagctgtattttatgtactaactaccaagcttgagacacataaagaaaatactgctttagaccaatcatcagccaatgaactgaacctcctattttagaacaggaaaataactttataaataattcgtctcacttgttttcaacctttggagtacaaaagatcgttctcagaagtgtgttaaaaatgttgtttcccaatttccaattcaaaatattctgatgcaggatgtaaacacattctttattgatatgcacatagtgattctgatttggaatattaagggtcccattttgaaaaccatggtctagtttatttccatcttttgagagatgaaaaaagagaaactcacagaaattaatacattttcctgaggtcactcagataattaactatgacagaggtatgagcagaattcaggttccaaaatattaataggctagtgactcttatcaattaaatattattatccgagttggtgtgcaagatggatctagtggaatttatcaacttgtctttcttctccctcgggattcttttccctgagaaaggcagtatatctccagatggcagtggcaactatgaaataaagtcatgaattttttctttggcccattttcttcccaattgactatgatgttttggcatgttcttaacacaaaatctgttgaatactatcaagggagccagaaaattagctgcaaagagccttatgccattttatagctggagatatctcagtaatgatctagtcatacccatcattttaaagatagggtaattcagacactagtcttcatcaaggtcatacagaattagatttctccactgccaaatcggggctctttctattatgactgccttgagaacaaattaaagtgataatatggcagtagacaagaaattttacatttatcaaaacttccttaagagaaaaaaatgcagttaaaaacatctcaagctaaaaagtaaaaatgttatacaaagcattgaattgagaatataataataaaaaggacactttatggtttcatggcaagcttaaaaaggatagataaggaggaataatataaaaatattttctgtggaaagataattttattatagaaagtactgaagacatactagttagcaaacaaaataatttttaaatgaaagtacatttatttaatagattattttctaacttcttccagtactacataaaatgttaaactccattctattaaatagatcctcagttaaataagcaagtctagattacgggggggatttgtcaacatccactcttcatcctttcctccaggctaaggtatatgtcaaggacaggtatgtttatattgcaaaagacccctagaggggctgggcgcggtggctcacgcctgtaaccccagcactttgggagaccgaggcgggcggatcacgaggtcaggatattgagaccattctggctaacacagtgaaaccccgtctctactaaaaatacaaaaaattagccgggcgtggaggcgggcgcctgtagtcccagctactccggaggctgaggcgggagaatggcgtgaacccgggaggcggagcttgcattgagccgagaccgcgccaccgcactccagcctgggcgacagagcgagactccgtctcaaaaaaaaaaaaaaaaaaaaaaaaaaagacccttagaggattgtattttgataccccactgcttaccatattgaaaacattacttcaaaaagaattttctgctcctaacaactctggctgaaaagtaagaggataaatgataatccaattaaaacacactgtctactgctttcaattgttagaaacaaatatttttcatctagtcacttatattttcttcctggagataatatactattttcaacacttcaacaaatttcttttttagcatcaattctgggcaactttgggtcataagaaagtaaaatttaaaaaaaaaaagagatttagggtcatgttactgattcactcaggtactttttataaacaaacaaacaaaacattcaaaacattcattgtatgtaactgcacagggactaggaaaatatcatgagggagggccatttgacatatggctaccctatgatcataacgggaaggaaagaggaaccctttgtacttaaaagtccaagtcaacaagcatttttttgaaagacattatcatgcaactaaagaaacattgcagtgatagagcaaaggtagattccaattattatgcatgaaaaaaatggaacgtgcatgcatttatactttttggtactacaagatggagagtaatagtaatgacatgagtggttaaaagttggtgcttaggattcagagggtgcttaggatccagaggactcccagttgagcatgcaaaattgcgtgcaacttgtgactttctgcaagcttttcaacttccccgagcctcagttttcttttctgtaaaatgatactgataatagttctatgggttgggcttattgtaaggaataaatgagttaatatgttaagtgcttagcacgtattaagcaataaaaatggcattatttcaattactattatttttctagttcaggcctttagaaatgttatctcagtgtattcacaattctatgacatttctatgctttgccacattttacaaggataaagtacattattttctaccatgtagctttaagaaatataacaattatagctaggaaagaatgccttcttagataaaaatgtgtggacaactacaggggaagaatgatgtttaatgattcccaataactacaatcgcctccttataagcaacattcttctgcttccccccttactgtagaaaatgtaaatggtagacattttccagtggacacagagtaatcttaatggcattatgtttttgtgtttcaggtgccataacctgtgctgctgacatgttcagctgccagggctctcgtgcctgcgtgccccgacattggctttgtgatggtgaaagggactgtccagatggaagcgatgagctttccacagcaggctgcggtatgaacactggccagggctgcatgtcaaagaaaactgttgcagcatccttggttatttgtttttgtagtatttgccatagcacatttcccattgctttcctagttcctgggcccataggtagtattggacttaatcaggtgggatgacggtatcacagtagttctgcaacctctttaactactgttcaatgtttcaaacatgcacagtcggattacccattttaaaaccactttgataaacacagatttatcatttcacttctcagctaatgtaactgcactttatgtgtacgagtgcagtaggtttggtactttctcttttgcgtcgtccaccaccatccttctgaaggcttttagattgtctgttacagagactctgtgaatgacttctctgatcctaaataactactgatcaggaggtcagtaaacacctattagtcctatggatagggtattaacccttgggtcatgtaaaaatagtatggatatagccgaatgaagctgagggatcagaggagcaccttcggaggtcagacaatttactaagtttctgactctaagtcacctcaggaaattttcagggcattactcaacagtaaaaatttagatgaattcctttgcatgatcaggaggataaagggactgaatatttgaatgcagatcccaaggtcacataggggatcctttgggctgagcaatttgtcagaaataatgctgcgaactccgcttgttaaaatgagttctgtcagtcatctctccaatggcctgccttcacatctttaaagcattgtatttgaagccataatataagtgtctgtgtgtgtgtgtgtgtgtgtgtgtgtttgtgtgtgtgtgtgtgtgtgcaggggtatgtacgtgaggaatagttaaagtagaaaagaaaaaagaaaacttcgaggcagacctatttgcacagaactcatactattgttgtagaataattcactttgatcttgaaactgatatgtgtgtctgtaaaggtcaatgaggccactgagggctacataataaaggattatgcatcaattcagggatccagatggtcccagtatgctgttgctattgtagcaagttaacactctgggaggcatattaacacgtttgtaccacaagggtactattaagtacattccgttaaaatgcagcaaattgtactcaagtgatctgaaagtgttaaagccaaataagtcactgttgctcagtgttttaaagattaatccatgtatcggaattggtgtaattcacctgagttatccaagctggcatacagttcaaatttaagaggagttagtaaaatcagagttttactctgattacaacaggcaattgttcatgctacttctatgtggcttctatacagctttaaaaaaatctttgttaaaagtaaattatgcctgattatattttaaaaacccttatgtgttacctacactatgtcaataatttctgagataaagggagagatttatttgttcatggagcctggggcagtctggggagagggggctataggcaatgtgaaagaataatgataatacctgtatcttaagtgttaaagtgatgtgtataaaatatactatgtcaatcacaaagaaatattatgtaaaatatcctactaatatgtaaaatgcctcaggaaatgatttcaagaaaaagtgataatattatctgagtcttgagggacaaagaaagagaaaggtgtttcatgtagagaaaagtgcttattaagacatggaattgggaaatagaaggcacctaagtttttcaagtacccattacatatcaattattgtaattgttgctgttatttgcattattgaattcccacaatattgtagtgaactgttttgaggaatctgccaaaaataattattatataaataggagtttaaagagcacctagacatgtattaaatacttaaaatgagccaaatctgcttcacatacattatctagcccttataagaaatgtatcagatacattttattatccccattaaacagataaagaaacagatgcaccaagaaggtaaattgcttccttaaggatacaaatataagtgccacagccactttctgcaaagtctttctctttccagcattctacaatagcatatagcggattattgctatttgcaataccccaaaccttgagtcctacatggcatttaccttttaaatatatgcaaagattactgaaaatatttaaatgagtcttgcaaacctcttatgattctatgcgtatggtattaattttttctttctctgcactagttatgttcttttgaatttttgctgaaattttgatcacttggatcaaccattttttccacttgttggaacattgctttcatggatcaatattcctaaagggtcaatattccatttcatttgtgtggtacttacggaggggctgatgacatcaaagatcttacctttacctaattggacaccccactctagaagtcaccaaaaagttttattttatttttttaaagacaataacattctaaaccttcttagttttcttttcacttcctttatgaacattagcattgctctttaccagtctatttttcacaaggaaacaacatttttattactttaccagcattactgtaggcataagtaaaggaaaaaagcctagaatattattagctgagatattttttctaacatgtgaacatttgaattcatccttcagcaaatttaaaatcgctacatggcttgaattcagggtcactctggaatagttgaattcatgaatactaaatccttgaattatgtgtatttatattcagacattctaatataaatacatatgcaattattagcttatctgatgtattgaatattatgcaaagttttctttttctcagtaactatgaattattggatatgattttatatattccccaagctcctaatataggggaagataacatatgtgctcatctaactttattttttgtgatgcctttcttagctcccaataatacatgtgatgaaaatgctttcatgtgccataataaagtatgcattcccaagcaatttgtttgtgaccatgatgacgactgtggagatggctctgatgagtcaccgcagtgtggtaagtacatctaaaacttcatgaaggagattcctaggctaagagtctttcaaaactagtatgtaaataaaaaactaaagcaacaagcaacacatttcttagtgtcatcaacacccagtgaattcagtaatacacaatcacagcacatataacttatttaagctctagtataatacatttctttggaaatcatacctgtttgcagtatatttgcatcagtaatattggaaaatgtttataaaaatgtctttgggctgggtgcggtggctcatgcctgtagtcctagcacttcgggaggctgaggcgggtggatcacctgaggtcaggagttcgagaccagcctggccaacatggggaaaccccatctctactaaaaatacaaaaattcgtcaggcatggtggccatgcctgtaatcccagctactcgggagcctgaggcaggagaattgcttgtacccaggaagtagaggtcgcagtgagccgagatcatgccactgcactccagcctgggtgacagagtgagactccatctcaaaataaatacataaataaataaattaaaattaaaattaaaaatgtctttggtttaacgtattttgaaatacttgaaatttgaagacagtatatggctggcttgttcagttgtatagccaaatcaaatatttgagtaaaaaaaacataattcagaattatcagaaaagccggatacttaatatttttctaccctttatgttttgatgtattcaatgatttgataaaatttaatattattatcatgaaatgtatattgcctttacatatatttttctatgttatatataatatctatacaacctacaactttaatgatagcatcaatatattaaaaatgctcagttgaagtttaactgtaatgtgaacttaatgttttcgtaaaatatctgaatgcatagacaagaataaatatatgtaatgaaaagctgtgaactttatatatgctcatagaaggcaacagatttagtgcctgcctttgttctccctgtgcagcgtctatagccttggcctttgatatgaatctcactgaaattagtggatatcagtttttatgattatttcagcgtgaagtcttacatttgatgtgatattttaaaggctacatcataacacaagatataaatctgaagcagagttatatctgattgaatatctcccctctgctagacattatatttggttgatacagagatgaatgagacagagaggccccacttggaaaagtcacagatgaatggaaaaaacagaaattcaatatagtacaataacatattatgtcaaatagaaacaagaatcacaatgagatcagagctgagaagaatcgttcttgaggtaggcactgaagaatagaagcagggaatgttagtaagaggaaatcctgtgtaatgctagagagcgtggtgtgtggtggttaatagcatgaactccagagctggagagcctgggttcaagtcctggatcttctgtttactagctatgtgaccttgaaaaggtcacttcacttccctgggcctcggttttccatctgtaaagtatgtttaataaaaaggcttaaatgttaggactgttcagagaattaaatgaatttatatttgtaaagttcttagagcagtttcaggaacagtaaattctatatgtgtttacaaagactgtaaattgagatggtcgaggaatagcaattagtcttctgttaggtaagtggacatttaaaaagatgaagttagatttgaaaaaggctgaaataaagtgttagagaatttgtatttaattattttgtctctcagaggccagtgtacattttgaaacaagagaatgaaatgttacagtcacatttttgttttggaaccatattttttcaccagagtgggagaaatactgccatggagcaaaggagccatagagggaaataaactagttagggggttattgtgatagttctgatgattaatgacgtggttttgaacgaggttgggaatggtggagtggaaggtacagaatgtgtcagacttcatttacagtaggacatggaggataaaagggaatttctagcttggatgacttggtgattggtgctgctgttaatgaatgttgggatacaagaggttaagggttaattttgtcaataagatgtgagatgtaataaagactttattgtggatcttttgaatatgaggtgttaatcagacaatcacataaagctatatagtgactgtgtgataatttaattctagatcagaagaacaacgaggataagtaatattaattttctacccatcagcctaaagctggcaggaaaataaagactgaagattgaagttagggctttcctggcaatattttagaatggaacaggagaggatttcatacagaaggaaaagaagggaacagcaagatcaaagttggaaagaagtccaggaaggtagactgtgaatattattaagtcaggaaactctttctaaggtagtgtggtcagaaacataaaatgttgctaaaaggtgaagtaaataggaggacaagatccagaatttgacacttagcacttggtgtttgttatctctaagaggagtttcagaagatagaggtcagagaaatgaaatgttgattgatcagagatgaactgcaggcaagtaagtggaagccagattgggcaataaagagacaagaaatgtgctgataagaggtgtatagatttttattgttattggactggataagacttcactgtatttgttaaatgagaagaaggaactaatgaaggaggagagagagcgaagaaatactagggtagctaaggctattttagaactatctagtttaaccattccaatatgataataatttaaattaaatattcattattgagtatattttccgttggaattgtgtttatttcttaagccataaaaatcttaccccctcccacttaaaacagagcatttacccatatttatcagaaagttctactaggaataactgtttttatagttgacaaacttagaaaaaattcttataaaacaatgttgaaaatcaaataagttgtatttacaaataggcatagatatgaacttttaccaaatgatgttttttctgtaatttgaataaagtttttagtgactctaagaatcaagatgtaggataattataatagtttttgtgcttattgctctaaaattgacttttaaatttttctcattttaacaatgtttttacactttgagtgctgctttctaaacataaacatgatatcagagcttctgagaattatcgttatagctcagaatcagtttatccatatgttctggtactatacctaaccaagctaattctaatagctttcactttcattttccattctaagagatattatgatctagataataggtgaagagaaatggtatagtcaagggtcactttcttatttcttcaccttgaaataataagaatgttagtttccaacttgagtttttggaccatattcctacttccaaaccacaaacatctcttgcaactataaccactgttacagaaagaaatgagaaatatttctcatgggagacatgagtaatccacattaatccggtgtagtgtacattgaggagatgacgtttcaattagtatttgttatgtgaattagtcaaatgttttttctgcgtctctaggatatcgacagtgtggtacagaagaatttagttgtgctgatgggcggtgtcttctaaatactcaatggcagtgtgatggagactttgactgtcctgaccattctgatgaagcacctttaaacccaaagtgtaaaagtgcaggtacagaaatatatacaataccgcatttactctaaagtgttttcaatggaaaaattgtgattttctgtctagtatagtattcaatgagagaaaatgcaaattattaagcatgtgatgtttctagtgacaccatgcagggtactagtaattgactctgtgagaagctagttttggaaatttaagtctgtgccaaaaatataaagatttgaggcagtggtactgctgaattcaccatcctgtcttccccactgccaaaaattcattatatcttcatatattattttatataagaataatttcactgtattggcctatttgaaaattcaaatgcaaaaaagttaaaatttactgtgaagtagtctgtattattcataattaggcaagatgaaacattgcatatcatttgaatatacatatattaaaaacttggtctgtttatcacttctctattccaaatgctaaatatataatcacatattacagaatatactcaaataatttttttctcatggactttacatgataatgggctttcttttagcatgtatgatggtgagtattgttcaagtcatccagctattttccatagctgtatttggaacagctattattcaccactgatatctgttttataccctgacttcaaaatgtcaatgttatatttccaggaagaaaagaatttaggaatatctacctattctagattcttagtttttagtgacatataatttctcagagacctatggcttgagggaattgtcaaactatcattaaacttttgaactcattcttcacaaaatagaggaggcagaaatagttcattaattttactatggatgtttattttgataattaattttcatgatcaagctatatttgcaataagtattgaacatgaaagtacagtttgcccttggttttctgaactttaggtgtaagatattatactgaatatgtaaaagattttatataaacttatattatgatttttgacacctgagttaatgatatttgtgaatgttttcaacaactgtagtataaaacaatggcatgccctttatgttccatttgttttattttttttccagaacagtcatgcaacagttcattttttatgtgcaaaaatggcaggtgcattcccagtggaggtctttgcgacaataaggatgactgtggcgatggttcagatgagagaaactgccatataaatgaatgtttgagtaagaaagtcagtggatgttctcaagactgtcaagaccttccggtcagttataaggtaggtactcatcaaaagtagcaaatcatacgatacattagaattggaggttaagaaagctatttaatccaatatagatgaaaaagttaaaagccatcataatattaaaacgaattgaatggagagtgtcgatatgaagataccataatagtagtgtgatataaaagttgtgagaatatagttaagaagacaaaaataaaattgaagcatttttctacatttttggagcataaaggaaataaataaaccagggaagactagtgatcagagacaatactgctatgttaatagctgtataaatacgtatttaactcttaagtttccatttcttccctcattctctcttcagtacatcttcgaagtggaatgggctaatcatttactacaacactggataatggaatatttttcatacaaacataaaatccataaactgtggattattaggacataaaaaatccataaactatgaattattaggacttagtgtgaatacactaaaataaaccatatgtaatatcctaattgttgattgtaagtaccatttccctgaagagggtgattcgctgacagaatcgatggacagaaatagcttctaaaaccaactctgtttcagtatgttggaatgacggacaaaactaacacaatgttgaaatgcaacgttgtgtattaggttaaaatcaattttgtaaatgtggaaaaacctcaataagagcaattcctttgaaaattagtgtgtttaatggagcaacaactctgtatgaatcttcaataggacataactagtataaacaacacaggcagtctaatgaaaattaggaccattacagggtttaaattttgttctaccgagttctgcccgggggtactgcgcacatgtatggacacagcattttatcaagggaaaccatgacgaattggagtgtatccaaatttctatatccagaagcattagagtctggagcacatcttcagaagaagttttgcttagagcaaagacgatttgctagctgtattcacatactgtatatgaaggattctaatagggaacatacttaatctgagttgcttaaaagatcggaattaagagttggaaagcagtttctgttcaatacaaggcagaagtttctaatgatagaacacttcatattggaatgaaccacctcacacatcaccaatgaaagtgtttctgcagtggctaaatgactttctttaaaggatggtagacaattgttgtatggcaaagatgtggggccattgttcctgccagccttagcatgctatgacaagccagttctatctaacagtaaattcaactaaacaaccaatttgctgtttttaagttctgaatttctggtattattaacttagctacatggttaggttggttaggattttactgtatatagacataatctaagaaccacaataataaattcctgcaaaaattagagattaaaaactgaaacaccaagaaatatatatttttaaaagttttttagacccaatattgtattaagaagtggttaaacttgtaaacttagaatatgaactcattcataaacaatatattacaggcagaaagaaagaaagcaagtgagccagtacatcttttaatgagatgagcatgcatcagataattaatgttggcagtaaatattttaaaaaccagtgaagcagaaaagaaatgttattgatcacttgtgtacaattaacatagaaatctttcctgaattcatcagggaatgtgttttagaatgattgcaggtaactaattaaaattttaagtcataccattacaaataattatttagttctatcatatatacagttatgtaccacataatgatgtattggtcaacaatgtgctgcttatacagtggtgttcctatagaattatttttactgtaccttttctaaacatttttaaatattttttaaacgtttctaaatatttttactgtaccttttctaaacatatggtgagagatgtttagatacacaaatacttagcattgtgttacaattgcctacagcattcaatatagtaacatgctgtacaggtttgtaacctaggaacaatatgctctaccatataacctaggtgcatgatggcctgtaccatataggtttgtttaaatacgctctatgatgttcacacaatgacaaatcacctaacagagtatttctcagaacatatccctgtcattaactgatgcatggctgagtgtgtctgtgtgtgtgtatatgtgtgtgtgtgtgtttgttctatgtgatacatttcaaagtagatttatttgtgtttattccatgtgtatttaatgtctatgataacaaacttggtagtaaattataaaacctatagaatatcaattatatactttgtgacatgacatcaaaaataaggttagatgttattttaaatgcctgcatataagaagtattagcacacagccataccatatttggaaactgcttttggtagaagacaatatcatccagaaacacatgttaattcatgcttattttaagtatcttgaaacattcctcacacataaatacttgtttattaatactttataaatgccagtgttttcattttgtcttctcaagaagccgtagaaagaagtgataattctagttaaaatagacaaaagtatttaatccttcacaaggtgtgcgcatatgttatcagacagaattgctatgatgtttttaagtatgtaaacatgtaaaagctagttaataatataaaacacctattgatggaaatatgacttgtacaaacattcaggatgagaccagaatcataaataaaagatttaagcaaaggttcagaccaaatattttacatattgcattcatatttatgtatatgtatatacatacacatgtatatattatgcacacaaatatatgtcatatatatgacaatttgttgataggaaactgagtaaaaagctttatgtacaacaagatgcttctaccacgttgcaaaattacgtgagctgatagatttctctgtttcagagaatggtgaaaactatccagcagcctacttctccttgtaatataagcagaccatgacaggaaatcgtcctctaaattctgcaataaaacgagaattgcttacaaaagcaaaatttagaccttatggactgtggccaatttgcatgtttgcagtaaaacaaatagaatgtatctaactattcaaaagggagtaataacatttaactgaagcaaaaatcttattttgataggaaggataatttaccatgtaaaaataaatgtacttctgggagggaaaaaagtgatgatgtatacagtagaaataaaatgatcaatatttgtcatgttacttgaaaagctgcaaaggaattttcctgagagaaatagaaaaggcttagttattttttctgccagctatattttcttataaaaattaatgtaactcaagaagattctaaataatttggaatggtgagaaaaattaagatgaggctgaatacatataattctcactttcataaaaattgtcttttttaagtgaaagagaacattctaatcttattttctataaaatgtctttgaaaatgcaaaagattattattttcttccattgaatttatgaaagttaatgagtagaatttcctgcagatgtctttttattatttgagaccaaaaatatttttattaaaatagattaacagattgagaaatacattttctttttacacatgttatttcaaacaaaataaaattttaaaaaatttactgtaaatcttaaacttttgttgatacaggtttatattatagtaacattaatcaattttaccttccagaaattaattttccattgtgtgtttttatccaagccatctatttcatatagtacttcttctataaacctgacatgaggcattcaaagtgattttcagaaaccccattaaaatggtgatgcactttgtttcatttaataatactgttttagaggaattcaacacattctataaaatttcctttcatttgtcctaaagtgactcttgattcaacactgctctgtatctactaattggacctctggcttccgactacacaatcacttggcttaatttttaggccaatctgggattactaccctgtcaaatttctcattttctttttttttaaatatttattttaacaaaattgaataaaaagatataatataaaattcatcattttaaccatttttttatgtgtacagttaatggcattaagtatgcccattttctttggccatagttaagtaccaattcctcctggtggcaggatggatcttctcaaggaaagtaatattgtcactcagtgagatataatgaagggagtttgggaaatcaagctctgacttttgccttcattttaatccactggattgctaagtgggttatagagattttaaaagtccattataatttctgagcattattagataaattgctggtgtcaaatgttaaacatgaaagtgccaagagcttaaagggtttcatttcttgtaaacagaattgggaaaaataatgatttatcctttaattaatttcagatgaaattgatgttacttggatgctttcctccccagtattgaaaatgtttcttgtacttaaaaataattctaaccataaattgtttcctgattttttattaatatggacatatatcattctaatagctttatcaataaattcaaagctctgccatcagttttatctgataataaataaataaataaataaataaataaataaataaataaattttatccaaattatgaaatatttactatggagtgctcttgaatactagttacttttgacaactcagaaatccttcttaactcacatcctactcaatacttacaatttcctttattcgaagacaactaatcagtctgtgatcataatcatctggccaagtataggttcattttctgtaataataattctcacatgctacctggcagggactgagaacagaactgagagacaatgaccaatcaaagtacctcatcgtttttaggaaggcaaaaaatacacgtggcataatgtttgtagcctatgagttgacataccagttagttaatatcatgtgtcatcagaaggacaaataaaacatcatagagatgctgaaggaaagagatatgatacaaattgttttagttattaagataaaaaacatctacattaatattactgtttattcggacacctacatatctaggtatggaatcaaacacagtcaataaatattaattgaggattactatgtattaaaaatttcagtgtgtacaagatctcctactggccttatctaaacagctccatcttcatgctattggatttctcatctactaactaaagataatattagattggtacaaaagtaattgtgattcttgccattaaaggtaattgcaaaagccacaattacttttgtaccaacctaataatatctacattagagatttctatactgctcaaatgaaataacatatgtgacaatgttaaaaattttcaaaactccatgtaaggattaattcttatagttgctaaaatattctaaaaagacaatgtaatgcaatagaaaaataagaaaagaagtagaaagtttcactctttttttatttgccttgccaatctctaaccacacggccttagcaatgtcaattaacttttacaatcttgccaacttcaaaagatcaaatgaagatatttgggagagtgctttctaactaactttacataatatacataattcccatcaaaggtcaaatgctgggagacagaaagacttgcctttatctattttcaaatgcttttcttgcttaatgctaaagagatatccaaaagtaaaagacagtgacaatgatatgaattgattatgctcatttttcttttcccagtgcaaatgctggcctggattccaactgaaggatgacggcaaaacatgtgtagacattgatgaatgctcttcaggctttccctgtagccagcaatgcatcaatacatacgggacttacaagtgcctctgtacagatgggtatgaaatacaacctgataacccaaatggctgcaaatcgctctcaggtatcgaattgaacttgcccactgatccaacctcagttatacatatggatcctgaattttatagccgttcttattgaattcactcctccttgatgcttctgaaaaatcaaaattcttctctacttcccttgatatgagaatctgtcactctgattttgtatgctctgttcataataacattgccttatggccttgtgaattattgagtgttttctagattttgagagtgcccacaaaaaaaaaaaaaaaaagaactatctctagcactgcttcctgctgaatcacatgttcttgggagcaagtttggctaaaactgttaaagagactattgtgacattattataatatttttcattctcccctccaccatacatacatacatatatgctagagagaacaagttaacaataagaagaagcaacaatagtaataataaatcagctatataggactatttgaattcttccagtgattcagcaaatattgttaaacttctttttattccaaggagtgtatttgatcctgtaaattatacatttaataaagcatggcccataactttaattctttaggagagaaatcacagatattaaaatgatacaaagcaataatatgatgatgactgttaaatgggcaaaaaaatggtgactaagggcatctctattccgcttgtttttaagtataataagtcaaatattattgccagtttcttatataatagatgttcgtcagtggcaacatttaaaacattagctgtttttttcaaccactttaataaaatagctatcagagatattaattttaaaatatgggtttttttaatgggttaaaactttacacattatgaagaaaaaaaaattaactcctttcaatttttcattccaccatcacttatcttccttccctgaatcaatttgaggattatttggagacaatttttttttttttttttttttttgagacggagtctcgctctgtcacccaggctggagtgcagtggcgcgatcttagctcgctgcaagctctgcctcccccaggttcacaccattctcccgcctcagcctcccaagtagctgagactacaggtgcccgccaccacacccggctaattttgtttttgtattttcagtagagatggggtttcaccgtgttcaccaggattggagcccattgtttaatctaccaatctacttgcttcagaccatcttaatgcttgctacataatgcatttagtgacctgggacaaaaagaagagattaaatcatacaaatgaccaatgtttccattactttaaacattaataaaggattgtgtagaggagatgaatagtaacaattaaaatatgggtcttgttacattatgtatccacaccatagttgtttattattagcaattatacttagaaactcatacaaattttaaatataaaaatgtgttcttaaagcatttatgcttgttaaagcataaatcttgcactacagagattttttaaaaatgaaatatatttaagttgtaaagaacagaattgcctaagcagtgaagtagaacatgactgattaattttatatttataattgagaaatctattgacagagtggcaaggcaccttcaactcgagagccaattctgtgttgagaagtattctgagtctcagtctggcctcaaaaagaagatgagaatgactaatttgggatcccatcaaggatgatagaagggggtatttaacatgagtgacatagtatatactgaaacataatgtcatacctttggtattacatattaattacaaaactaaaagacaaggggagaaaaataatgatttcaaacaatttaaaaaggacaataacggtataacaataaataatttataaaaaatccacattcaattatgtgattacttttttagtgtttttttttctaatttctatcaacattacgttttttcatttggcaaacaagtttatgaatgtgtcttaaaaaaaagatgttaaaatgcttgggcaaattattcaccaaatgaatctaggattataaccactgagaatgtggtcaaattgacgtcaaattatccagatacatatttaaataaatagaaaagaaaatctttctgaaattctctccttcaagaaatcgttttgtttccaaatcaattctgaagagaaaccaaacactagtggtttagagggtctcctgtacgttgagaatgctcagatctttatcacgctctttcccagattctaaagtaaatgagatactaaaagacattggacaagctgataaggtagaaataaagactattaaagcattagaaaaaaagacacatgaggaaaggtaaaattaacaaacaaagattttagaacctggagttcagaaattatttaagacaagtcctcaggcaggtaaaagggtatatatatatgcagtgatactcttggtcttcactgaggtcatcctgagagcattagccacttgattatccagaaaaaaatttctgatcataagaatgttttagctgtactgtaggtttctaagagaggtgaagattatctttttctgcaattcatgcagacaatcagattgtaacagcagatattttctactaattccgaataaattatctgaatgtcaagaatattgagaggaagcaagggatgcacttagaattttctaaattttctgtactgcctgggcgtgtgctgcctcttcattctactgccaactacgttgctcagtatgatcctttttaaaccctgaagctaccagatcagcactgcatttgaaatcacattgctgctaaactaaactgaaattatgcaaaggggaaaagcatacatacttaaagtctaatatgttatttgtgttggtgtttagatgaagaaccttttttaattcttgctgatcatcatgagataaggaaaattagcactgatggctccaactacacacttttaaaacaggtatgacactcccaagatgacaccgtaacatttaacatgtgcactaggtatgtgttagagctgtagaactacctggcaattagagtttgtgaagcatatttttagttgtcaggagaaatattttctttgaaaatatttagtttgtatctgttctgctccaaatttatctttgcctcaaactgtgtaatagtaacagaaatatgcgaaagcactgtctagaacaagtgtgccaaaattaaggttatttctcatttttctagtatgtttatgccagttttaagtataaacgaagaccaccattcctgtggtgtattttcagcaacataaagaagatttactttcctaaaaatattttgttactcattgatagattcctccactgctttttataatagtttcgttcatttttcttcaggatttagtctcaagtgttaaatattcactagctagtaggatatttactcatcctgacagagttggattctttagtcttcctctatgtcacaggttaaaaataaacacgtcagatgaaaatccagatttctggctactcaggaaaaaaacagaaaagtttattagggcagcactcacattcctgattggtcaaaatccaagctgtgtagcagctgctgcattgatagagagccctgctctccagttcaccagtgttttcagactttccttgtgcttaagacatgtacactcgccttatcctgaatagccaggaggtttacacccttgttctgagtatggagtgtgccaccaacatccaccatatcacactacttctttctttaattataaatcttacaagactgagtaaaatataaaatattgttatgttgtttataaaaaactaacaaaaatttaatcaaaatataagaatgaacaactatttaagacataaataacataagagaaatacttaaggataaaacgtacatataactgcttcaagagggaaagttttttgctgcccaaatagtttcctagtttatctaacttgatttaatatatttttttctgtatttttaaactttttcctatgcttttaaacttatatcaaaattataagatattaaaaattatctttcttgggatatgacttcacagcccttctaagtctttctataaattcaaagttaggtgcatcagacacatattttctagtatagtctctggaacaaggacatgcctattttttcactaggttgtgtatatatatataagctgtatatatatacacacacacacatatgtacataacattctgaccatttagactccactatctcagtttaaaggaataaagttatctctttagaatatttttaagctcagctgaaccataagtttaactaatatagaacaatattcattatcttcatgacagagctataatagagcttcagtgatagcttcttgcttcattttcctaccttgtagctcagtacatgtctaccagcattccttttgttgtctttcacagataatgtgttgtcaaaaattgttcttaatggaacaaaatgattttttcctctatgcatcatttaagtctatttcacataacagaactactttaatgctctttttttaaaaaaacattttaagatagttcttttctcctggtggtatcattttagactgttgccagtcattagtacctaagtggggatgagtttcggatactttcttagtgcagtacatatgggaatgaagaaacagtgaggatgatgaaaacgttcatgaaggatctgaacacacctatgtctttggaaagcaattgataatggtgcccattgagtaaggaaatagagacccaaagaacccatggcaagccttctgcccagttttgcctatgggctgctgggaatatgtcatttctttcagggaacatatttttactcacagtttcatcacagtgttatagaaattttaaaggagttctaggcagtagaaaccattatctttgtccagagagtctgtccacatatgcagaatgaaatagaacatagaagcaattatctctgcacattttctcacagccaaaataaatgaaaagacaatatccttgtcttaactatttggaacttttatgtgcagctgattagcaagaatgattgattctaatatcacaaattttattctctttgttgtagtcagtaacaatctcataaagttttattgcataaaattataacaactggtggagctttttcttgccctctatattctacaacataactgtagtaaggtcagctataacttaaattcatatactatatttagaaactgtacttcagtgacatacattttgggaatgaaaattaatcaagtacctttccaatatgttctccaattcaatttgaacagtgtctttattccagtaaaattgtgtgagaaacaaaacacaatttcctaaattaatcatctcgaaccaaagagtgcaagtctttagctacagaaatgaaagaagcaaataggattctgatgaaacaaattttcatctctgaaactactgggatgactagtttttagacattattttgaccatgcccctggctgttttaatgtttcttgcatatgattctgcaaagagaccattgcactgggattaagggtaaagctgtagaaaaatgaccagcttggctagatagatatgttggaatttagagcttccatttttctgcatttgcagctttaatttattatagttgacttactaaatttggaattggagttttattatctaaattgattattgtaaagaaggaataggataattctgccatgactggggattgtgggtaaatctttgctcaagttagagacatgtttctctctgctttttccctgcaaagctctctaatttagccacctgaattgccaagccatcacagaatcctaacttatttacattattgctctggagagaaaagcagttgaacagaagggatattgtaaactactattggaatgaatttattaagccctctacaaacttgcctggaacacattcaatttatattttagaactttgacttactttgcataggcaacttcctacatatatatggttatgtgcatttagttaaggagttctccagtttttaggatgtaaatggatatttaatgaatcttttgaatctgtgactgaatatcagttacccttctttagcacttatagtcattattcatgatttatagtgttgtcagtaggaaagatacttgcatttattcatcttggcttagcaaggaatttgcactgagctatattattgccttgtgtctcttgtttatgacctatggcacgagatttttgtgaggttaggttattacaggttgtctttgtaatctggacctcaagaaaatgagattgctcattttaagctaaataaaagcataaaatttgaacctatgattttaacactattattactaaaatttagccctgctgtgagaagggaaaataagcagtatttgccagaaccttctcttatttgctgctatacataggacacccttagtcttgaatgcccttggaaaaaaatatctgaagagtaatcattagccttggcttgtctcttacaaagaactatttaaatctaagtcagttttattattatcatcagattctgaattttgagagtagatgttgaaactaaactcagacctgagatttactttcctctttctccctcctcccggcaaccaagctaaaacaaataaaaaacccctgcctctctgaagatgcttgtctctacccataagactacagctactcatacatttccctctaaaacaatttgagacatagcatcaactttacggtgaatattgatgtaagcaagctctccacagatataaaaacatggcagagatctcttgaggttttgccaaatgtctataacattattttctaatcaatagaatgtatatattaataaattactcagtccttaaggtagtaaatgtataatctttaacaataagtcagaattaaactaattcctaggcaatcatttgaataattctgcagctaaaagattcctagatcctggatgtacagtcctcaaatcgaatcaaatgtgagaactgccaaaccaaaaagctgtagcatccagaaacccatcaattgaatttgtgttctgttttgctgcctgctaaaaaatgcataaccatgagtctgaagggaggcatttcctcacatttccaccatgtggaataaaaacatgttgattacccagttcctccttggtcaaatactcacccaaggttgtaacttttaaattctaatatcacactgtattgccaaggggccatctgaagcaggaagaaaggcagctcttttatattgttgttgggacaagagctttgggggaaagtaaaatttctataccttctcttctgactcatcagttggctgtccagggctcatcttaatcagatgatctaccttttcaatttagatatatgcttttttcaggctcttccatggaacagactataatgacataaagtttatatttcatattaacctaaagtggaaattctaaactttatctccttaaaagaagttatttttattttcacgttactggctatttatttaaaaccattgtaaatattttgaaattttgtggcctatgtggaaaatattttcaaattaatatagtattttttaaacatacgatgtaaggaaaatgtgaatatatgatacttttaatgagaactggtagcaaatactttattataataaatagaactatttagtttcaaaggaagacagtgattcctgtaaactcctaaaacattttataattatttctatgaactatcattgacaacatagtcttttttattttcagggattaaacaatgttattgctatagactttgattacagagaagaattcatctattggatcgattctagccgacccaatggcagtcgcataaatagaatgtgtttaaatggaagtgacattaaggtaactaaatattacaatgatgggattgttgaatattataccagtatgattgaattgtatagaaaatgttattttatgaccatgatattactcataaaatgcattagggtggtttcaatttcacatttgtatagtgtgattaaaactttaaatatgaaaaatgagaccttttattcttatgtttcattataacactattacttgcaataacataaacatcaaattgagtaaataaaatatggaaccttattcacaaccctaggaaatgggatgggtgctttcagctagaaggattagtgcctgcaattcaattctgttgatttaaataaaagagaaagttgagtctaaaactttgtaatcgaaaaagttaaacattacagtgtggattgaaattatgatattgttaaaactgaacaattacagttgtaaataattgaattcatttgtgtaaaatcatgaacgtcctgattggagaggatcacatttctgtcacagttctgtcatgtgtatgatccatgtcatattctagatatgagcaacttggtaccatcttttgttattctgagttttaaaatcaaattactaatactatatatacgcattaaaacatattataaagaagttttaaattcaagtgaatgaaacccatcaattactttaacttttttgtagccatctataatatcatacataatttcatttttggtgaaagcaatccattttgaaaatattaatgagatcttaaagtgtgcatgtacaatgatgaaacaaatagtaagctggattcaagtgatttaaagtagctgtatttaataatggtttatataataaaagatcactatataatggtgatagattaatttgagccaacccaatggttagatggaacaaataaaccgatgagatttttgtttttaaatttattttccaattagtttaaaaactgtgaagattatattactcaaacttgatcatatatttcattacaatacattaaaaatttttaattacctttatatttttttaagatactttactatttttgaaagcatattctctactgccttgccactactattccattactactttaaatcacctatttacataaggttatgtaaagataaaatacatctttattcccttaaatttattaattcacagattttcatttaaatagccatgccaattttccaaatttgaaatgtggtgggtaaaagaaaaacagatgtcttgcatttaagtataggagattgatatcatttattgttacaaatgtgcatattgccactttcatttgtatctttattattgatggcattagggaaaaagatacatttaaaattttattggcattttcttgtctttaactgtgtaactgttggcttctatatagcttcaagttttatttgacatatttctaaaagtactgggaattcagaatgccagcgatatagatcaaaaattgttgatcattttatatatattatatttatacatgcaaagactatatttcatactgtatttggtatattcatggattaaaattgataacagcagctgaatgtgtacattgttacctcccttaagctaggttcaaaataatgcctattctcgttggtgttttcttctctccttgtagttaactaaataggtcaagagcagtagagagagtgaggaatgctactgttatctctcccaaactggttaaagaaaaataatatctctaagtttgtgtgtgtgtgtgtgtgtgtgtgtgtgtgtgtgtgtatgtgcgtgagaattttgtcccaaattttaagaggatgaatagattaacaaaaatgtgaacaacaaatgtgcagctctccaacaactttttttaaatcattttatttaaaactatgtgtaagttctagggacctaattacacattaggtaatttctcacaaacaagtaagtaattgtattgcggtcaattattctcttcttatctaagttccattctttacatttaaatggaattctatatctctgtaaaaatcaagaagcaattgctcacttcttattttagggatttacgctgttaaccttttaaattcttgttttgtaggtagttcataacacagcggtccccaatgcacttgctgtcgattggattggaaaaaacctctattggtctgacacagaaaaaagaatcattgaagtatccaaactcaatggcttgtaccctactatactcgttagcaaaaggctgaagtttcccagagacttgtctttagatcctcaagctgggtttgtaaaaactgttaaaaatcttaaagtttaagactggattacattcatagtagtaaatctagtactatagatcattaacatggaaatccaatgtaacgtgtaagtgtgcagaaattctcacttagaaatagaaaaaaacagtaatgtgattatcacaatgaaaggaataaaattaagatgattgaattttacagaaactatttttttaaagttttaaacacagctattttccaactagttgataaatccatggtagaaatgaataaaacatacagatttcactgatttaatgcctttaaatcttgaaggaaaggcaggctaagaacaaattcttagatgatgttttgcagtggttggggtagtcacaaatatggacaaagtaatccctgcaccacttcataccaggagacataagcagtatccatggataataaatgacagggtgcattatcatgtgccttcaagatgaaaagctgaatgggactattgggaagagtttgtggtggatccgtttcatttgcatttcattgcaagaatggagagaagtcatagtaaggacccaggaccacaggctggagatttcaaatgagggatgaacacatctgaaggtgtcaaagctgtctggtgtatgtttgctaaagttctatagattatgaccattataattcactttcaattatgttgttttgctcagtagagtgtacataactttttaactttttgcactgtaatttagagtgattacatgctccaaaatgatctttggagaagttcaacctactcaacatacttggtaaaataacaaatttaaagaaaggttgatgttttgaaataggacacattcacagtagcaagtgttaggataactttggtactccaaattttctgcaatttaaattaattaattttattcacatatttcaccaaaccacagcttttatcataccatatgcaacaattagattttgcttctcgttaatgtatctctgttaatttttttggtccctcatgtttataattggcaaagtaatcatgtcatagtatattttatagcttaactgtatacattaatttaggtaaaaatagtacctaataggagaagctttgtactgtgcacgtatttttgttttcaaggtaatgtgctcattttaacttttcactatataattatgtaatcattttatctttttgagtattttatttaccatagcaacagaaggttcaaagagtatcaattttattttaatttaaacggaatcactagaaagtctctttatatgtatgttttaagaaataatggccagatgtactaaatttggctatcatctattcattcttaattatgtgaatatttcaatttcttggatattttataagaaagtttatttttgatttttgatagctgggtgtggtggctcacgcttctaattccagcactttgggcgccgaggcggatggatcacttgaggtcaggagttcgagaccagcctggccaccatggcgaaaccccatctctactaaaaatacaaaaattagccaggcgtggtggcgcacacctgtaatcccagctactttggagactgaggcatgagaattgcttgagcccaggaggcagaggttgcagtgagcagagatcatgccactgcattccagcctgggtgacacagccagacagtgtctcaaaaaaaaaaaaaaaaaatatatatatatatatatatatatatgtgtgtgtgtgtgtgtgtctatatatatgtgtgtgtacatatatatatatatatttgagtgtctgaacaattttttttcttcaaaatcaatatggctggcttagcttctcatttcatgctattcaatatgcttcactttctaatgaaagaaacattacctgtttgctaatagcagtctgtggtcttttctatttatgaagcaaaacctgtgtcctattctagtgaatgcagctgaatctattaatagctttaggttttatttctcccaggttacagttattaccccataaactgaaagcagccttaagttatcatcaacataaacccatccattaaaagtgtcaattaaaatagcacagtacaaaattattatagatgttataaaagactccattgatttcatttttggataatatttggattatgatatagatatgtcatattataaccaaagaaaaaggtaaaagttggatctctttatgaaacaattaaaaacaactattttaatggataaaatttaatggcacctttttgttcatgctgtttgcctagttcccctgagtgagaaaatcaggcaacttggattttagcattgatgagatgagctctagggtgaaaatgccataactgtataaaatattatgcaatcttgcttcaaaaaatgaaaacttaaatttaagattaatagaaatgcaattgaaccttcctatatcagattgccactgcgacttgcatatgttttgattatatcaaaactactgactaccgtttccttgagaagtatgatttctgtcctgatatttagtgaagaaaaggtaagaatttgtttaagggagaatgaagatcattaggctgtcctatgtattagagcaatgatacttttagaagatgtcttgggggtcctttcttcattttaataacagtatgtcaattattacaatagcactttagatatggtatttagtaggaacgtaaagatacaagtagacagaaagtcttctgagctgttatatttaaatccaattgaaatcctaatttttcctataattttatcttaagcttcttgttattttgtgtagtgtggaaatgagtattctaatttattattaatttagggtaattgaaataatttaccttcaatattgataaaaattacctgtatgcaggatatgtataagcattttaaaagagaatagagaatgtaaatatgttaaaactctgctgcaaattttatctttttgtataattaaggtgtcactttagttaatcataacaaaggccattatgataaacattaaagtgaatgtatgatatgcctaattaacagaaaacattacatatactcattcatttattcaactcatatttctggaatatttagtatatgtctggcactgttggtaggagtgagaataaaaataaaaggcatggtccctcgtcttcaagtatgttacactctaaaataaaatgcatggtcccctgtcttcaagtatgtttcagtctagtatgtaggtagctgattaaataatcacaattcaatacaataacttttaaggtagagaaaatgagaagtgtttctgtctcaactgggatcagagaaagcttcctgaacaagaatggtagagtaagaagtagctgagtgacgtggtgctctacagggcaagagatattttttggcaaaaagaacggtctctctaggaaagaacagacacacagaagagtgtggcacatccaacaaattacaaggaacttatacagttggaacaaattaaacatatgtaattatggatccagtttacttacagagtaaaggaaagctaggaacaagtcagaacataatacaaaatgacagcaaataacaaacattacaaggcttctgtctttggcaaacaggtagaggagttgtccccagaatatgggaacacagaaaaagagaaaaatacaagaaagtgaaatgatcagtttgtagatctattgggattgggagttcccaaataataataataataataataataataataataataataataaagatggctaccatttctatagcattttttgagttagaaaactttatcagtttatcacttcagatgcatgtactgtttatccagagtctctgagaaacatagaattatttgtattactttccttatagtttagataggcacatttaaccacgaactggctaagtgactttctcagaattgtttaggtgataaaatattacactggggatttaattcagttttcaggctttggtcccagatttttcctattacatcatgtcagagtttccagtaacaaaataattgtggatcataaacatgttgtgcaaaaaccatctgaaaaagggatcaaggaaaaaaagaaccccaaatcctgtagtttcttccatgttgacaattatcctttttaaaagatttaaaattaggacaggtaagggctgggcacagtggctcacgcctgtaattcctgtactttgggaggcctaggcgggcaggacacatgagatcaggagttggagaccagcaggccaacatagtgaaaccccctctctactaagaatacaaaaattagccaggcctgttgacacaggcctgtaatcccagctacctgggaggctgaggcagaagaatatcttgaacccaggaggtggacgttgcagtgagcccagatggtgccactgcactccagcctgcatgacagagtgagactttttctctcaaaataaggtaaaattagtacagatgataaaagttttttggaaatgaagaaagctgcctagatcgttaccagcatgccttattttaaaagacatactttcatttattttcttttactaaaattctgacaatagcctgttagaggccaggcacggtggttcaagcctgtaatcccaggactttgggaggtcaaggtgggtggatcacctgaggttaggagttcgggaccagcctggtcaacatggtgaaaccccatctctactaaaaatacaaaagttagccgggcttggtggcacgggcctgtaatcccagctactcaggaggctgaggcaggagaattgcttgaaccagggaggtggaggttgcagtgagctgagagcacgccactttactctagcctgggcaacagagtgaaaaaaaaaagtctgttaggaaatccacaaggaaatagtaggtcatgttttgaatttgaaatatatgttaatgaaaatatgtgaaagacacttactcagtattcatatccattattgccaatatggataatgacaatgcaaataaatttagaaagacacattttaccctctgtaacttgatattttagaatgtccttcagcatttactatagttggaataactaccaaattttccaagatgagcagaaatattacttcctctgtaaaacattttctaattgtgcctaactggtcaccacatattgaacatttaacatcatatgactgtttttagctgaaatgtctttctctccatctagaaagtaatttcctttagcacaaaggtcatgtcttaatcattttttgtgcctaacacggagactgctaaattcactgttgaagaagactgatgaatgagtaactagatgtacacagagaatgaggttatagttacagagaccttgtgcctgcacctatgcacaaaccaatacattggtacgttaataacctgcatgtttcaaagagaagagtcataagggaacttttgttgtgatggaatgaaaggcagaccaagatgaaaattcagtttctgatttctgtagaggaacacagaaatatttcattaaactatatattcacataagaaaaacttttttaaaccaatttttaaaatctatccaaacagttcatgtcagtatcctcatattcaggcaaaaacacacagggaaataacatatatggttaattttataattcaaagtcagagataattgcaggtggaaggaaaaaatttcttcaaatttaatacttgaattcagagaaaaatagtaaaagctgagaaagacttctatttaatcacttttatagaaatacaatgtataatattcaactataaaagacattctcaaattcacagaggcctattgttatggttacaagcagacattcttttatgtgcttatacttcattatatctcgcagaataggtactatttggggctgaaattttacatatgagattggggtaaacattgcatattatctgggtgcaatttagatctcttctttcaacattttcacggcagttgtcatttttagctttaattatttataatacatttttacataggtaatttttaagggtttcatttcagaagttaaaattaccattatgtttagcacagtcttattgacaaatttgaagaaaaaaaaagtatagcaatagggcctaagtatgaaaaggaaatgatatctagccatcagaagttagctaccacttattgagagacaaaataaatcctgtgtttatgaaggctcatgcttacctgagtacaggtgaacaacattttccttcagtataatagagtattatccataatattcttctgcttgacgaatacttaaataggcaaatcatgtaataacttacataaaatcaaggcaaatcatattcaaagatacatacaatccagatgcaataggtagtctagtaggagagtattactaaactaaaaatatattaatatgcatatttcctatttaagtcagataaaataataatagctaatatttgctgaacacttgctacatacttatcaatgttctacgtttgtttcatatattctctcatttaatactcacagtgaccctgtgagaagaaactgtaattgcttcttttagacatgaggcaatccaagctcaggaaggctaattaaagctcctaagttcacataactagtaatgagaggacctgggatctgagcccatgtaatctgtttctagggtttctttgcttcagatgctatatagtgcttgttagaaaagaagtcagtgtacgaatctagaaacctgagtccttgttccaagtttccccatcataatacacaaagcagataaccttttatattctcagttatcactttatcaggggaagctttaagctatatgatctccagtaccctcaataaccagaattaaaattctaaattggcacggtggctcacgcctgtaaccacagcactttggaaggctgaggcaggcggatcacaaggtcaggagatcgagaccatcctggctaacacggtgaaaccccatctctactaaaaatacaaaaaattagccaggcgtggtggcgggcccctgtagtcccagctactcaggaggctgaggcaggagaatggcgtgaacccgggaggcggaggctgcagtgagccgagattacaccactgcactccagcgtgggcaacagagcgaggctccttctcaaaaaaaaaaaaaaaaaaaaaaagttaagttatactttgtcctaaaatctgaaagaaataaaacgtcatttttctcaagaaatttataaggtggttgtgaagataagttttttcttccaaagaactatttgtaagcacaacagtttttcatgccttcctccatctaggtaaaattattattcactcttttgtacttccatagtaaaaaatttttattagctgaaaagtgaaaatgtgagactgtaatgaaaaactctgatttgagctaaatttcacacaattcataagtggggagtaatttggagaggtatatttgggcccagtaagaaagggttttcattcgagggagagaatttcagttctggaactcttaccaaacttactgagtgtgatgtaacaaatgttggacttcatgaaaataatatgctttttctcttcttggtgtcttggttcatgatgatggtaagactaccagatgaaaaatttcaaaatacaaatgaaaatttaaaattgcaattatatggaagttagaccacttgaaatttgtagtttacttaagaaacattattattgacatctaataattttcaatgcttttattgatagcattgatcacatgtactgatcaaatttaatggaaaccctttttcacttctgagatatttaaattgcaagtacaattacatgtagagtagctaaatagaactatgatggcactctctgattaaaccagtttggatgtgttatttttaatgttatagaaatcactgaattattacttttaatttttattttcttatatgcaattcttaaaaaacataacatggtatatagaagcacaaataaatttaatcatatctaacatgtgagggaagctggaataaatatattacatttcagataaatcaaaaagtattatgttagtattcccaagattcaaggtcagtaaggcaaagagaattgttctgatttatttcaacaaggtaaactatctttttatttttacttctttctgattcagtttcttcttttgcatctcttctgtcatgatacctagtataggcaacaaggtacttctccataaatttattggaaagtactgaattgtatgttttcttagaagatgtatttcactgacgtattcacttttcaaaagaaaactataacaaaaataattcaagattttaaaaagcatagcatcattttttgaggggcttaggatctattattgcttgataatttgagattttcaaagtatgtttaaagttaatatgtatatacaaaaacactagggaggaattccggtattgccctatgtgaaattgacttagtgttaccagacccaagtttattttacattttgactttcagagctctttgaatctctgtttataacattacaccttttgtttaggttttatcagaaatatatttcttcttttttaagcaccatacttcattattacttcaatgatagtttgactatcaaataacttttgtattatctttataagccatacctttatgcaaatcaagaaaatgattgtcaaaacacaatatggtgtgtgttctttacaatgattatttaggttagctttgtatttgataagtgtttttattttcctgaaaactctttcctttttagtatgtggttaaaatatctgaacataattatgtctgtcagaatttatgagaaaaaatttctttaaagaatgttttagatttgaattgaatataccagttttacaatcatctaaaatattttcaaaccaaattattttgatgcaaatcttgtaaatctgaagaactaattgctaagtattatatctggcaaaaagaaagaatgaaatagagaaaaatctacttgtgttaacagattttaatttcagagttggaatgtgaaaataactttaaagatcctgtaactcaaatctttatgtagacaaggaaacatctaaaacataaagtaatttttcttactttgaggaaaaacacaaatggcttaatcaaacagagaaaaacgtctaagtaatctgccgcttatacgttatttgcattttatcgggtgtaatatttatactgaactcaacctaattatatagtatcaatattacttaattcacttcctgttttttccccacttttggaactgtcctatctagaacttctaataacataatgtaaatcactgctgtccagtagaactttctgtgataatggaagtgctccatatttatgctgttagatatgatgaccactagacacacatggttactgagcacttgaaatgtgactcgtgtgaccaaggagcaatacagttcatttcatttaattttattttaattagtttaaatttaaacagttataattggttagtggataccatatttaacaatgtatattaaggaaataaaatgtgcacctccataattccttttgaatttttcatagataacacaccaaaagagaaagtatatatagtgataattgtattccttcaacattgataggtatcttttgaaagtttacatatattagttttgaacatctataattggttaacacatgatattattatataatattgttatatatgagtttgtgttctaaaataaacatatgtttaaagttataagaatatttcaaatcatactagatgtgtaataaaacaccataagaaattttgcatcaaaggatgtttcttaaaagctgcaattcagaaaaatggcaagattaatgtgggaacagttgagcaaaaaagtaatatattgtttgttgttttgctcccagagaatctgtaaacaaaatcagtattgattttctttcctagatatttgtattggattgactgctgcgagtatcctcatattggccgtgttggaatggatggaaccaatcagagtgttgtcatagaaaccaagatttctagacctatggcactaacaatagattatgttaatcgtagactctactgggccgatgaaaatcacattgaatttagcaacatggatggatctcatagacacaaaggttggtccagtaacataaatattctagtattttaccaggtcataaaatatttatttaaaaatatatatttattttatatgctttctctcataaaacatatttaatttaaggttacattattatacttctttataaaaatattggtaaattagaattagatgtattcaaaaattatatgttatgcacaagatattttacactatcaatgttttctttaatctatttttctaaatagattttctagtaaatgggcagtagttttataaattaatatccacatgcatcccaactgaattgaaatagaaggttatttgcttgtaaatatgaggctattactgcaaactgctaggatttcaattttcttaaaaaactgagtaaaagtatagttttataagttatcagttaagctatgtacatgactaaagttattgttacctaatcacagcagcaacaataattaacatacaaaatagtaacagacaaggatataacagagaagatgtcacgtatagttaaacatgacacggatatagcagaagccacaaatgactcaaattacatcaaaacgttttaggtaacaggtagctttttaagaattagattttttcctgaacaaataaatgaatttttattgatcttcaccaacctagtgtcacctttgctatcaggggtttacatttccaaacatcacttaaaataagagtttcaaagcgaggtcccaaataaagtctgcatgttaattcagtttagcttatcaagttacttccttctctggcattaagcttaagacaaaaaccctggaggagggaaggatgagaaatggtaaggaagagaggattattcttaatcatcgagtaatactctgccagtgtgttccagtgtggaataaagcaatgagtttaaaaagaaaaaaggtaaaaggtaccaaagttacaccacttaataattttacctatattcctgtcagttgatgtttaaacaaatacatcttttcatccttctaactagtaatgttgacaggaagtttttagaggcgctttcttaagggtaagaacattgtaatacaaagagtgtagttggatgagtcacttacttaggtgttgacattccagttatggagataaaaaactcatcaggatgcaatttaagtgaaaagttatttaaagaacactttaggattttaattacagcaaaaggaatgttgacagattgaaatcacacctagcatttaaaagttatatctcccccaaagaatcaataatgaaatgttctgcctcattcttgggttgcatagttgaaagttttattgtgacaatcaatatttttcctatgtaactataaaccttttcatttttagcctccatataaagtgctaggaggttgtatatgtattactttctactaaaatttcattgtacaacaaaatttatatatatattgttattaggtaggtgactatttaaaaacactgcagcattaaatatttgcctttcatttgagtctttgaagtctgaatagctaaaattgttaaaaatattagatctattagaaactattgacttcatctcctacttattattaaaaaatcatgtcacttatatggtgactaatgctttgataaccttaatacaaaattaagtgcatgttaaagtgtcaatcataacactggtggtgactttggatagagagacatgtgtaacaggtagaaatggtactaaatgtattaaatagtaaaatatttggctgaaagatagtctagtatgatgttattaaaaatttcaaacttgattttgaaaatgcatcaagacttaaatgggaagaaaagtagagttgcagccttcagaatattttctcctgaaggttttctcagaaagactagtgaaaaattcattaagtgccttatcaggcacctgccaatatctgagcgcaggccaataattatctggtagttactaatgaggtactaattggagccagcctgaattatgccaactctaccatcaacgaaagaaagagccattaatttgccatgtttgtaaagtggaattggattattctacttgcatttgccccataaagacaaaggatgctatggtttcctagttgtttatttgcaggtggaaaatgagacatttatatcgataacttttgtgttacttcatcactagccacttttttaaaaccagaccaatattatttttctcatttattatatttcttaaaactgaaatctgagctaaccagaacgatgagacataccagtcatgacaaagtaatttgagaatataaaaaacatatgagacttttcagaacaacagccctttctcataagccaaattttaaagttagaccttggactttatggtttaaaaagttgggtattctttccccaaagatattccagtttacaccacagagtaattttataaatgaagcattattttattattatttgtctagaccaagaatatctgaggtttctaaaaattctgtgacttaaagttcagattatctccaaggtacatgtgccttacaatttgtttgagagcttccattcctctttctttgctccccgatctaccctaattcaccctcctatcaaatccacacaccacattgaaaacctgaacaagaaattccaaaatacatcggtcaatttactagcttaggaaaatttagatgcaatcttagtcacatgaacctctccctaatctttatttctctgtatcactctactgttattcaccatagtaacatatgatgtaatattaataatataatgatacagtaaaaaacatgctactgaataagttagacagtatattttaaattacatcttcattagtttattttattcattgctctgatttcttcctgttaactatgcccatcattcatttattcattcattcattcattcaatatttactgacctgtctttctgtgccatgcactatgctaggcccctggtgttgtaaagatgaatgagtctctaccttcagagaataactcaaatggcaaaacaaatatgcaggtaaagacataaattagattgtgggtaagaagtaggtgcaaaatattccaaaaatgcatgcagcagtactgaagactgctaaagtgggaaaatctttgagcagtttgagagatttagtaaaagctccccatagagggaaagtgtaagaaggagtcttcacacagagggaacagcatgtgcaaagatgtaatagagtcttgaaatagcatggggtttactcaatttgcctatgactggaagtcatataagaaggagataatgacactagatgaacaagggcaaattggggccagattgtcacaagccttgtatgctaagtaatttggaatttatccttaggtcacagggagctattgatggtgtttagttgatggagtgctgttattagatttgacaacagcatgtgaaatgaaagaccctggaagggcaaccaatttagagactgttaaaatattttaggagaaaatgtttgaagtgattatagctgtgggaatggagatacagtgttagattcaatagttatgtagtagatcaaattggagatatatgtaagcttagaaatactggtagtggcattataaaaattaagtaaatgatttatattattattgaattagctaggggaaaataattccaatatttgatgacttattagttttgcatatatttgtacatttttaaaaagaattaatagtgccaaactactcctaatttagatattcagaatctctatgttatgatgctctattttggtgggagatgcgttaattttaagagcaaaagtgctattctaaagacgtatttaaacattctatattatgcccttccctaaaaggcatttcagaaaacctgataatttaactagaataaagttcgcaaataagtgacactctttcctcctactctctcttgagacatggaataggtccagtgagagacttggcaatttgagggtgttctccaggtagaaatattcagtttttaaatacactgttatacaaaaacagactgatcctaatatatgaataaaaatattcttcttgtaggtccatatatttgggtttgattccttacaactcccaaactgaaaccctcctaggaaaatcttaggctttgattttagataagaagtaatacgcctttgctggagtactgatctttcagtgaaaggatctcctcaaactggagaaagcaaacctttaagatcttaaaagaagtctgggaacctcaaggctctgggtcaggttgggatgggatctactgctaactagcttattaaccctgaacaatgtagttaaattccctggacctcagttgcctcatttgtagaaataagggtgttgaaaaatatgacatgaaagggaagtccagaactaaaagtttaagcctccagttacatggatcaatcaatactttcagaatctttgccatttttttttttttttttttttttttttttgagacagagtctccctctttcacccaggccagactgcagtggcgctatcttggctcactgcaaactccgcctcccaggttcatgccattctcctgcctcagcctcccgaggggctgggactacaggcgccctccaccacacccggctaattttttgtatttttaggagagacggggtttcaccgtgttagccaggatggtcttgatctcccgacctcttgattttcgcccgcctaggcctcccaaagtgctgggattacaggcgtgagccaccacgcccggcccaaatctccacgttttaatctcaaatgactcttccttaatttaagcctaagagagagagtttggaaatctgtaataattaaatgctttctcattcaaccttgatgaaaatatcaaactgccaaaacaatccccagtcctgagtgttatcataaagattattaacatatttcaaagttgaacacttgtaaactaatcaaattaatgatggaggagaaaacctatactcttgagcattaccttgtactgtgcattttacacatagtatttattttgtctttcaacagacattttcttagcctaatgggattccaagaacaggggtcatcctcttatgaactaagtcttttattagaagcctactgatttcaagggactgtgcttgatgcaatatgtgctcttgtaattattctaccaacctatatatgtaataagtgcggttaaagccatttgccagcaagggaatatgttcaaagagattaagtaacctgtccaaagtcacagagctagtaatcaggagaatcaaaatttgaaccgagatctacctaattccagggactgctttctttccagttttcacacagcacccttgcttttgaacagacaattgaagattgaaacctacttgttagagcctctaatattaatagttatagcataagtatacacttacacaaataaagttgaatccatacctgaaatctttcagattgattcaagtattggacaggtaaattgcataatatatgaggaaaaaacacacaaaaacaaagccactagaatataattactataaaagaaagcatgcatctcagtaaatcctaatattttttgtgtcttcttcaaaatgaaaagagcaatgatgttactttaaaatgtataccctgtgtcttagtctgtctgggatgctttaacagaatactattggctggataatttattgcatacatttgtggaggctgggaagtccatgatcaataaaagtgccagtagaatcagtgtctagtaaagggctcactgtctgcttcatagatggttccttgttgctgtgtcctttcacagcagaaggggctagtgagctcctttgagtttcttttataagggcaccattcccatttacgaggatagagtcctcatggcttaatcacttcccaaaggcccgcctcttagtactgtcatactgggtattaggttccaatataagaattttggaaggacatcaacattcagaccatagcattctatccctgggccccaatattcatgtccttcttatgtgcaaaatacacttatttgatctcaatagcccccaaattcttaacttgttccaacactaactcaaaagtctatagtcttctctatatcttatctaaatcagatatgagtgaaacttaagatatgatttatcgttctcctgctgtgaacctgtaaaatcagacatgttatctgtttccaaaatacaatggtgcactgggcataggataaacatttccattccaaaaaggagaaagaagaaagaggtaatggattctgaccaaacaccaaaaccaaaacggaaaacattaaatcttaaggctccaagataatcttttcttaagagcataactggtgagagctcagaagaaggggaaagctgtagagaaagcattaatattctcgaataaaatcttctaaattttgccttctgaacacactggtgtggcgattgggccccaaaagttccaggggggcctgcctccataattttgctgagtgtagcccattttccacctctcataggttggaatctcatgcctgtggctctcccaggctgaagttgcaagctggtggctctagcagtctgaagtttccgggtgactccacccccacagctctgcttggcattgccctataagggacactgcagtggcccaaccccatggctccattatgcattgccctaataataggagctctctactgtggccctaccactgtggcagttgtctaccccaaccccaaggctttctgtggcattttttgaaatttagatcaaggcagccaggcccttgctgcatgtgcactctgcatcctggtggaaattgcagtatgtgaacctcaccaagacttactatatttgacttccaaagggacagcctgagttgcatcagggcctgcttgggccacagctgggctggctaaagagcaccacactgaaaggtggggaagagagcctcgaaattgttctgcttctgagcctctggcattctgggcctgtgatggatggggtagccttgaagacctccaaaatgcttttgaggtcattcttacattgtcttgatagatagcacctggcttccacccatctatactaatctctttatcaaatgatcccttggccacacccttgatattctctctctcaaatgtttgttcattcttaacaagatggccaggctgacgattttccaaatctttttctgctttcattttggttataaattccatttgtaattcctttctctccttgcattttactataagcagtgcaacaaagccaagtacctcctttaacactttacttagagatttcttctggcagatattctattttattgctgttgagttctgctttccacaaaacactaggatgcaaacacaattcaatcaatttctgtgtcagtttcactcatgagggtagaattctcatgacaatcacttctcaaagcctccacctccaccttttaagactttttttttttttttttttttgagatggagtttccctctgtcccccaggcaggagtgcagtggcttgatctcgactcactgcagtctctgcctcctgggtccaagcaattctcctggctcagcctcccaagtagctgggattaacaggcacctgccaccaggcccagcaaattttttttttttttaatttttactagagatggggtttcaccatgttggccaggctggttttgaactcctgacctcaagtgctccacccacattggcttcccacagtgctgggattacaggcatgagccactgcaccaggcctaatactgttatatgagatattaggtgtcaacatatgaattttggggagacaccaacgttaagaccatagcaccatgatttagtgggatagttgcatattagagtttgctatgttaaagtaactacattccctgaatataagaaaaaatttgttataaatttgagattttttattgattttatgcatttcaaaaagtatagccttctctgaatggattgcctattaacaaaaaatatctcctgagaaaaattttagaaataacattgcatatataccttagcttagagatttcattttccatttaatgaaaagaaaggtaaatattagaaaattctattttgactgaagtttatttttgaccacttgtatcaaagtaaataaattcagatttagttcttttcaattttggttgcttgtgccattgaacttcagatattttaggcaggtaggtagtattttggaaaagaaaaggctgaaaatactgtgtgaacagtaataacaaaagggcgaactaagaaaaagttacgtttgaccttgagtttttaagtttatttgttccaataaattgtttttttcaggatactcttcagtgtatcaaaaaattatttaaccttgtgttaagtcagttggttatgtacatattttatccagcatattggaaaaaattatactcttaactgttaattttctctgaacagtaatagttgggtatgattctgaactatagtttaccactgaactcttttatattttgtgagcaaaattgtttaaaatttctagcaattatattcactacagctcgtcatttaaaggataactgtttctatacccctagacctgaagagcctcatattaaagtgtcaatattgtagtctaactctattgtttgtttattgctctggaatccagtttgtgttgtgagggggcagttctgtgtttggatttaaaaatctaaatcataacccatgcagtgttagtctaattaattttggaaaaaggaatctagatctcagcatgttactggtgaaatggcatgaaatatgttttaagaatttgttctgaagacaaaaataaaaacactgaaagagacaaatagaatattttgtgttcacatattccgaaacccaatagctcttgcatttggatttttagaaaatttagatatccactgtagcccaccaaaaaaaaaaaaaaaagaaaaaagaaaagaggaaattgaaataatacttcccaccccccgacctgcactattttataatattctagagtgtttctttcttggtaagatattgcattttagtacttttgaaaaaaaaattctatcattcacagtccattacaaacagtagagttcacagggtattttataccaatggtgttgatgtgctgctgtttacaatacaataaaagttaatggaagggagcaaaatacaattcagttactatagaaatgtttctaaaccagtaaaataaattgaaattaactgccatttctaaaatgtcttagaatttcagtgtcaatcatgtctttcagttttgtcccttgaatacattaaatttgcatatatgtttagggagtttttttcttttttttttttttgcaaatgtcatgagtgccacatgcttgtaaaaatagggacattttaagtattaccctcatttgagttttcagtcattttcaacagcctcatctattccaaatacaaggggtggagtgtgcgaaaagaataagtagattagggatcagtaggtttacttcaggtccagttacttcctaatttaggcatgctgctttgccagactattgtgcattgttcttattcatagaatagggcttctattcattcagtgattctctaacatttcttaacgggaatttggctgaggttgaatctaggacagaggaggactgttctatcaattctctcacttactcttcctttttgctgggactacctagaacactgatacagtttggatattttttcctgtccaaatctcttgttgaatcataatccccagtgctagagttggggtctggtgggaggtggtgggtcatggggcagatcccttatggtttgtgctgtcttcatgatagtggtcatttaaaggtgtgtggcacctctccacgtgcatcttgctcctgttttgccatgtgatgtgtctggtcccccttcttcctctgtcatgattataagtttcttgacgcctccctagaggcctaacagatgatgccagcaccatgctgcttgtaaaccttgaagaaccatgagccaattaagcctcttttctttataaattacccagtctcaggtatttatttgtagaaatgccagaatggtctaatgccaacacatttgaaaatgcttgtaatatgttacactcttctacgtttttattttagaaatatatttataattgcaggaatatgagaagaccagatactaaactcatgtaaacaactatacttgatatgtgtcccagaggcaaatgcttttcaaaggcttcagtttttattaagactctctaacaaagaaattcctatgtatatgtgtgttgaatataataattcttatagtaagtacttatagtcaggctcagactatcacatttctgtgtactgtgaaggatttatcactagcacaatggcccagaaagtttcgaagcaaaaggaatatactttaccaagtgcatgaagcaatgttgctttgtttacttcacaggttagagagaattgtcatcatcctactaaagtatttttagtcagtcttgttttcaaaacaagtgtactacagtttagacagtctgctttataaaacttcacattcattaacaggaatactctttggatggtgaatattgaaatggctatatttgaccttctattataagcaatttaaaaataggtaagggaaaggaagagattaaatgatgttaaatctaatattcctaatctatatggagagtacatattatttgaaatgagaatgtggaggcaagaaatactagaaaataatgggccatggatgccttcagctctaataatggcttaaatctgaaaaagatttctaaatacagtatgaatttctttttttattttatttattattattattattattatttgagacaagtcttgctctgtcacccaggctgaagtgcagtggcacaatcttgcctcactgcaacctctgcctcccggattcaagcgattcttctgccccagcctcccgagtagctgggactacaggcatgcaccaccacgcctggctaatttttgtatttttagtagagatgttggttcaccatattggccaggctggtctcgaactcctgacctcaggtgatctgcccacctcagcctcccaaaatgctgggattacaggcgtgagccaccactcctggccacagtattaatttctatgcttccacattacgtattacacttatttaagtgtcccagtataaactactatactaaggagagacacaagtttattttggacatttgatcaatatcactcttcaaaagttagcatataatctactttcaggcactgtcagctctgatcttcctgcactgtgacctatactaaaaggaaaagctactttccatcccagcaagatctcattgaaggactatgatatttaatatcggaaaaataaactttcaatattctatcataacagttggaaatgttggccatccttcatgttcctgtcatttcttaatgcttttatttgttttgaaaaattgattttggaccttggtgcctaagttttatttgtgatactgtttgttactatcaagtaggattgcattaaagggtaagcaggcaaaatgttcacagaggccaaaattgaacaaaacacttcagagctgctcgttgtaggtttcaggaaataatttttttaaatggtttgcacagtaacaccaaaggagacatacataattattagctgagaacaaatgtccttggccctaaggttatataaagcatgatctttctttcccaggtgtttttaactaaagctctggctccacgatccttctctggagattagcctaccctggccattttcccacccacccactctttgtcactcttcatcaactagaaaccattatccacccaccctcccactggccactgtcatgaatcttccactttctttgtcacgttaaatcactttctaccgccatctaatattatcctgtttaccagactgcagtttttcatagcctttgtttaatctcaccccgttttttcactgctaattgtttttctttctcatcacttcttttttgtttttcacactatgctactttaagtcatgccctatcttctctacacatctcattgtgctcttattcttccagaaaaatatcaggggaaattattagtgtcagggtctctcaaaagaggggatcaatgagcatactttgttctctcttctgaagacagatggtgttttagtcaagctagatagtctgcaccatattactcagagaatggtgtcatggatgctttttgatttgggaagatatatgttagatgaaaaaaatatgagaaatattagttagtgggagttctagttatcctggctttgcctctttgccctcttcctgtgccagaaagctgacttatgtggactacctcacccaggctcttttacctttccacatcaagttggatttcctccatgaattgcattgcaaggacattagatagcagacagaaaaggaagtcagaatatttattcatcccctttccatctacgctcaactataatgatttagcagtggctgagcctgtctattaaagaccactgctcttgttggatggctttattcccctcagctgcatttttcactagcttctggtaacagacctggtaaaaagcaatgcatgatttgtacctttgcatgtccatctctataaataattctttattaaactctctgcaactatcatttaaagatatgttttctattttctgcagcaattctgactaatataaaagagattggaagggattaaaaataaggtgacaagttagaataattttgcagtattcctggtgtgaggggatatgagcctttacttgggataatggcagcaagaattcttttaaaaaatgggagtgtcttaaaatatattaaaaagaaaaagatagtaggatttaatgtttgatttgatatgtttgtaaattttaaagttttaggggattacctttccaaacatagtcatagggtgaagcataagttgaccttaatggatcactgattgtttaggtatttccttcaaatcaatatataaactctttataactcaagtaagtcaattctaagctcatgttactctgtaaacttgattccttcataaaagtaatagcagaatttggtgattgcattctatatcctattttttacttttgaaaatatgaataaagactttataaccttttattttttttttattttttgagatggagtcttgctctgtcaaccaggcttgagtgcaatggcgcgatcacagctcactgcaacctctgcctcccgggttcaagggattctcctgcctcagtctcctgagtagttgggattacaggcacccaccaccatgcccagctattttggtatttttagtagagacggggtttcaccatgttgatcaggctggtttcgaactcctgacctcaggtgatcagcttgcctcggcctcccaaaatgctgggattacaggtgtcagccaccacgcctggcctatagtcatttttaaataataaattacagtgattgctgggcataaagtaatattttaagataacatttagattcttaaagtaaatatggggagataaagaatggaaaataagatagtattactagtgaaatgtctattgacatactaactcagtgcagaaagccctgtcaaagctaccaatatcctaatgctgtatcctcccataacattaactatgagattttaactcaaaaaaagctgagaacggtgtaactggggcattcgtttcttaagtatttaaagtagattagtcagaaaaacaaatttagaatgatattacccagaaatatacttatttagcatgataaatgctaactaaaaaaatgaataatcaagagtattgtaatagagtatattcaagctgtgaggcaacagttaagccaaaaccatgttctggatagccaccttttctttttctttctttctttctttttttttttttttcttttttgagtcagactcttgctctgtcacccaggctggagtgcagtggtgcgatcttggctcactgcaacctccacctcccgggttcaagcgatggccactttttctatttgtcataattacattgagctttagcaggatagcatcaaactcgactcagggaaaaactcccaaaagaagtatttctttgatttatttatttttgccatatatcaacccttttcttctgaaagatatagtctatgaaataaaaattaggaacctagtgcttgagtggaattctggaaacagtacaatacataatgctgttacactgaatagagacttaactatagtaagcagcttttaaataggctttagatatatagtcagtacctgtgaaactacagcccacacagcagctctgtttattcttttttgtgtgtctactgaatacctgtaaatgaaagatttattaaatgtacttttcacatttctctgttagttaagcaaatgcagttttatatagacaactgcagttttatacagacaactggtcatataacttttctcttaaaaatgatagtcatcatcatttttaggcaacagtgactacttttcccctaaatttaacgacatctcagcattaattaagggtttgtttgttaaatgtttctttcataccttcacatttcatggtgattttttattagctccatgtacttcctgtcttagtctggtttttgttgctatgaaaaaatactacagatttggtaatttacaaagaaaataagtttagttggctcatggttctggaggctggaaaattcaagaacatggccctggcatccggtgtcatcccatggtggaagagtatcacatggccagagagcacactccagagagagctaagattcaaataccagtacttttatttactagtttttttctacccctcttttgccaagttacttaaattttccacatctaagtttcctcatctgcaaaatgaactttacttgtattagtccattcttacactgccctaaagaactatctgagactaggtaatttataaagaaaaaaatgtttaattgacccacagttccataggctgtacaggagacatggctggggaagcctgagaaaacttacaatcatggcagaagggcaaaaaggaagcaaacatgtcttcacatggcagcaggagagagggagtgtaggggggaagtgctacacacttatctcgtgagaactcactcactagcaggagaatagcaagggagaaatccgcccccatgatccaatcacctcccaccagatcactccctcaacactggagattacaattcaacatgagatttgggtggagacacggagccaaaccatatcattactactgcacaatagagtttttgagagtattaaataaaataaaatatataaattgcctctcccgctggcctagttcttgtgcacccaagtgcttaataaatatcacctgtagttactgctgaataattaaaaagacttccttttgaaatgctaattggcagattcttacaataactttatttttcttacaaaagtaaactgaatctcttatggattgagattgttaaaaatgatgattaactttttgagcccatatttaatgatttaactatcacctttgcatctaacgagattcacattaaatattttgaggctttcaacatttcctgtaaatttttattttattctaaaaatcttgaaatctacatataaggtgaaaggctcttataataatcacccatcaccaagattcaattaattattaacattttgccacatttatcttttttgtatgaatttatacagtcaaagaaaaatggtgggaatagtttatataaatagctcacacataattaattatagtaaagtgtccttttcattctaatttcacttattattttagtaatggtatctatgtctgcaagagtacatcgataattaagttgtgtgcacatctagatttttacatcaaaattcaaaacatctaaagtgtacaaatctggatttttgaaatgtttacatccttcatatgattagtatctgttctgagatgaatttctagctagattttatattatgaaagtattcagtgacttaatatatgacttatgttgaggtttctaattttatttcttttatttctattgtcttttagttgtagtgaattatctgataacatttggcctatcagaatacaaataaaaaatcaaaaaatttaaaatatttactttagttgataatataaatttacccagcatttaaaaaataaggctgtaaagcttcctataaatagtaaattgtatttgaaattttgatagtttttcagttactgctgaatgaggaatatgccaaacattaattttcagtcattaaaatctaattaagaaagaagtaaatattactagaaatatagtaccttttctcattaatgaacatgtcagaatttctaaaagtacatctcaaaattagtacagagaaatagtacgtttttataagttagggaattttcatcttctccatttattatttgtcagtcttgagaaaatagaagcacaaagaaaactctatcacagtttaaaattatttaaacccaaaccactgaacagatttaccatatcttatttactggataggaccctggattcactcaaatgagtaattcacatttgtgatgctcactctactgtttacatttaaacatcaggaagaataattataaaacatttttaatctgcaactaaactgttttatgactattaaatttgcataatacattattatctgccacacttatttccctctaccccatcccatctcaccttgcaagtaaaagtgctcataaaatctcagtggctgaaaaggtttatagtagtttcataaccactttatttccaggtagtagacacatttcttccaggatctataatttaatcattttacatgtgaaaaaagtagggcaatgatctttagatttaggtatttaagttaagaacaaccagaaggagatatatatgtatatatgtaaatatgtatatgtatatgtatatacacacatacacacacacacacataaatatatcaattatgaattttaaaatggtggatggtatttgtttctggtgaagcaggctttaatggtgaaagaatcacattcatttttttttccagtggttgaaccaagctaaatctgagcaaagctagctcctgtgcccaatcctgcattctcttaactggtaataaagaactttgctggcctgacaggttgtcacagcaattattcacacgaagttatgtagcagttgtatctgtcagcccatgtagtattgaatattttaactggcagtcttccaagactgaacattaatcttaccatctcctattacagtccctaatcaagatattccaggggtgattgcactaacattgtttgaagactacatctactggactgatgggaaaaccaagtcactcagccgtgcccataaaacatcgggagcagacagactctcactgatttactcatggcatgccatcacagatatccaggtgtatcattcttatagacaacctgatggtaattattctttccatgatttccataaatgcattaacatctttcagtaacattccattttttattatttcaaggttaaatgtaattttatttttgatgaagattactagatttaattatttagcatcactttatggaagaattcagtcaatatgaagtactgctcttaaggcatatgattagaagctcaataataggacaaagaattatggatttgttcaactcatattaagctaaaatgataataatgcatttagtcagataagtgaagactgtattcttgaaataatttgtttacaaaatagaggatccttagtttctgaaatgctgagtaggaggaattatgcttaagtagctctagggttttaaaactgacaactctatcaagttttcttcagcatatgtttaataggaatttcatctggccttgtgaaataaaggtttgattattttccttaaaaaaacctatccggcctataaagcaaagtcattacactagtagttgtagatcattgtttcattgttttattttatgtttgtatttctgaacatatgtttgtcttcatccaaaatgcttctagtctttgtttatttttctcatggacagtttttttctactaaaatttttgttttgtagaaatgcacctttaaaattattgaatggtagaattaatgtcaatggacaatgagtagcatttgtgacaaagtaaaattatatttatagtcttgatgagttcttgagtacaaagatttattctaattcaagttatgcagcttaaaagtcctatctctaatcccatgttatattattagtcttgattatcctgttttgttgttgttgtttctttcttatctttagtctccaaacatctctgcatgataaataatggtggttgcagtcatttgtgccttttagcccctggaaaaacccacacttgtgcatgtcccactaacttctatctggcagctgataataggacttgcttatccaactgcacagccagccaggtgagtggaggtctgggaatcttattatagagtgtatggtgaaacatcagctcttttgtttagcataacattgaatgatcattccatacattgtagagatggtcacagaataaaggaaaacactataacatctcattaaaatgggaccttagctattaggaagaataaataaaggccaaaaaggaaacaaacaaacaaaaaaagagagagaaagaaaagaaaaaattatttcacagatccacataaataatgactcaaatcctaagtgggtaaagggaggtggagtttaaacagagcaggaaatctctcaagataatctgctccatgtcactgtccccactctccatttcttagagtaggtgatctgggaaagataaattcaatagagagtaagtctctagattttgtttttattaaaataaatcatgtgatcaaaataactttcttctgaaacctctttttctttaaaacttaattattctcagttgaagatatcccaggagttaacttgtctactgtatggtagttgcatggacttgattttattactttcaaattttggacaatagtcatatgacattgtaaaactgtactttgtaacacgtgagccactatcttgttggatttaagataaaactgtcaaactatattttgtctttaaaatgactaaatgtatttttagaattctatgtttgagtttgctgattttctagttactagcaatgatttcattgcaagagactgaatttctcttggattgtttttatcttcaaaatggagaagctaaatttagctcagcttgcctttcagattagatttaggagtatcatacatgaaagaactgcataaataacaacaattagaactttttcagggagccagaatgtgtagaggttaagggcatagactctgaagccagagcttttgtgattataatgcagactcagctttaaattgagtttgttacttcttggtaccttggttttctcatcttttaaatgggattataatatttctatgccatatacagattaaatgggaaaagttcctggtacatagtaggtgttgttattattactcttgccctatactgcagccgaaatttacattaaaaagttatgtatataattagtgtgagctgccctcaagaggttctgaccgctctttgaaagcacaagccacagactctgcttttattacaaaatgtgttattctaattataagtccctgagtatttgtgtaataaaaatattatttttaaagagctggaaatgtaagtcagtatgagagataaaattagcaattgaattattcctagtggtaaaattaaagagagaaatcacgttttttaatattttaaaatagaattattaatactattggtgctatttagtcaaattttcaggtaacctccatccaggttattctaaaataatctttggtcccttgctttggaatgatcatacatatatcagtctgctgaggcccaaaagtaaggctgtcgctggcttagtagagatgatgcctgcctgagtcactacagtggcgatgacttaatagccaactaaaaatagaacaaaatcacagcattctttgaagcacagatgaacatctcaaatagcaaggcacagagaataaaacatcagcctcactacaggcatcaaagggataacacttttcaaatattatatatgaaaacctataactgtttatccaatgccaacaaattagattagtcaaataaatgaaaacctaactcaccctgaaagaattatttatctaataaaattatttcccaatttggtttccatgatgacaacactaaaatatttataatttttaaatacccccaatagtctatcacgaatttttagaaacttaacaatagcaagacagaacaaacaaatccaaatgtgtacaatacttttcaactatacttctgaaaacaacaaaaaaggaggaggtatcacttcattagtttcatcttcaaggaaaaagttaattgcccaggcccggtagctcacgcctgtaatcccagcactttgggagaacgaggcaggtggatcacttgaggtcaggagttggagagccgcctggccaacgtagtgaaacctcgtctctactaaaaaatattaaaaattagctgggcatggtggcaaggacctgtaatcccagctacttgggagggtgaggcatgagaattgcttgaacccagaaggcggaggctgaagtgagccaagatcatgacactcactccagcctaggcaacagagtgaaactcttgtctcaaaaaataaaaacaaataaaaaaagaaagaaaaaaagttcatgaagaacaggtaatgcaaactgttagtggttatccctgtaactcatctcgtttatgaggccattttacctctgattcttttctgatctaatgagaggaaaatatatctcttgtatacttcttggagaaaaatcagtttgtagaaacatgattttcagtgaggtagacctttaaaggaagcaaataatctaggcagttaagaatcatgctagtaagcatcctgatgaaaattttgcattcttaatttattcttacttagggattttgatttatcatctaatgattgtcaacaaatgacatgttccccaaatagtattattttagaaacaaacaggcaaatcacatcaataagaattctattaggattgaaaacataatctgagaatctagtaaaaattaagattaagttcaattcatataacactagtcatttcaaatatttaatgaaaatcattttaggaaaaaagtcaacttaataatggcttcacttaagctttaaaatggagacttttcttgtttcaactaaactttaccatattgagattgcattttatccctgtattcatattagtagacacatatttagtaggttctttatagcttttacttgtgggtgataattacagtctacagtttattttatgatgatattagtcttagagaacatttatgatgaagactattttatatttatatttagcattaatcttttttaagttactgaatttaagtgggtaaaaatgaagctaagacatgaaatagaagagatcttcctgtgagaataaaatattgattaacatgaaaaataagataagtatattttaccctggcctcccttaactcaaaaccctttaatgttattttcaaagtcaaaagaagagcaaaatcattatatcatatataattccaacagttcatgtttatttaaattgggttcatttagtgaatttaaaaatacatacaatttagatatttttccagtcataattggactttgaggatactcaggagacctgatgttctcatactaatgtgttttaatatattgtaatgactagaaattttaatgttaagggtaactgctttccctcatatccccagacagtcactatctataaagataagttttctccactcctattttataaaaaaaaaaaaaaaaaacacacacacacacacaacagacatgtacaagctaagcaaatatggaaaaatcagttgaatggttagatctcccattggattcatagagctctattccttcttgtattgccactgggagaaaaaattcacactcatattttttaaatgatgtaaatctatcatgaattcaccccatcatatccagacaaatttagcaaaagccaacatcaaataatctcttatttgaagaaagtaacagtattctaaatgaacaaggctttggattgctaatctattttcattagcaataattaaacttaggctatagttttctgttacaaatccttcttgtatgtaacatgctaagaaaaatgccagctggctgttagtcacttatatgggaataacaacataaacacttctaaaagaagttaataacttttagaaagtcatctcaacatttagaaatgttttcaattctagatgaatattgtgatatatgcttttcattgaacttctactaaattgaagaggaaaataatttgatataccaggagaaattgactaaacgttatataccgcttggtttaactaatttcaagtgaatttttttagtggcagctgctccagatgaatgtgctctgtatggaaagtgagatttttgtctttagtttcttctatctgaatggtactgagaaaataattagtttacggtaatagattactaaaacataaactaactgagctttttggtcactgtttatatttgggcaataatgaagttagtaggaacaataattactctgtctcagcagctacatttgggttcaaatcaccttcctcataaaagtgatatgcaataataacttcctgtagtttgtctccagtatcaagtcacttgtgtgctaaatagcctgtaagtaaataaatattgccatataacaattcacttactttctctaatgttaatctgccacttgatagttaatttttaaagggaggagttaaaatttccatttctgtaaataatagaattattacctttctcatgactttttgtttagctgtttcaagtggaaaggataatacaacaaataaaacatattaataaatattttagtgaaaagttttttttttaggtaatctggagaacaagtttcattacatgtttttttctgtgccttcattttttataagtcagccaaaaaaaaatgttgagccttatttttacctctttttaaaaaatgatcagaatttttctttgtcctaaaagatcatgtgtatttactaggaattctaatgaaaagaactgtgttggcctcaactgctttaaagagatattcttaaaatttatgtggggcccatactcatcatggctaaaggcagtattttcagtgttcaggaatctttatggaatcacagcatgacagagctggaaaagatactgcagattatcttcagatcctcatttggtggctaaagaacacagactaagagatgttaattgaattgcccaagattctgaataaaatgcaattaaattaaattaattcaaattacctaaattagttcaactggatatctcttcctgatattcctgatagcttttagccctatttagtgtttgccaaatttttcctgtaaagggccagatagtaaatattgtaggcttttcaggccacagggtctctgtagcaactactcatctctgctgctgtagtgtacaagtagccctttagggctggggccgtgatttatttacacctgtaatccagcactttgggtggcctaggtgggaggatcacttgagcccaggagtttgagatcagccttggcaacatggtgaaacctcatctttacaaaaaatataaaaattttctgggcgaggtggcatgtacctatagtcccagctactctggaggctgaggtgggagaatctcttgagcccaagaagttgaggttccagatagctgagatcacatcactgccttccagcctgggcgacagagcgagaccctatctcgaccaacaagccaactaaccaaccacaaaaaccaagtagctctgcagaaaacatgtaaatgtgagagattgtctgtgtttgcaggtcatctcaagaggttttcctgagcagtatcctctcctggaagatcacgttgtggctttttgtgtatttagttcctattgtggaattttccaaaatcaccattgttcacatctgcagcaaaaaagtagactaggctgtgttgccaaattttaaattatccattatatatgcactgggttcttcaacatttttttttctttttttcttttttaagtttcgttgcaaaactgacaaatgtattccattctggtggaaatgtgacaccgtggatgactgtggtgatggatctgatgaacctgatgactgtcgtgagtatactggcaaatattgaaatttagaatttagagttccttatatcccagacctggaaaattgaatctacacctaaagtattgccttctgacacttttccaaaattgaaatagaaaaattttaaatgccattctttaaaagtaagataaaaattgttgtaataccttggttatctccctgataactgttacacttagaatggtgccataagccattcgtgttagattttgtttctttctcaaatttgattacttgtggaataatgacattatttcatgtagtgatcagtagggtaataagcatcattaatttgacttaatatgtcaccaacttagaagtaaaaatgggcaagtttccagaatgtcactcaattactgaaatcttatctttaagtaatataatttcttaaatttactgtcagcattgaaatcctgaaaattcttaaaaagtctgatttttccaatataaatcattagattgccattaggtaatttaatatgttcttagcaattgctctaaagatattaccaagtatgtcttgacatttgactgtaattggcatggttagctgctgctttttcagcaatcgttggtaactttggttgtaatgggacatcagcagacttttccttgatagccttttgtacttcactccataggtcactccaatacttcactgtcagattgaagatgctcgtagtcaatcacgataattccctcaacatcccagtacatggttgccataatttggccttgacaattgagttcaaaatccttaggcttgtactacacaaagacagaagaaactggctatcttcttctactggagagcttgctaccaccttattataaagcttttttgaaatttaggttatctagatatttacttagataggctgtattccatctctctggtcatgcccaagtctctcacatactgaagttgtttcacatagtgcatatgtttgaaagcagtaagtaatcaaatcaatgaaaaggaaaaatgttataaaagtcattgtgtttctaatataatcttgtttctgaaagatccactgctctttgattttttaaatatagtttttgttttttactatgatagacaacatataaagggtagtatctctgtgggataagtacactattattcctgaattattcttttcaaaaaacctattaagttaaaaggaatatcaaaggaagaataaattattttggtgaccttactgagattcttattaagagaaagttattactttccccacaataaagtaaattttctatgataacagtaaatactctaaatgcaacttacatttgtaattcttagaaataaacaagaatgaatatgttaatttagtcctttaattaagaagatgatctttcttgtctagattgactgttctctgagaaaatttcactataatgacctgcagctcctgacctctatttgtaattttgactgaaatttcatcctggaaccatattgatgtgaaaaattaactacagacttagtattaggagtttttccatttaactcctttcagaatatatggtcatcaaatattactttagtgtctttttgaggcactgatgtctgaaagacatctgttatctgagagcttctctatgatccttgttttggttaaatactaatatctaaatttttttaattgacaagtaaatttctacatatttaaggtatgcaacatgatgttatcatatatgtatacattgtggaatggcaaaattaaggtatttaacatatgcattacatcacatacttagcttttttgtgatgagaatacttaaaatctattctcttagcaattttcaagtgtgcaatatattacttttaaccacagtcaacaagatgtacaatagatctcttgaagtaattttttccatccctaactgaaattttgtgtcttttgaacaatgtcttcctaatctccccaatctccagcctctggtaaccatcattttattctctgtctctatgagtttgactttcttagagtctacatataagtgagatcacgtggtatttgtctttctttgcctggctggtatgacataaaataatgtcctccaggttcatccatgctgtcactaataacaggatttcctattgtaaaatattgaatattattccctcatgtatatataccacactttatttattcattcatccattgatggacactgtggttgatttcatatattggttactgtgaataaacctgcagcaaacaagtgaatgcaaatagtgttacaacataatgattttatttcctttggatatacaggcataacttattttattgtgctgtactttactgcgctttgcagatattgtatttttcacaaatggaaggtttatgacaaggctgcatcaatcttgtctattggtgacatttttcaacaccatgtggtcactttgtctctctttcacaatgtggtaattctcacactagttcaatttttttttcattactattattatatttgttttggtgatacaatcagtattctttgacattattaatactattgtaattgttttggaacaccacagagcatatccataaaagacaacaaacttaactgataaatattgtgtatgttctggctgcctaccaacccactgttccctctctctctccctgtccttgggcctcctttttccctaagcataacaatactaaaattaggtcaactaatagcccacaatggtctctaagtgttccagcgaaaggaagaatttcatgtctctcactttaaatcaaaagctagaaattattaagcttagtgagaaaggcatctcaaaacacaagatataccaaaagctatgcttcttgtatcagtcagcaaaattatgaatgcaaaggaaaagttattataagaaaataaaaatgctacccagtgaacacatgatcagacagtacagatgccttcttgctaatgtgaagaaactttcagtggtcaggatagaagatgaagccatccacaacagttccttaagccaaagcctaatccagagcaaggccctacctaactcttatttaattttgtacagtttttttaaacatgatgccattgcacacttaatagactacagtatagtgtaaacataacttttatgtgtactaggaaaccaaaaaaaaaagtatgacatgctttatcgtgatatttgctttattgtggtggtctggaactgaacctccaatatcttctaggtatgcctgtgtatatctagtagtgggattgctggaccgtatggtcactacatttttagtcttttgagaaacctgcatactgttacccaaaatagctgtactaatttacatttctaccaatgaaatacaagagttttcttttcttcacatcattgctaacacttatatttcttctttttttacaatgcctaacttaacaggtataaggtgatatcttattgtggttttatttgcattttcctgataattagtgatgttgagtattttttaatataccagttggccatttgtataatgttttaaagaaatgcctattcaagtcctcagctcatttttcagtgagtttttttttcttactattgaatattctttatatattttggattttaacccattagcagatgtactgtttgcaaatattttcttccatttcatagattgtctctttactctgttgtttctttttttgtacataagttttttaatttgatgtaattccatttgtctgtgtttgcttttgttgcctgtgtttttggagtcatatccaaacagtttttacccacactaatgtcatggaactttccctctatattttattctagtagtcttaaatgtttttgttggttacattatctctgtgagctttcttttagtagagcaaataggcttttacttgtagttgatgggttaacagctttgaatatctgtaggaatgacactttgcttgagagtcatggtgaggtagaaaattatatgcaagagtctatggaacgtttagatttcactttcgggtagatgcatcatcaatacctgcagacaataagagatgctgacaatacttataacatcacctgagaagacaggaaagcctcatcccagggtcccatacttgcaagcttacataatgttatttatataaatgtagttaagagcaatgcatcaaaattctctggcatcacaaatttgtaataatgtttcttataatactctaatacacttaagattattctagagacagagttgaagctcagatgggcttccaagttatttcaaagcattcctttaatagttgcaacctttttctggtggagggttgtttcgaaagcaaaggagtattagagaaaattgtatacaaagcaaaatgaaatagaggaaaggcacatgcttaaagtatgagataattgtgtcattcagtttaaacatttagtattattaattaacaaaatgttatagattggaagcaaataactttcaacattttagaactctcatttctatggaagcagaccatatatagagttattttttaaagaatgtttaaatttttatttaatattgtaattataaaagcataatttatttctcaaaaaagtttaaaatgctatttattagtgtttgattcactgatttgagctaataaagataatattaacctcaaaatcagtaatatgcattaaaatcattagtcaaaagataagtgttttattgcaaacaacatagtagatttaattcagagtctgacacttaaaagttgtgcatccttaggtgaattattcatattcagtaaatttagtttactcttgctaaaatggtaatgccaaaatgagaatgttatggtgagattaaattagtaactgtatgtgaaggggtctagcccagtgcctgatacatagtagatcctcagatcctgccttattattattattcccagataatatgataaaatgcattatcacttgggagtcatttgttataatatacgtatagtatataaaatatttactatttataagatattgttctcttgtataataatcggattatagggatgaatatcgataaatctgatttaaaatgtgatagatatagaaagcatttgctttacgttgtgctggagaatatgtatcgtgggccaggtgcagtgactcacgcctgtaatcccaaaacttggtgcccgaggggggcagatcagctgaggtccggagttcgagaccagcctggccaacatggtgaaaccctatctctactaaaaatacaaaaaattagccaggtgtgatggtgggcgcctgtaatcccagctacttgggtggctgaggcagtagaattgcttggacatgggagacagaggttgcagtgagccaagattgcaccactgcactccagactgggcgacagagcaagactctgtctcaaaagaaaaaaaagagagagagagaatatgtattgtggacaaatcatacacaccataggccaccaaatgatcaaggagaaatgatttcttaaaagatgatattggaataacagtttttgttacaataaatttcattctgcaacttaacctctcaatatcatttcattaaaatgagaagacttttatatgttttttaaatttttaaaaaaatatatttatatgttattaattcctatcttctaaagtatggtttattaaatgttatctggaggccatctgagttgctcaaagtatagctaaacatttgaatctaatagctatcgagatgagagacattcacattgtattccaggatatatttattatagtaaatatcttgaatgtcagaaactctatgtttaagaagttgtgaggtaagattaccattccacaatatctatgctttctcccctagctgaatttagatgtcagccaggccgatttcagtgtgggactggactctgtgctctaccagctttcatctgtgatggagagaatgattgtggagacaattctgatgaactcaactgtggtaggtgattaaattcctaactaatgaacataagtctaattttcaactgattatgtctgtgtgattttaattcagacacaaattttctctctctctctccttctatgttctagacacacatgtctgcctgtcaggtcaattcaaatgtaccaagaaccagaaatgtatcccagtaaacttaagatgtaatgggcaagatgactgtggtgatgaggaagatgaaagagactgtcgtaagtcacctcaaaatactctgtcttgtcttaactttgactcctaaaataagtctaaaaattagtactatacttcataaattcatatgatgtagataaattgaaaagaaattatggtcaaataattagaaatagatgccaactgggatagaagctctaaataaaaatatagagaaaatgaaaatatgggcaagtttactttaaaatctacctgtaaattatgacaaacatgaacaacattcattcatccacatcatccttaagagaagcaccaaataaaacatggcagttgattatgttttttaaatttatttttgcccatattaagtagatacaagtaatttacttctgtgattaatcagtttcttgaaattaagttatttttaattagagagtgttttctccatgaaatacatgttgcactcatgaagagacatataaaatctgggcaaaatggtctaacaaaaatttaacttctacaaaattctaaatattgctccatttaacgtatcttaacaaactatttgaaagaataatagtaaaatattttgtttcttttcatctcatatttccatcttccatcaaaattcaaattacgttaaatggaaggcaaaactgtttataccatatacatatatatatgcatataagctggcatgcacatgcttgcacgcatgctcacacatgcagattatgtgactaatggagcacctgtcaagtttcagggtttcaacagaaccgctgtcaacatttctgttttgctgagttttattgtatccctcaaaaacttttatcagtaaataatgtgcagtcatccagcaatttgattaagatggtgcattcagaataaagtcagtaccagttctttatggttagccattctagaagctcatccattaaactgtctaggatttgtgatgcagtttacagtctaagttggatgttcacttccctcaaaaactcaacacaggccgggtgcagtggcttatgcctgtaatcccagcactttaggaggccgaggtgggtggatcacctgaggtcaggagttcgagatgagcctggccaacatggtgaaaccctatctctaataaaaatacaaaaattagctgggcgcagtggtaggtgcctataatcccagctacttgggaggctgaggcaggagaatcacttgattctgggaggtggaggttgcagtgagccaagactgtgtcactgaactccagcctggacaacagagcaagactccacgtatatgtaaaactcaacacaattcctagacagtttgataaactttgtactttttatttccttattcacttaatgccttccaattttagtatttttcagtttacaaaaatgtatacctatgaattcttatttttttctggaaaaaaacttattttgaaagtccctgaattcttaattcttaaaattagtattcaaatatctaatcaacagttttttgaaaactctgatatttatcagtgtatcactgcaaaaatatgttttctttaattttactggagaggatatcaggagtatctcaaaaggaattaaaagttaaaattcctcaccttcagagtcctattaatttaaagacaatacatttttcgataaactgtcttaaacatttgtctgtaaaatttgcttttaataaataaatatgttctccaaagctacattttaatggcagttttctttctaagctgaaaacagctgttctccagactatttccagtgtaagactacgaagcattgcatttccaagctgtgggtttgtgacgaggatccagactgtgcagatgcatcagacgaggccaactgcggtgagtgtctgtgactctgggtcttatctctccgtatttgagtcatcatctgcgacaaccacagttaaacaaatttgaacacaattcttttgaagctaaggtcttacctgaaaaggttttgtctctgtgttcacagattcataaaaacttaggttagctactttacaagaagcctggagtgataagatggaagagtaagtattccttaatataacccagaactttataaaacatagaccaaagaggtagaataagaccattatcttcttatattagagtatgcacatgatggcattaacatttagtgaacagaaataaggaaacactatattcatatcattctagaattcattttttttttgcttaaatccctaagattctgtagttattcaatgatattgtatgtcattctttaatacattacagtgtgaaaaaagataataaaaagcatctgttccatattagtagatgacagtgatcatttcagtcagcatttgcttttgaaacattaatattttcacttaaaataattttatttacaataattatttcttaattgttatcgcagaaatggagaatatatatttattttgtttaatgtatttgattctatgttaaagctgttaacactgagacagaaatcaagagtatttgctatgtgtaattcatttgatcagcatttattaacattaattgagcctgttctgtagacaaatatgccaatttggcattgttggataagcaaaaagcatttcatctagtaattgattagaaaagacaaagtttgtccaaactggataggactcccagacttcacagaagtgtgttaaatgcatttgctagattccagagtactttcattgaacttttatggggaaaatgaaaataatgaaaaacctttaagtgctctgaaatttcatttatattgaacaacacttatgagctacatgtgtaagtgctggcaataataacatgtctttaagtgattttcctaatactatcttattataattgggtctttagaatatgccaccagtgtagcttaccacagtatcataaaactaccatttgccactttgtagaatttgttttcataatcaattcacaaagcctcaaactgcattcatcaccaatttgtccatagcaattaccagggagttttgtgggctagtttatattactggctaatttgctctattgtcttttgcattttcacttatgaaaccaaagtggaataatgacttgttaactctgaacaatttctggactggagtgttatttctgtattttcctctccttccttttcctcacgttagcatgatttgactttgttttggtagattatatgcttcaaatagattattatcaatcaccctagtaacaacaatacctaacatttagttgatggtaaccatatggcccgagaaatatgttaaaagctttagagtgattatcttacttaatctctttattacccctatttcattgataaggaaagtgggcacaaagaggttctgtaacttgtctaaattcccatagctagcaagtcctgtaactgggatgtgtcaaataacagggttatttgacaccaaagcatctgctttgaacctctgtggatatagcataaatacacttcattctttccatataaagagaaaaatatatttaaatgttttcagtagtgaggttatataggattctcccagccactagtattgctgtaagttccagaccagtgtgtgtacacacacacacacacatacatacagagggacaaggatggagggtggtcatctgatttgagttacacaattttattgtgcacaggtgctaattaatgtaaagaaaattctgtgtcatatcttagtacagcatttcacaccccttatttttgaaagggataagtggccactttgttcccttctcttttgtcctcaataaatacagaaatgttacatatttatgctaattattttaaaactccctgggatgattctccttctgctgtttttattgaatgggaaagaaacagaacactttgcaaaggttcaccatgttatgccaagtccttatcgtttgactcagttatatgtctttatggctaagaacagatcttctctagaagcatgggtgtgtttcactatttcacatgtcccatgtcctcagggcttagcaggatgtagagtaggattgcattaagagtggcatgagtgtctaacctattccctcttgcaggatctctatttagaatccatttttatttcagtttgtgtccatacttttcttaacccatgctacattcaaggggaaattctcttatgctcttggagttcacctagttgttacctcttacttctcagcaccaatatttgtatttatctatagttccattatcagttggatatttcatttctaaagtccgaacattgtagtttgttctaccttgacatattctaatttaaataatttgttctgtttttatttaaattatgtaaagaaaacaatgtagaagcaagagaaagagagagaagcactatgaaaaaaatgaagcagagtaacttaacacatacaaaatatacatataatggggggaattaaaataatcattgtaaatttttttaaattctatatttatatttactgaaataccatgtttattgaatttagcctggtataattttttgggtctacgagtactcacaattttgacaacgaatattcaatctatggaaaaattatatactaatctctaatttaaggagcctttgaatagatgtaaattaaatatagtttaggagaccaggcttaataatttagtcttggtgagactttggatataaattttaaaaattaaattaaatatataacttcccattttattaacgcctagtttttgagatggctaaatttatgaatctgtaaaaatatacatttggcacatttagattaaattactaaaggtctttaaagaacatcttggagctccatttttgtgtatgtaaagatttaaatctatgctagcctcgtattcatgacaagatagttacaaattcattttgtgagttgttaatagttcatataaaatcacttctatttactcgaaggtgtctgctcttttaaactttataccaagggaaaaacaagcttttaaaaatgtacataaatacagttatattagactgtagaggctgactgctcttgtagggctgttgcactgcttattacaagcttgggcaaacaccagatttgaatgtctgaccaaaataagtagaatatcccaattgtagcagctccagagtatttatttggaatttcaacttcaaacttttttcaccttcagcctactctctcctatttcaagaactaatagaatatttaagaatttgacagactgtgctagattcacatgtctgcttagtaatcagagttgtaacttttctaaaatttgattcataagatgatattagaatctggatctttctattatgttctctctccccagtttacagtttagattcttagttctctgaatgcctctaaaatattttctgtttttatcagttattttctgtttggtctctagtggtcaactctgcactcatgccccagctttctagcccccacctttgctctgccatatcactcctctctgtcgtcttgctttctgcttattttcctgcatcctttcatctaatctagaattctgagttatcaaaaagattcttgcctctaagttgactcagcctcatttgctgcttttgtacaatctcagtttataacctgctgtttggctaatgatctttaattaatgtgttagctataatcacactaactagggcttgtgaagagaacgtgaactttttacagtatctttgtattttccgcaacctggctttcccaacatgacactgagaacattcaactcaaaagacagaacctatcaacatgttcttttattttcctttaaatatgtgatcaggaaatttgaaacagactactcaagctacagttataagcttacatttataagttataagctacagttataagcttataagctgcagttaagctatatatagctataagctatacagttctaagctataccgttatagctataagctataagtattcttataccttataactcttttttcctaaagttaaagcaagtacatgttaaattataaaatatttcaggctgggagtggtggctcatgcctgtaatcccagcactttgggaggccaaggcaggaagattgcttgagtcaaggagtttaagaccagcctgggcatcatagtgagatcccatctctacaaaaaattatatttaaaaattagcacctgcagtgtcagctcctctggaggctgaggctggagggtcggttaaacccaggagattgatgctgcagtgaaccatggttgcacctgtactgtagcctaggtgacagacacagaccctatctcagaaaaaacaaacaatcaaaaagaaatatttcacacatatacacttgttatataacaagtatcatgttatgtaagttatataacaagtatcatgttatataagttatataacaaatatattctatttttaatggtttttaaaatttggtataagatatctctgttaaaacatttaaatttctacaataacaactaacgtccacctcttccctttcccccttcttcccactgtcctgaagtgatcatgtattattcacatttattattttttacttgtactacgtaattatacaactatgtaaatatgcatatatgcaaatctatctattctatgtagatatactttgtaaatatacttccatttagaataacatttagaaattgtttgttgcatgatttcaagataacctatgggggaaaagctttgtgcttttatatacagtaaagataatgtacttaaattttgtatcttggaaaatggtccacacttacaaatattttgttaggacatctgtgtagtatttttaatcagtatttcccaaatttaaatgtggattataaatacatgtactatattttgactagcaaacagattatctgaacatcctcagtgcccctatcctgtgtggctgtgacttgtgaatgaagcgggtgtgctgggaggtgttgagggagctgctgggagacagattttgaattttctaacatatggtatcacagtatctctctatctaggtgtttagaagcatgggattatgtgccttcatgttagcagctggaaaggagaaaggaccttctatccacacagtctctggaacctcattcgtctctaatgggggttggtctgatctgcactctgtgctctaatctgactgtgaagtgcaggcatcctcactcacgcactgtgggtttcgctctcttcaagtctttattcttgatgagctgctgcttaatcttacgttgctgttgatatatgacactcgttgagccaagatccttacagaagcacatgatcctgtaaacctcccaggtcctgtgaggagccaggaatactgcctcaagcttatacttctaacttctacccacttttaatatcacaaaataactcctgaatatttaaaaatgttgtgtgcatccagtattgtttctcctagaagcttggccttttcccatggtaaatccaggtgagtgtgacacttatctttccaggtcttggtccatcccatatcaatctgtcttgagaatatgtgcagctgatctttctacaactttcccttctttttttcttttcacaatatcacaggatccagaagggaactttacatttttctacctgcctgaaaaaaacttctggttaatatcttactcatttttgagatgacactttctctacttctcacactggcaatttaaaaaaaaaaaaaaaaagacagtgagcagtataatataggagagagagaaatgaaaaccatattgctttactgctttccacttctcggcattccatacttatttgatcccagatgaattgtaaaataacagttaatgacattctgtggaatcactatttctcaggatatactttgaacattttgtctggtatgtatgtgtgactggtgtctgttgattgattttcaaactaattctaaaactttaaaaaaatacatagctcgatcttgcttctttgaaatcatgatgtgtacatatgctattatcctttttaatggaagctttcaaaaataatttaacttctggtatatttctaaacttttaaaatagctgtaatgaaaataagtatatttttctacaaacttggtagggtggggaacttattttctatgtgtaaagcagcttctgttaattcagtaagattttttgtactattattagatcactacattttatggtaaaatttttgatatatcatgtgtttttctttcatccatttatttgttttgccaaatttaatcttttcctcttttctgctaatgactttttgtatgtgtgaatgtatttatgtgtgtatatttgggtgtgtgtgtgtgtgagagagagagagagagaaaggaagagagtgtgtatgtgagagagagcccgcataatggcatttattttgcattgaaatgttttggttccaatagaaccgttgaaggagagcctatctgtatgaatgggaccaggaaattgtcctctagcttttataggagaaatgaatgactacatgggagtcactaaatagtctaagtggaatgaacatattaggtttttcatagctttcatccaatgcctttggtaacttttgtgcattgactctccaccaaaaggatatgcaattattcgttgatgtttctttctttttttttttttctgtcttaacaataacaggaaactgtgagatttaaattttgttgaacaaagctaaaaaggagcctacacaatgagtcaggaggcatgccaaatattctagactctggattgataggtagcaaaagccgtaagagaaatagctttttgcccagtggggattataattgagtttgaaaagaagggaaatgctgtatttgctttaattagaaatctaaattgatgcagttgaactttttaaaaggaattgagtcaggaatttaatattctgttatatttttgtttgaaaaactcatctttgtaatgctgcttttctcgtcctttgccaagtatattcagttctctaaaactacatatatacaaaactagttgcagatttttagtagtatgtgaaaaaaatcagagttaaatactttatagaaaaaaacaaaatatgtaagaaatatggagatttaaaagttctacctcttttggcctacctttggaacaaaaatatttgtctttgttttagattataagcttctgttttgcagattctgttgaaatatcttttgggctggcaatttccatggagaatattctagcatttgtaattttagctattactcagttttgcttagtaccatgcctatatgattgattatgctttgtgttagtgatcaaaaataagtacaatgaaagattctaatgttttttctcaacaccaatacccagtaattcatcatatatagaaaatatatttttttaccccttaaaaaaaccttacacttatgcttatatgttaacatcagtttgaagatccaaatggtgttagatttcgctatgaaaaaggctgttttcagccattaacacttggacataatataatgataacaaaagacacgtagttattactgtggcatttattggctttgtgatctgagtatactaaacagaggggtatagttgatgattctgatgtccaatcaatcttaaatttaatgcttagaatgcaagctgtctggcttaggtttttcatataattaggccaccagtcatgtgctcagtggtcatgtggaaaataatgaaagtagggagtgaagaagtggtgcagaatttagttttaaaataactgtcacctcttgttgggttactgatgtgagaataagttactgtagattcttattgtcctttgaaatattacctctctaattaatatttttatttctccaaaatcttgagagaaattatttttaattcctcagaaatcttcataagaaattgtctttgatcaagagtagaagttacttgaaaactattattcggccgggtatggtggctcacacctgtaatcccagcattttgggaggctgaagtggatggatcacctgaggtcaggagttcaagaccagcctggtcaacatggtgaaaccccgtctgtactaaaaatacaaaaattagctgggcatggtggcacttgcctgcaatcccagctactcgggaggctgaggcaggagaatcgtttgaacccaggaggcggaggttgcagtgagcagagatcgcaccactacactccagcctgggtgacagagtgagattccatctcaaaatgaaaaaaaaataaataaataaaagaaagaaagaaagaaactattactattcaagggccatagaaatagagtagagaacagatcttccctgagacctaaggtttctcactcccatggatcatatcatccatatgattgcacttcctttctcaattctatgtcctaagacagagacacacacccagtatttaaatgttcctttttgatatacccttgcattttgactgatatttgagaaaaaaaaagaagaaaaaaaaaacagaagaaatataaagtgatactatttattgaaattaaagtagttctaatgttttcaaaactatatttcgattaatagtatttatagtatgtgaactgtatgttttactcaggcaatcaggtctctgacttaaacttataatttatatttaaactaaattaataaaaagttacagaatatgtgcctatgtacaataatttgttattagtcattttgttgtaagtgtaaatataaaatataaagttaatgcatattgttttagttcattaaaatcaattctttagaagtggtgtgctaacaattcgtattaaatgctgagcggcaggctcaatgaaaattccatatcagaactctggaaatttatttttaaatattagaaattatttaccattttttaaattaattaaactattgcaagtataacatctgtcaggcacagtggctcacgcttgtacttctagcattttgggaggctgaggcgggcagatcacctgatgtcaggagttcaagaccagcctggtcaacatggcgaaacccagtctctactaaaaatacaaaaattcgctgggcatggtgatgtgcgcctgtaatccaagctattcgggagactgagacagaagaattgttgcacccaggaggcggtggttgcagtgagccaagattgcaccactgcactccagccggggcaacagagcaagactctgcctcaaaaaaataaaaaagtataacatctgtttcaacttgttggagacacttctaaagttttaatctaatttcctctattaccaagtaaattgtattgacaaaaatgtctcataacacttagtagcatatatggctttaggattttcattctgaacattattagattaaaagttttaaatcaagtgtagaatctgtttctattttaatcttcttggtaattagtttctgaatcccaactacaaaaaagagtcaggaaatccaatatattacctaatttcaattaatcacagttttgctatataaggatcacacaggtatgtctgtcagccattatatctgtgtatcaggatgttagatagcttatacaaatatttctagctgcttcttaaaattgtccatagatgatgggttgctggaatactttgtaaatctctgttagaagttcttcagatgaagttagtgctgttggaattagcatacactcagtcctataatgagttctacttcaggaagcagatcgttagggacaactgtccagtttctcagtgtggtgtttgtaatctccaaaacacaagattcttgatacaaacagactctgagcagtaataactggctattaggaaatcacagaggcacaagaaactacctccagaaataataaagctctttatggactcagaactctgattatttggttagtttcttttgaggaaatgttcatgttcgttgtgtgaagagaccaccaaacaggctttgtgtgagcaacaaggctgtttgtttcacctgggtgcaggcgggctgagtccgaaaagagagtcagtgaagggagatacaggtgggtctgttttataagatttgggtaggtaaaggaaaattacagtcaaaggggggttgttctctggtgggcagatgtgggggtcacaaggtgctcagtaggggagtttttgagccaggatgggccaggagaaggaatttcagaagataatgtcatcagttaaggcaggaacaggccattttcacttcttttgtggtggaatgtcatcagttaaggcgggaaccggccatctggatgtgtaagtgcaggtcacaggggatatgatagcttagcttgggctcagaggcctgacattcctgtcttcttatattaataagaaaaataaaatgaaatagtggtaaaatgatgggacagcgaaaatttttgggggtggtatggagagagaatgggagatgtttctcagggctgcttcgagagggattaggggcggtgtgggaacctagagtaggaggaattaagctgaaggaagattttgtggtaaggggtgatattgtggggttgttagaagaaacatttgtcatttagaattattggtcatggcctggatacagttttgaatgaattgaaaaactaaacggaataagagaaggagaaaaacagatattaaaggcctaagaattgggaggacccaggacatctaattagagagtgcctaaggagattcagcatagtcccgccagcaaagattatttatttactttaagagttaagagtggcagtttggggatagcaccacgatatatcagctgtgatggcttggagaaacagtgtaaatcggcagtgtaagcaagagcagggcatgtatgagtagttgagaatggtgaacaggagtacgactagacagaagatagtagggatgacaagttttttggggcacagtccaagttggtctggtgcctggaatgagactggggcctaataaaaaggagcgtccatacaggagctcaaatgggctgtaccctgtagcattccgaggacaggcctgaatctgagaagggaaagtggtaaaagtattgtccagtcctttttaagttgctggctgagcttggggaggtgtgtttttaaaacatcattagtccgttctacctttcctgaagactgaggaccgtaagggatataaaggtttcactgaatactaaaagcctgaaaaaatgctttgctgatttgactaataaaggccggtctgctatcggactgtatagaggtgggaaggctaaaccgaggaattatatctgacagaagggaagaaatgaccgtgatggccttctcagaccctgtaggaaaggcctctacccatccagtgaaagtgtctacctagactaagaggtattttagttttctgactcagggcatgtgagtaaagtcaatttgccaggcctgggcaggggcaaatccccgagcttgatgtgtaggaaagggagaagacctgaacaatccctgaggggtagtagaatagcagatggaatattgagaattgattgccttgaggatagatttccaggatggaaaggaaatgagatgttctaagagacgggctagcggcttgtaacctacatggaagaggttatgaaatgaagacagaatagaatgggcctgtgaggctgaaaggagatattttccttggtctaagaaccatttgccttgtgtgggaagagattgataggtggaagtttcagcaggggaataggtgggagtgaccgatgtgaaggagaaaaactggccttgagggacagaagctggaaagctagctgcttgtctagccaccttatcagcataagcattgcctagagcaatgggatctgacaccttttgatggcctttgcagtgaatgactccagcttcctttggaagtgaagcggccttgagcagagtttttgttaaagaggcattaatgatggaggacctttgagtagtgaggaagcctctttcagcgcatataacagcatggtggtacagaatatgaaaggcatatttagaatcagtataaatattgacgcgtagtccttttgcgagagtgagggcttgagttaaggcaactagttcaccttgctgagaggtagtggatgggggcagaggggtagcctcaatgatagatgtggaagatactacagcatagcctgcttttgctggtgagaggcaattaggcctggtggaactgccatcaataaaccaagtgtgatcagggtgaggaacaggaaagaaggaaatatggggaaatggagtgaatttcaggtgtgtcagagagacgcagtcatgggggtcaggtgtggtatcaggaataatgagggaggccggattgaagtccgggccaggaacaatggtaattgtgggagactcaacaaagagtgagtacagctgaaggagccggggagcagaaagtatatgtgtcaggtgtgaggaagaaaatagattttggaagttgtgagaactgtaaagagtgagttgagcatagtttgtgattttgagggtgtccaaaagtattagggtggtggcagccactgcacggagacatgatgggcagcctaaaacagtaaggtcaagttgtttggacagaaaggctacagggtgcagtcctggctcttgtgtaagaattctgactgcactaaccatgcctaggaaggaaaggagttgttgttttgtaagggattgaggtttgggagattagtcaaacacgatcagcagggagagcacgtgtgtttttatgagaattatgccgagataggtaacagatgaggaagaaatttgggcttgactgaagtaacgggtgctatctgtgaagccttgtggcagtacagcccaggtaatttgctgaccctgatgggtgtcagggtcagtccaagtgaaagcgaagagaggctgggatgaagggtgcaaaggaatagtaaagaaagcatgtttgagatccagaacagaataatggattgtggagggaagtattgaggataggagagtatatgggtttggcactatggggtggataggcaaaacaatttggttgataaggcacagatcctgaactaacttgtaaggcttgtctggttttaggacaggtaaaatgggggaactgtaaggagagtttataggctttaaaaggccatgctgtagcaggcgagtgataacaggctttaatctttttaaagcgtgctgcaggattggatattggcgttgagcagggtaagggtgattaggttttaatgagatggtaaggggtgcatgatccgttgccaaggagggagtagaggtatcttatacttgtgggttaaggtggggggatacaagaggagaacgcaaaggaggctttggattgggaagaagggtggcaatgagatgtggctgtagtctaggaatagtcaaggaagcagataatttagttaaaatatctcagcctaataagggaactgggcaggtggggataactaaaaaagagtgcttaaaaaagtattgtctaagttggcaccagagttgtggagtttaaagaggtttagaagcctggccgtcaatacgcacaacagttatggaggcaagggaaacaggcccttgaaaagacggtagtgtggagtgggtagcctccatattgattaaaaggggacagacttaccctccactgtgacagttactcgaagcttgacgtccgtgatggtctagggggcttcagagacgatcaggcagtgtcagtcttcagccactaagccgagaagatctgggaaggagtcagagccttgggccagagttccagggcctctgggagtggctgccaggtgagttgaacagtccgattttcagtggggtcccgcacagatgggaagcggcttaggaggaatcccgggctgtgggcattccttggcctggtggccagatttctggcacttgtagcaagctcctgggggaggcgggcctggaggaatacctggccactgcggtttaggcgtttggaatttcttgtgtgctggagatgtggctggggtttgtctcgcagtggaggcaaggaattgcaactcagaaatatgttgctacttggctgcctctactctattattgtacaccttgaaggcgaggttaattaagtcctgttgtggggtttgagggccagaatttaatttttggagttttatttaatgttgggattgggtaataaaatgtatattgagaataagacggctttttgaccttttagggtctagggctgtaaagcatctcagggttgctgccaaacaagccatgaattgggctggatttttatatttgatgaaaaagagcctaaacgttatctgatttgggataaagaaaaaggagcattaaccttgactatgcctttagctccagccacctttttaagaggaaattgctgggcaggtgggggagggctagtcacggcatgaaactgtaagccggaccccgtgtgaggaagggaggtgataaaaggattatagggtggaggagcggaggctgaggaagaactgggacctagctcggcctggcgaggaggggagaggacagatgggtctgtagaaaaggaagattagaaagactcagtgatgcttggggttgggacggagggggacaggtggtggggaaagaaggaagatttggtaccagttgcattgggaacagagaccagggatggaccgatgtgtaaaagaatgcctggatatcaggcacctcagaccgtttgcccattttacgacaagaattatttagatcttgtaggatggaaaaattgaaagtgccgttttctggctatttggaactactgtcgagtttgtattgaggtcaagtggcattgcagaagaaaataagacacttagattttaggtcaggtgagagttgaagaggttttaagttcttaagaacataggctaagggagaagaaggacgaacggagggtggaaggttgcctatagtgaaggaggcaagtttaaagagaagggtaaagacacggagaaggggggtggggagcagccctgggctgcaacgtgggtgagcaagcagccaaagcaggcgtcctcgcaattgacttgccaccaagggaacgtgggtgaatgatcaaggcaggcgtcctcgcggagatcagacaccaatggaacatgggtgaataatcagagaggtgtcctcgcaatgattaaacaccaagggaaggctgccttcccgagtccgtgaccggcgccggagttttgggtccacggataaaatgtgtctcctttgtctctacgagaaaatgaaaggaattgaaattaagagaagggagagattgaagtgtggtgccaagattgaaaggagaaagaggttgagggatagtgagggaggttggagaagagagtaaaaagaggctgctttccagatttgaaattggtgagatgtttcttgggctggttggtctgaggacctgaggtggtaggtggatctttctcacagagcaaagagcaggaagacaggggattgatctcccaaaggaggtcccccgatccgagtcacggcaccaaatttcatgcacgtccatgtgaagagaccaccaaacaggctttgtgtgagcaacaaggctgtttatttcacctgggtgcaggcgggctgagtccgaaaagagtcagcgaaggaagatatgggtggggctgttttataagatttgggtaggtaaaggaaaattacagtcaaagaggggttgttctctggcaggcagatgtgggggtcacaaggtgctcagtagggaagcttttgagccaggatgagccaggagaaggaatttcagaagataatgtcatcagttaaggcaggaacaggccattttcacttcttttgtggtggaatgtcatcagttaaggcaggaaccggccatctggatgtgtaaatgcaggtcacaggggatatgatggcttagcttgggctcagaggcctgaaagaaatatttcattgagtcagaaaaaagaaaattgataattactgcatacaatataagcaaaaatatacattttttctttcagaattcaccatgtccatttttgtaatgtccaagtacaaataattacagcttagcttttcaaatgattcttaatattgggaatatgtcatttcaaagccaggtattacaaatgagaaattgaagaactacacacaaggttgaatgtcaaggcactctcaagccagcgcctcctgttcttggcagaggaagcatcaagcactttaacatttcaggatactgtcagtgtatcccacagcattgggctcagtttgtattatctgttttctttaatattctacttgtataattaaactgattttgaatttttataaaatttctttatttaacaaattaatgaacacctgaaaatattaagccattttattagtaactccaggaatccaaagaagttgaatgttccaaataatagtgttgaaagcttattaagtgctatgtattagctgtgtgccttatgtggatgatcacataagtataaaatattatttaattctcacaacaaccctatgagagctacactgttattattcctattttatacttaaggaaataaagctcagggagtgtgagttctctcatagtcacccagacagaaaatgggtgaacagggacgggtacggtggctcactcctgtaatcccagcactttgggatgctgaggcaggatcaccaggtcaggagttcaagaccagcctgctcaacatggtgaaaccccatctctactaaaaatgcaaaaattagccaggtgtggttgtgggtacctttattcccagctactcaggaggctgaggcaggagaatcgcttgaacccaggaggtggaagttgcagtgagcagtgagccaagatcatgccactgcactccagcctgggcaacaagagcaagactctgtctcggcggggctgggggaagaaagtgggtgaacagataattgaatcagtgggatctggctccagactcacacccaaccattactcaatacagcttccttgatctattatagattgtaattaggcagagaagtaagactcagatacaaattaatggaataggtaatttttatcagaaaaatatgtatttcaatagtcttaaaattactatctattgtcactaacagtgaggaggcataggatgggcaatataggggtacagtgtctatagacatttgagagcaatgataaaccaatcaaaaatcagtctgcttttcaatctcataaacctgccaatggcaattctaaacatagtcagtgataaaaaaaaaacgtccctccaagaccaggccagggattataatcgaaaatagaaatctagtggttgaccatagagataaaaataaatacaataaaataagcaatgttattaaattctactttaaaataattctaatttgacactagcctaccaaaacccagctttttgttaaaaatggagattagttaagtgtcagagaagctctctttatccttgactgaacttttctaaaggcagcaaccaggaagaacaaaagagaattgaccaattcaaaacttcctcctgagcccttcaaggttatctagcagcatgttcacgcactgtttgaactatctggtgtattgtgtgatccacagcttaccatctgtgtcatgcatgatacacttttgaaaacattgtcttcttcaatatggactgtgacagcaacacatgtactctaaagggaattccactccctgcaacattccaagattatctcagtttatatgttggcactgtaagtttttggagatggtcatctattaaaaaatgtctgtaacttttcttcagtattgcacttcatgaatgctcgtgaattttctataagcatggtgaggtttactggaaaagtagaattttctgtggcaaatttaggccacagctgtatcatgaatccagagacaaatttaaacatggcaagtgaccttataggattttttgtattttatttaaaggaatgaataatcatggtttacataaaaatatttaactctcctttgaaatttgagaagaattttaaatacttcgtaattttaaaaaattttttggattaacttttttgggtctggaaaaattcttcatataattttgactggataaaaagatctatgccaaattatcttttttaaggaagccctccccactcagtgcttcttcctgatctctttcttgattttaaaattcaggtcctagtaaataattccacaatgaatatgtttcagattttgtcaatacagactaaaacatgtgagtcttcaaagtcaaccttctttgaggacaaaaatagtgttattcattttggaacatggtagatgttgagtaaacattattcattaacagaatgaattaatataaatacagttttaatttttagattatgtagtttctctttcctgaaaacttttctagcgatattagtgatattatgtctttcagggcataatattttattgattttgtatatgtaagtggctcaaggtttctgttacatttcttgataatgtctagattactgtatgtatatatttatttcactgtaggtacatactaggaatattttttgggaatagatacattcctcaagctctagctctatgtgttacacaagctatttaaggaactgtaatagtgtttttaaaaatgatgcctgcattgtttttatctaaagttcctcccaatataagcaaagagtaaataatactggggatctattagtagagataatcaattctagaattattgttataaattattctttttaatttggatgaataaataattattaaatagattaaaatatgagtgacttataagagaacctccattcattctaacaatacttatacttagtatgctttcaataactttgccatgcaaaagtaaagtttattaacactgtgatttgcttcaatgtattgaaaatttttaattaaaaaaaagctttccttttctttccttattttatggaacttgaccactgagcttgtattgtccagattttttgtgggggagatacagttaaatgttggcactaaatgctgtattgattggcactgaaattaatgcaagaaatgagggtactaaaaattctagtttagaataattaaacccacagcaattacatgggattctattggctaacggtatgaccatcatccaagagctactggtgtaaggtgagaggtggtgaggccggccttaaattccagagcttttttcatgctactcaattttcacagctggaatttactgcttcttgacattgcaaaattattcatcgacttggttttgtttttttggctcaatgctgtgactcggtaattttcagcatcttactgacagatggaaagtgatcactaaccatcttgctgaattaacatggaatgcatttctaagccgcaataaaaggcaggaccgaaaatgtcaaatccacacatttccatctagagtacatatattcctataaagttcattgaatgtttgtgtagaaatggtcaatggaggtcatcgggttaaagtagggccacatctatcatccccgatctaaacaagaaaacaaataaacaattactgctctttttatgtctagataaacatccccaggctctaatttaagcctggtttcttctttttatccttttcaatagaaattttaaataacctaacgttatcctttgtataaaaatcctttgtttaaggactctcaaatcaaattctttcatcaccttttggccaaattattccattttgtttcatctctcttcatgggctatattttccattctgttaatcagctttctatctctcccctgaaactttcccaagttatatgctttggttgtgacctatggaaaataatgcagcatatttagtcatataatgtgttaaatatctcactgttctccactgctgtgtgcctgcttttgtactataacattgtatttgattacaagcaaataaaaccagtgttcacactgttgacccatagccaacttctatgacaccatcttatccccagttttagaaacttcacatacattctaccagattttcggtgtcgtatatttatgtactgctttcatgttgccttcttaaaggatcgaatatctcttttgctaagttccagaaaactggttctatgtatcttctattctctaatatgtacccagtacctagtacagaatctgacaccgataaatatttgaggagtgaagaaaagaaataacattttattttttgtgtccgtactaccttccctcctaatcatttcaatattctgtgcttgattagtgtacaaaattggcttgacctgtaagaaggctttactatatagacccactgacatttctgtcaaacctgcacactgagttgccccttcatcccttcgtctgcaggatggaaagggtgatgtggcagggcactggacagtttcaggagaagatccataagctcaagagttactagaagcagagcttgattcttgattttgaacctttaataattgggtagacttactcagtccttcactgtttcttcatttgcaaatgggtgtaatagttttggccttagaaagctgatgagaggttaaaaagaagtaaagatatatgtgtacttaacttacattagaccctaaaattatgctttgtctatttcttgagcactttttgctcaataattagcattgatatggacccaaacacccatttttgcatactacaatggagagagaaggggacaaataataaacttttttaaataacatggtattttaagacaaagaattattttgtgaaatcttgcatttcttgtcaggaaaggggaaaattacataattagagtcggcaagaaaaaaaatgtattcagtataataattagtgttaaaggacattagtgaccagtataaatcttccggccaatattatatagtttgcacaaaatcatagcatcacaattctgtataagcagtgtgtttatgcattcttttaacaactttattgatatataattgacatacaggaaaccacatatttatttttatttatttgtttttttgagacagaatcttgctttgttgcccaggctgaggtgcagtggtgcaatcttggctcactgcagtctctgtctccagggttcaagcgactctcctgcctcagcctcccgagtggatggactacagacacgcaccaccatccctggctaatttttgtatttttagcagatatgggatttcaccatgttggccaggctggtcttgaattcctgaccggaggtgatccacccaccttgacctctgaaagtgctgatattacaggtgtgagacactgtgcccagcccaggaaaccacacatatttaaaatgtacaatttgataagttttaaaagttgtatatacccatgaaaccctctacacaatcaagataacggacttatttatcacctctagaaatttccctcccactgcttcctgcacccctgcctccataggtaaccacttagttgcttgaagtcactagattactgtgcatttacataaaacaagtcatacagcatgtattcattttctctggcttatttcactcaattattttgagatttctccctgttgctggatctatcaaatattaattcttttatatggctaagaagtattctgttgtgtggatatactaattttttattcattaaccaatttatgatcatttgagtttatttaagttgtagaatattgcaaatcaaactgctatgagcattcatgtattagtccttgtatggacatataacttctttactctgaagacaggattacatagtaagtatatttttaacccttaaagaaaataccaattattttctaaagtggatgtgcaattttacatttccactagcagtatttgagaattgcaattcctacacatccttgggaacaactccttcatttaaattttggccatcctgatggatgtgtagtatatcttaattcatatttaattaattactaatgatattttacagcattttgtgggcttatttgctatttgcacatctactttagtaaagaatctgttcaaattctttttttttattgaactgattgtttttgtgatattaaccattgcactttttttatctgcatccaagtttttttttctgctataaattttactttctataaatttctaaatgctgatgctaaatactgctttagcatcggctcatatattttcatatgttgtgtttttattttcactcagttctaaactactttctaactttccttttttttttttttttttcttttttatgacagagtctcactctgtcacccaggctggagtgcagtggcatgatctcagctcactgcaagctccgcttcctgggttcaggttattctcctgcctcagccacccaagtagttgggattacagtcatgtgccaccatgcaggactaatttttgtaattttattaaagacagggtttcaccatgttggccatgatggtcttgaactcctgacctcaagtgatccacttgctttggcctctcaaagtgctgggattatgggaatgagccaccatgcctggcctaacttcactttttgtttatcctttgaaccaggagttatttagaatatattgtttaatttccaaatgatttgggatattccagctttttgtttgtcttaatttgatttcattggtgatcacagtatatactttgcaaaacctgaatcctttaaaatgtatcaaagtactttttattctctagaatttggcctattttgataaggtttccatgtgcatttgaaaagtcttatgatgttcttgggtggactgttctatacatttcaatgataacaaattagttgataatattgtttaagtcttccatatccttatgaatttttgtgtatgtgtacttattctaacacttattatgaggttattactgaaatatctgactataactgggtattagtctatttctctcttcagttctaccagttttcacttatcttttgaaattttgttgttaatgcacacatttttggaattatgtttctcttgatgaactgattcatctatcattaggaaataacctttatatctggtgatattctttgctatgatatctactttgatatgattgtggcctctccaggtttcttttgattattattagcatggaatacctatactctttgtgtttttgtcccatatttgatgctcagaaatgtttccctaaatagcagtgatgtgaaataactttggattgtcaggcatgtctgtgttttatatttatttagtccataggcaaagccaggtttgaatgggttattttaaaatccagagatttatctgtgttaagaagttactaagaatggtggttccttacacactatgacagcagccttcaaccttttcggcaccggagaccagtttcatggaagacaattttcatggactgttctccagggaggggtatggttttgggatgattcaagccacattacatttttcgtgcactttatttctattattattacatcataatatataatgaagtaaatatacaactcaccataatttaatgagagccctgagcttgttttactgcaactagataatctcatctgggggtgatgggaaacaccgacccccaaagtgtgttgcttatatccagtgtactctgtagtctcattttggttgctgttactgcagaaaatcctgcttcacaaatatgggatgtctgaaatggaaggaggcttttcagtgcttttgtggcaatctcagcatattctgccttgactgtaatccagaacatatgaagatttgaagctttctcaaacatacttttaagaccaccgtcatttgtgatctcaagtagttgatcctcttctagcaaagacaaagtcgattcaactggctttttcacaaatgggtcacagatccactccttcataattcaggggtcttttgtggttgggaagtaatgttcaaactcttgaaatctaagataggtgatcatccaccaagtgggagaaagaaagtcctggttcagtctctttcaaaatctctgcgatgtttgaaacatatcaaaaatcacaatgttctctcctcactcctgtaattacagtttggctttgaatgcagccactttatctgctgatttgttcacagttgtcattctcccctgaagtgatagattgagtttgccaagcaggttgaatatgtcacacaactaggcaagttttgcatcccattctgtgtcgctgaaatgtgctgccagtggttttctaaaagaaatctctgaagttgctctcataactcaaaaactctggctagtgatcgacctttagaaacccatcttacttcagtgaggagacgtgtgtgctctgtttctatcccctcacagagctgcgtgaacacatgtgagttaagggcatgtattttactgcacatgctgaaggcatgtaatgtattgctgataattttaatcacattctgtaaaatgctgttaagttcagatgacattttttggctagccaacatttctctataggtgatgtagtgtgtagactcacattcaggggcaacctctttgacctgagtagtgaaaccagaaagccgtgcagtcatggcagccactccatctgtgcatgtactgacataaaatgacctacttaattttcctgatatgtaattattcaaagacttgaatagttctgcagctgtggtgttggttggcaacaaaagtgcacataacatcatcgtgcacatcctcctgaaaaatgtattgcacaaaaacaagccttgttgccttgttattaacatcagtagacttatcaacctggattgcatataatagtgattcattaatcttctttgacaattgtaccttaatatcctctgctatttcagcagtttgtcttgttatggttttagtcaaaagaggaaaacatgccaccttttcaactgcagccttttctaaaagttcacagcaaacatccatagtagcaggcaggattaactcttcaccaatagtaaagggcttcttagctttagtaatgtggttagccactaagaatgatgctgtcagtgcggacacatttgatgaagtgttagccttcaataattgcttctgttcttcatgttcattttttatttttcttttgaaaaactccaaaggcttgtcttttaatgcacggtgctttgtctccatgtggcaaagcagttttgaaggtttcctggcttagttgggaagctggttgccacatgttatacaaagcgagtattttcttttaaatgcagttttctttttgttgacagtcctagagtcttctgctgtctcatcattgggtctttcccctttttgaaagaagctctcagatgacctttgtttttaatcaattttagcttgtgggttttccaaaactgtgactgaaacaagtgtgcagtgtgggcaagaggcatggatggatgtggtaaataaaataatgggtgaaccacacatggactaaaataagttttggattctgacttaaagtctgccaccagatgcagctgtgcaattgaagtacatggattcacttgccactataaagcctgccaccagatgcagcttgttacttgccactcactgacaggtttttttttttagacagagtttggctgtcttgcccaggctggagtgcagtgcatgatcacgtctcaatgccacctccacctctcaggctcaagccatactcccacctcagcctcctaagtaactgggactgcaggcatgcatcaccatgcttggctaatttttgtatttttttgtagagacatgtttcaccatgttacctaggctggtctcaaattcctgagctcaagtgatctgcccacctcagcctccccaagtgctgggattacaggcatgaaccaccactcctggcctctgatagggttttgatatgagtcttcaaacaattgatttattatctgctaatgttaatctgtattttcagccactcatcagctctagtatcatcctcatctccacctcaaatcatcaggcattagattatcctaaggaatggtcaacctagatccctcacatatgcatttcacgatagggttcacattgagaatctaatgccacagctgatcagacaggaggcagagttcaggtcgtaacgtgagcaatgggtagccattgtgaatacagatgaagcttggctagctcgcctgccactcgcctcctgctgtgcggcctggttcctaacaggccaccaatcagtactcatccatggcccaggggttggggacccctgcactaggagaccaattcagccttgatgcaaatgtattgcacaggaatccatggcctctcgaggaaaatcagtgtctctggtgaaaggccactagccaaacttgcatttgcaacttctataactggaccaagaccaactatcatcatttcttttctatgtgcagctgctactttaattccttcaagactagaggggagtgtggcaaaagacaagagagttaggaatgggtggggactagaaccaggggaaacatggacacaggcaggatgtctgctcctgttcagaactcaggccaggctttaagaaaaaggcagagaaactatggtaggtgaggaatggacgcattccacttccgttctttggtgagaatttacctcttccccatatattgggggaacccacccccaatatttcagtgtaggttctattttccataagtgttggctggctgagaaataaagagagacagtacaaagagaggcattttacagctgggctgccagaggtgacatcccatattggtaggaccatgatacccacctgagcctcaaaccagcaagtttttattaagggtttcaaaaggagagggggtgtaagaacagggagtaggtacaaagatcacatgcttcaaagggcaaaaagcagaactgctaataagggtctaacaaagatcacgtgcttctgaggaaacaggacaaagggcaaaagcagaactactgataagggtccaacaaagatcacaaggcagagggcaaaagcagaactactgataagagtctatgttcagcagtgcaagtattgtcttgataaacatcttaacagaaaacagccttcacgagcagagaaccggtctgaccccaaatttaccagggcagagtttttccccaccctagtaagcctgagggtactgcaggagaccaaggtgtatctcagtccttatctcaatcgaataagacagacattcccagagcagccgtttatagacttcccccaaggaatgcattcctttcccagggtactaatattaatattccctgctaggaaaagaatttagcgatatatctcctatttgcacatccatttataggctctctgcaagaagaaaaatatggctctttttgcctgaccctgcaggcagtcagaccttatggttgtcttccctcgttccctaaagatcgctgttattctgttctttttcaaggtgcactgatttcatattgttcaaacacacgttttacaatcaatttgtacagttaacacaattatcacagtggtcctgaggtgacgtacctcctcaccttacaaagataacaggattaagagattaaagacaggcataagaaattataaaactattatttgggaactgataaatgtccatattaaaatgaaatctttgcaatttatgttcctctgccgcggctccagctggtccctctattcggggtccctgacttcccacaaaacacaaaacccatagaggcattacctcaaccagggcatatttttattaggtaaatcactattacatgcagttgacttacagtaaatgtggattgtttaggtgacttaagctaacgagatcagaacaataagtgtatttttttttaaatattttactattattatgtgaggccctagatcagagatttagttgtagaaattacaggaagctgaaactaaataactatgatttaattgcctttagggataaaagcaaaggactttgagtcttgagtacaaaaataatatgtgcttctacagttaatagaaaaaagatgggccctgtgtggtggtgcatgcctgtaatcccagtgctttgaaaggtaaaggtgggaggattgcttcaggttatgagtttgagaccagtctgggcaacatagtgagaccctgtttctacaaaaaataaaccagtaactggacatggtgccatgtgccatgcacctgcagtcacaggtactcctgaggtgggaggattgcttgagcccaggagtttgaggttgcagtgagctgattgcatcaatgcattccaacctggctgacagaatgagaccctgtctttgaaaaataaaaataaattagaaagtatttctggaaaaaaagatatgaactatcttttaagagagtaaaataaaaactgtactagacttgaaattccattagaaatggaaattccattttatcaataaatagatgacagccttgcaaactttctgaaaaggaccaacttaattatgtgccaacatctcctgctgaagtggagatgatattttgcttatcgtggaataaatatttctgcaaatgatatgatagctagatggttcctggtatgtgaatgtttgtgaagataacacaaatagttttaagatttatattttttcttcaaaaaatggtatatgaaattttatttttaacatggtaagtgtcttcttgtttaaatgtttttagtttagaataaaaattgatacctttggctctccagctatgtctcagacaaggcaaggtaaaattgttcaactaatgcttttctaggtgtagcgttgtcttttagcaggcaacaacagaggttcacggtgacagattttctattagaaaccttagttcagatctgtctctaaggggattttctctaaagcaaacattattaaacattggcagagaaaggaaaaccagtgttaatacatctggagtatacaagaaattgaagactgaagataaaggattaagatgactttattttttcttaggcttccaaatataaccttgaggatagcaatccaatattttaggtccaatgtgatagaattgtgtatgtgtgtttgtgtgtgtattacatttatctttctttaaagctaaaatagtggaaccagtctactactattatatctactacttttatactttataccaataatatatttagggtgtcttttaaaacccatttttattacgatattttgtagattatagagtgttttcttaaaaaacccttacacttcccagtattctgttaaatgcttatactctgttggaatgttaggtacaaaacatattttcaagatgttagagattctgccattgttttatatcataaacatagttcatgaattttttgaaatttatctagttaagttgacacaacctaaaatggcaagaaatcttcagtatacttatgtgaataaatacgtagataccatattaatggtatgatagaatgtaaaaaacggcaaacattttgacatcatgatttactgattatgtaatattaagtgtgtatgaacctccataagcctcagttttattagatgtaaaaagaaatcatatttatcatagagttgttgagagaattatgtacaattacgttctcaaaatgatttacattagatctgacacatagtgggtactttataagtaaaatttccttttcccttcctgaatacaatctattctctgatggctgtgagtcaatagagcactcacgcttacttagaattagggagataaatattctgttttcatttgacatatttagattaaatttgatatatttacctgcatttgcatacatattttccacaatataatatatctagtccatttaagaaagtatttctattttcctcttctctgatgagcaaaagttgatttgggagtacccaaatggttctgtacaaagccatcttaaggctagaaaattgtcaactatctcagacgtttattattaccaatgaaattattcttgtaaactgaagaaaccattgagaaatgtctagagttgaaattcatttgttgaattttgtaagagtttccagtaacagtcattcctagttaagacagtatgaacctttgtagagtaacctaattgatatatttgcttcttttttgagtctattctttggttttgtcatcagtctttgatacttggtgaaagtgacatagtgaaggaatgctttagctaaagatgtggaccaaaggaggttaagaatttggttactaaggataattaaggatgaccaaaagccaataacagaaattgtaaaagatttgtgaaattctgatacctgagaagtttcttgatagcttttaattaatttacaggattctttctttgctattatcaggattgattaaatagcagaaactgaggtaacaggaagagataataagatagttaaggttaactgagcccccaaaatgtgccaggtactttctcatacatgttagaaaaacctttaaattaggtggtattgatattattattttggttgttattgttattatcctcatttaatagatgagaaaacagagaatcagaaagaagtctgcctggatccagtgaatatcatttctccatataagtaacagaaatcctttgcctaattgcggttttgtcaccaactaactagcagtgtgacttgggcatgtcacataaggtctctgtggctatttctaaatcttaaatttagaaacttggattagattatttgtgagattttttcccccagataggaactttattatctgcaaatagcaagaatttgaatatagtttatgtaacaataccaatggagtatatatatttgaaaatttgccatctaaattgtttaaattatcttaatgatcatttagcactcaagatagtttcaatatttaagagcagagaaattatataatataaagaatgcatacataattaaaatattcaatatactgttaactaaagctatttcaaattagtaatttatattaaaataatgaattcaataaaatatgttctcattcagatgtagaagtcttatataaagttgttttcttaattatatcaaaatagtttttatcaaggtacaagagagacagattgcctaaatctctggtgaaacaatacttggctccctaatgctgaattaaccagtatattaattagcattgaaaaagaagaaataaatacccatacaggtggcactggaaaatagcaaatttctgaaggtggtacatgtattagtgacttgggatatatggctctagtgaggtaaccccggcacccattcagtaatttcctttcacctccccctttgctagctgtcatagggttcaacccaggcctgtgacaatgcttgcaaccagctttcactgtggacattaatctgatgacaatgaagacatgtcatgggatatacgttttagaataccaattcttttctttctaaaacctaataggatatgacatgagggataattctgtttctttgctgtttgtagtaatgcatttataccttgaaggaatatttgagtaggctaaattaatgcagatttaatgatgatttatattatccattgagatactttgctttctgcatgtgtttaatggttgtattaaaatgagaattttattggcacctttatttgaattctcatattaaattcagctcaagcatagtgtttttttggacttctttcatagcgtgctgtctctctgataaatatgattctacagcagatgcagcattattataggaggcaagcaggcttattaaaaggtgaataaagacatctaacagagaagtgcactattaaggtttttaaagacatttgggagtaaagccaagagaacaatcatgtactgtaagcagaatcctaaaaaaaaaaatcaatactttgttgactatgcagccaatgaggaaatgataagataaaggctaatgtgatcatttattgatatgtaacacctagttgaactgtaagtcaagtaagggacatgttctgtgctgattgattaaaaaaagagagaaggagaaggagactaacattctataattttttttcaaaggttaaaatatgtcagataatgaaaaaatatatagctcaggaataacaaatcttgtcatgagggctttgcaatgttgtccgtatttatctcagagtgtaaattacactcagtagagagataccatttttttctctgatgcagatatgttgcagttttagggttttatggcgaaggcaaccatgtttttgaattacctctggcacaactcttgacatgtatacaattttagtcatctcttagagtctataaaactgaggtcttagtgtaaaatgataaaagaagaaagcaagtgcaaagctttgtttgggataattatttatgttacagtttcagaatggtttatgatgtagatattagaaccagatggcatgaattcaagtcttggtcccgaagtttaagagctgtgggctttgggacaagtaatttatggtaccttgggcttcagtgttctcagttgttcaatatactttccatattgaattgctgagaagattacatgaatctggcatagagaaaacaatcaatatatattagctgttattaatgtttatttaaactaaaaaaaattagctaggatctgaaaatattaataccaattctaaaatacttcttataacaatatttaattatgaatctctttagatgactaaatttctctgtatcaactacaatgaagtaaaatatgccaatacaataaaacacaattctggttaaaatggtggacgaacttgttacttttcatcaataaatctagtcaaaaaaattatttacttccagtcaatatatcttgtcgttagatgcattttattttacatactttttcaatattttttcaaagataaatttgctttttcactgcctatcacatactttatcagtagatatcacatcaccgactttataggtttatacctataaagttttacatctataagttatgcctataaagttatcagtttacaccaaaactgagaacaaggtaattacccagaatatacaggccaatgaattcatcatggcagttccaagatttggatttctctatgttgtaatcctttagcaatccttcaaatctccatttttaatttgacaaagacctaaataagcatgtgaaattcatagtaaaaaacaaaagttcaaatataaatgctcctttcagaggaagagaactagcaagagaagttctgaataaacagagccttgcttaatgtgattactcctctatcataggactatctttctgacctttcccaccactcttgctaaatatatgttcatactctactcagctaccctggtctcaacactgttccttaaacattcccatgcctgcttatttctcaaaataagcatatttatctcagagtataaattacactcagtagaaagatatcatttttttctctgatgtagacatgttgcagctttagggtttagggttttatggcaaaggcaaccatgtttttgaattatttgaattatttgttggagtgtcctttccctcagatagtagtgtaactcaatccctcagtcttcaagaggtcactcttctaaaatagtgttctgagtatcttaatccttataataggattccccatccttttctctctgtagtacttcatttctctttttagcacttcttaccctccaacaaattacttaaaaaaattattccttgtctcctgaatccccacttagctattaacatataagctcaataaagtcagaaatttgtctgtttcattcattgctataaaacccagagctcacaagatcgcctagtacatgatcagcattggcactaatgcatgccattttaatttttttaaattagtttttatttcaatagctttttggatagtagtggttttttgattaaatggatgaattttatagtggtgaattctaagattttagtgcactcatcacccaagcaatatacactgtaccctatatgtagccttttatccctcaccccactcccacatcgcctgtaaatcctcaaagtccattatatcattctgcatgtctttgtgtcctcatagcttagcttccacttataagggagaacatattgtatttgattttccattactgagttacttcacttagaataatggcctccagctccatccaagttgctgcaaaatatattattttattcctttttatggctgagtagtattccatggtatatatatgccatattttttttatccactcattgattgatggacacatagattggttccatatttttgcagtggtgaagtgtgctgccataaacatgcatgtgcatgtgtctttttcatataatgacttcttttcttttggataggtacccagtagtaggactgctggctcaaatggcagatctgttcttagttctttaaggaatttccataccgttttccaaagaggttgtactaatttacattcccaccagcagtacaaaagtgttctcttttcaccacatccacagcaacatgtactattttttgactttttaattatgatcattcttataggagtgaggtggtatctcaatgtggttttaatttacatttccctgatgatcagtaatgttgagcattttttatatgtttgttggctgtttgtgtatcttattttgagaaatgtctatccatgtcatttgcccactttttaatgggattatttgtccttttcttgctgatttgcttgagttccttgtacattctggatactattcctttgtcggatgcagagtttgcaaatattgtctcttattctatggttttctgtttaccgattatttattttgctgtgcagaagctttttagtttaattagatcccatttattatatttgtcacatttgcttttggggtcttagtcataaattctttgcctaggccaatgtccagaatagttttttcaatgttgtcttctataatttttatggttttatgttttagatttaggtctttgatccctcttgaactgatttttgtataacgtgagagaggggttccagtttcattcttctatgtgtggcttgccagttttcccagcaccatttattgaatgggatgtacttttcccagtttatgtttctgtatactctctcaaagatcagttggctataaatattcagctttatttttggattctttgttctgttctactggcctacgtgccgattttataccagcaccatgctgttttggtaatcatagccttgcaatatgatttgaagtctggtactgtaatgcctccagatttgttctttttacgtagtattgctttggctattcaggctctgttttggttccatatgatttttaagattgttttttctagttttgtgaaaaatgataatggcattttgataggaattgcattaaatctatagattgctttggagagtatgttcattttcacaacattcattctttccatccatgaacatgggctgggtttacatatttttgtgtcattagtgatttcttccaacaatgttttatagttttccttgtagagatttttcacctcctttattaagtatattcataggtattttattttttacagctgttgttaaaagggttgggttcttgatttgattctcagctgggtcactgttgttgtatagcagtgctggtgacttctgtacattgactttgtaacttgaagctttactgaatgtgtttattagacctaggagccttttggtggggtctttagggttttctaggtatttgatcatatcattggtgaagagcactggtatgacttcctcttttctaatttagatgtcctttatttctttttcttccctggttgctctggcttgggactttcagtagtatatcaaatagaagtggtgaaagtgaacatccttatcttgttccagttctcagggggtcatgctttcaacttttccccattcaacatgatggtggctgtgggtttgacatatatggctgtggttattttgacataagttccgtctatgactagtttattcagtgtttttatcataaaccaatgttagattttattgaatgcttatttctgtatcagttaagatgattatatggttttgtttttaattttgtttatgtgaagtatcacattaacggatttgcatatgttaaatcattgctgcatccctgagatgtaacacacttgctcatgatgtattatctttttgatgtgctattggattcgattatctggtattttgttggggatttttgcttctatgttcaccagaaattttggtctgtagttttatttttatgtcctttcctggttttggtattagggtgatactggcttcatagaatgatttaggaaggattctatctttctcaatattttggtgtagtttcataggattggtacaaattcttctttgaatatctggtagaattcagctgtgaatccatctggttctgggctttttgctgttggcaattttattactgacttaatctcacagcttgttattggtctgttcagggtttctatttcttcctgatttaatctaggaggattgtatgtttacaggaatttatgcatttcctctagattttctagtttctatgcataaatgtattcataatagtctcaaatgatttattcgtgttggttgtaatgtttccactttcatttttaattgagcttatttggatcttttctcttcttttcttggttaatctccctaatgatttctcaattttgtttatcttttcaaagaaccagctttttgtttcatttatgttttgtatttttgtttcaatttccttaaattctgctccgatttttgttatttcttttcttctgctggctttgggtttagttagtgcctgtttctctagttccttgaggtgtgacattaggttgtcaatttgtgctctttcagactttccgatgtacacatttaatgctatgaactttcctccttgcactgcttttgccatatcctagaggttttgataagttgtgtcactattatcattcatctcaaagaattttttcatttgcatcttgatttcattgttaacctagatcaggagcagattatttaatttatttgtatagttttgagggttccttttggaattgatttctagttttactctactgtggtctgataagacactttatataatttccattttcttaaattcattgagacttgttttgcagcctatcatatcatctatcttggagaatgtttcatgtactgatgagaagaatgtatattctccagttgttgggtagcatgtcttgtagaaatctgttaagtcaatgtgttctagagatagtttaagtccattgtttctttgctgactttctcatttttagtatttgtttaagtctgttttatctgatataagaataactactcctgctcccttttggtttccatttgtgtggaatattgttttttaccccttatcttgagtttatatgaatccttgtgtgttaggtgagtcttttgaagacaacagatacttgtttagtgatttttaaaaatctattcttccattctatatcttttaagtagggcatttaggccatttacattcaacattaatattgatatgtgaggtattgatctattcatcatgtcagtcattacctagatacttttttattgtcttattgttttataaaccctgtgaattatgcttttaagaagttctactggccaggcacggtggctcatgcctgcaatcccagcacattgggaggccgaagtgggcggatcatgaggtcaggagatcgagaccatcctggctaacatggtgaaaccccgtctctactaaaaatacaaagatagctgggcgtggtggcgggcacctgaagtctcagctactcgggaggctgaggcaggagaatggcgtgaacccaggaggcaaagattgcagcgagccgagatagcgccactgcactccagcctgggagacagagcgagactctgtctcaaaaaaaaaaaaaaaaaaaaaaaagaagttctattttggtacagatccagcttttgtttcaagatttagagttctttttagcatttcttgtagtgctgacttggtagtggcaaattccctaagcatttgtttgtttaaaaatgattttatttttcctttctatatgaaactttattttgctgggtacaaaattcttggctgacagttattctgtttaaagaggctaaagataggtcccaaatctcttctagtttgtaagcattctgctgagatgtctgctgttagtctggttttcctttatgctacctgatgcttttatctcacagctcttcaaattgttttcttcatattaactttagatagcctgatgactatgtgtcttggtgacaatctttttgcaataaatttcccaggagttctttgaactccttgtacttgaatatctaaatctctagcaaggccagggaaattctcctcaattattccctcaaataaattttccaaattttagccttctcttttctctcagaaacatcaattatgtataggtttttgtcattttacacaaccccataattcttggagactttgttcatttcttttgattcttttttctttatctttgtctgacttgattaatttgaaagccttgccttcaagctctgaagttccttcttctactagttctagtctattggggatacttgtcactttattttgtatttccctaagtgtgtctttcatttccagaagttctggttggttattattcatgacatctatctctctcgaaaattttttattcatatcctatttaaaaaaacatgtaatttttcacctttctctggcatttccttgggtagcttaataaacaaccttctgaattctttatctggtatttcaatgatttcatctttttctggatccattgctggggaactagtgtgatcgtgtgttagagaaccttgttttatcatgttatcagaattacttttctggtttcttctcatttgggtaaactaattcttctaatggtttttaaatttatttttgatttgaccattttttttctttcttttctccccgtaagtatatgactttaaggtttatagtttattatagcctaatttggttcctgatgcttttaggggtgaagactgtatgagttccttgaatatagtctttgtatgatggtttcctcagatgctggttgtagtagcaatgtacttgatgtgtgggcaagtacaccctctcctaaggagttgtaatggcagaggtctcttgaagcttatctccttctcctgtggtatgcactttctcatttacttaatttttcctcagtattttatttactaagttgatgattccagcttcagaacagtagaggaggtatccctgggtagaaactagttgtaggtaaagcagatagataaatgcaatacccaatgttgtcagaggtcccagcctttatgagggtggctggggtagctctcaattagacacactgaggtcttatcaggtggaagggtggggaccacctaagctcccctgccaggccaacaggaaagctatccacctcccagactcactcctgtcccagtgttccagctactcagatcagacaggcacctctttttctctgtaggaatgttgatattccaagtagagaggaattgtgagtctgcctctcatgcaagcctgaatctgtgcggtgctcctcctgtggggatgcagtcactgtgaaggcagtctacaggtgcaaccatgcaaagctctcatggaagaagccccagccatgtctgcagtggtggacaagggaagaaaagagatcccttctccaagactcttcatgagcctcaaggcttcctgacttttggggtaaagctgcagattttccctgatgatcccagcactgcaattttgtctctgctgcaagaaacttccaacagcagaaagatatggaacccaaggcctgccatctgggttcatttgtcccacggggtgttcccttgatgtggttctccgcacctaccctgggagtaggagtttctgagagccaggctacagcgattgctattgcttttctgggtttagctatccagtgagactcccacactcctggttggtgctggggaatgtctgcaggggatccagtgatgtgacctgtcctcaggtcgctcagcagtgggtaccagcacaagctgtgataggggtggcaggggattgatgtagactctgtgagcttccttagttacagatagtgtgctgtctttctcaaattctgattataatagtagtgaacttgttacatggacagactcaggacctcctggttagccagggtgttgcaggcaatggtgatagctgagattgcacactggttttatctttcctggtcacagtgttattctacctagagacactatgagggactatgtcagttggcttccagccaggaggtggtgcttgcaaaagagcacctgatgcagtagtagcagtgggatttgagcttgctctatgttgcccaggggaggtattctcatttctcaggtgataggcaggaccatagagctcccaaaagtttatgtcctttgtgttaagctaccagggcaggtggagatgcatagccaggcagggcctatctcaggtggatcagcactctgactctccatttgtggggcaagctgcagcccttttgggggttgggggcagttctcaagccactgaggtaataatgttccagtggagagcacaactgacttggctacacagaagagttcacgcaaggaatggggaatagcaggcagcaggaagcctcacccagattccatgcagttggcaaggcagctctcactcccacagtgctctgctaatagtactggactaagtctcaggtatcctgcactgagaacccaaacttgccccaggccataagctttccctgcagagacagcaacagaggctttcagaccatgtcactccccatctgcctcacaaggccaggcacccagctcctgcactcatgcctgcagtgtacttcccactagccccaccaagttctggacaagagagttcatccccacccaaggttacattaccaaattcagttcggagcttctttcaacccatggccactgcttgagatagttaacagattttcttgaagttccctgtgagatctaataaggaatggcttcccttagtttacactgagactggaaataccgccaaggcacttcccactgctgcttttacttttatcttttttaccactctctaaatcagttccagctctgggaggtttaaggccttcccctgtgacatggaatttcaggttccccattgggaatgtgtatcctggaggcagtctcttccatctcacactctgggtacttaagagttttttttacctgcctcacaatgtaggcttctgcctgacacttctttcaaagggtctgtggtttcttttggttttcctattaagttcctgtgttgctttttggaaaaaaagttctcactgtgaatctctacacgttattctctccttccaagtggaagagacatgctagcactgcttccagtctgccaccttcaatgcatgattgttgaataaatgattgcataaatcttgtctcaaattgggagtttccaaaattagaacctatacccacaaagatatgaatacagaagtatactttggagataattccagaaaccactaataggggagtggggaagtaaaccagggaaaggaagaaacccaatagagggtacattatcaggtatgttgctacaggaacgagattcatcctaccaggaaactctgggagatagtgtagaatcctcaggattacccaaaacaagagacagggctggaatacgtattcatcagctactgtcagtcgttggtttagggctgctctggaagagggtttggagtgattaatggcctgatggggacttccagattgggctcaggcagagttgcatgtgcttgttgttaaaagccatttgcttagtgtggacagaaatggtgaatatcaaggagtgtagatggggcactgacatcatatatttcagatccatacaccagaaaaagtcttcatcacttgagtgttcaagaacctaaggccatctctacatctaagggactctcaacatctcaagatgttgttgttcttctgctctaaccacaaattaccaaccaaagctttgtattcaactgaaatcggattttaaaatgcattaaatttattttcaaggaaaaacaaaattgacaaaagggaataccaaagactgtctaagtgtgttagggccaagaaactagcttacaatgtacaatgtatccaaataactagatcatagtttaggacttctaactattgatcattatcatctatcacaatggtttcctcttccttttgttagcttttccataaagtctttacagcctgccattggggtacttagatcttatcctgaccttatgtaatctgctctgttgaaatgattctacaaatgaaaataaaaaatgatttgacaatagatactttaagtaggttaccaaaaagagagattagccagcagacaatggtgtttctaaaatgtacttttcttcatagagcctgtactccagacaataagcaatatttttttttctaagcattttaagctgtataaactgtggcctctctaatatatttggggcatagggaggaaaatataagaaaataaaactgtactttataacatccttatctatataggaaaacaaaagaaataattaaatgctttacacattttgagtaacatttgaaatgattcagtgtaaaaaagatataagagaaaaaatgatgccagatgatactagcagtacttgaaagttaaaagtatattttagtgcaattctccaggaatctatacacgaaaagtaaatgtattttaatgagaaaatttaaaaatatcaaatatcctgaaaatctaagggcacattgaataagtggtgtgtgtgtgtgtgtgtgtgtgtgtatcttggtcttctctttttaagtaataaggcactaagttttagatcaattctaaaagatcaaatagaaatgttaaagaaaaagaaagataagtatttgaatggtttattcaatcggactcattagcacattttttattttattattctcaactgaatttattatgcactttccaatgaatgttggatggaaaaatgatttggaggagtttttaagaaaaacatatttttaaaaaaatgtaattctgaccctaatgccttcccacactccctgcaatactgaaacaaaaatattccattcatcacaagttatacatttagacacattgttccaaggagatgaacctatagggaaacaaataataatatgggaaaatttttcttcagtttcagaatttgttcttcctggaattcaattagagatacagttttcgtgttcaaagacaaatataattacataagaattctgattcttggcttggcatagtgatgtgtgccaatggtccctgctattcaggagactgagacaggaagattgcctgagtctaggagttggagactacaatgagtgatagtcatgccattgcactccagcctgggtaacaggaagacaccctttctcaaaacaaaaacaacaacaacaacaaaagagaaagaaagagaaaaaacagaaaatctgatttttgtgagaatctgacagtgccctctccacagtgtatgtgtttgtgtgtgtttgtgtccaggtgttgtatgagtggttccagagatcactagcagtatgctttggatgcatataaaacaagtatctacattcatactggatatgtgtgtgtgtctgtgtcctttttccttgattttatgagtatctcccctttccttgggtttttatttagtaatgtttatctaatatatgtatgtagataaataataatttagataaaattttctctatattcccctctatcttcactttccaccttggttttataatctcaaaaaaaagatttgctaactgtggttataaagttggcaaaataagttattccacattatgaaaagaatatggttcttcctattcataattattgattgatatgattacaaactccaaataaacatgaatgataagtttaaagcttcatcttacgtgagaaaagtttcaaggatgtcaatcagaaagaatatttatctttgctaagtaaataacaaatacattagattgcacctaagaattttaacacctatgcaagcatcattagaatgtatacagaacaagataaatatataaatattatcaaatacaaaaatgtggtgaatgtccctaaagaacgatcttttgaagcaggtatccacatctttaactgttgataaaaagtattttatttcaaatattaattatctttcttattcgaattggaaaaaacaaaacacaagcctataaatgacaagctgtagataattgtttaaggtatatctacaagagaaatattatacagccatagaaatgacacttgtcaggatttttaataacctagaaaaatatttgtgtataatttttagtgaaatatgcaatatataaaattttatttatagtcagaaacacgccatggagcttgcccctgtgttgtatgactatgggcaatttgtttctacttttctatattacatcatgttaaatttcccaaaaagtatatgttacttatgtaatggaaataagtgccactttccaaggaatacaagtctaattcaaagtaaaatgaacacatggacacagggaggggaacaacacacactggagcctgttgggagttggggagaggggaggggagagcattggagcattaggaaaaatagctaatgcatgctgggcttaatacctaggtgatgggttgataggtgcagcaaaccacaatggcacacgtgtacctgtgcaacagacctgcacatcctgcacgtgtaccccagaacttaaaaatagagattagaaaaaatgttaaaaaagtaattttataggcttgataattaaaaataaaaacagataataaaatcaagcatatttttgtttaaaacactctagaggtcttctaatcttccatatatctcagatggggaatctggtaccccacagcatttcagtgtcttctatgattctaatactctgtgaccttgagcaagtcaccaatacttgttatttgcttgtaaaatgaatgggatgctttacaaagttatagtaatatctattcacttaaaacaatgaggtgctgaatgtaaaggatctaaatcagtgctgacaaccaaaatctcagaaatcaccgctaaatcacttaactcgtaaccaaacaccacctgtttccccaaaacctattgaagtacaaaataataaaatgaaataaatacctgtgttcttcctccaaaattaacacaacttgatgataaagttgacagtacaattcacatcttttaatttttcagatactatttattaactagctattaaatagtgtttactattacttaactcttactagttactatttgttttaccagatattaacttcatgctgtatgtatttcccttcagtttttagtagagtaaactgaggcacaaagaagataaataatcgccctctgttatatgttaattggagccagaactaggattcaaatcaagttccgcctttaacttttgggctgtttctaccttgcttcatcgcctcactccaaatcaaagtctgaatctctccatccaaaaatataaagtgaattgagcaattgtatggtggttctgatcaggatcagacaagctagacaaatataatcaaatatctattttaagatattttagtagattcaacttttaatgtatttactttgcttttaaaataaaacatagaataaatagtaggaaaaataaaagaggcttattttgtttgtctctcagctggttgaaggagcttaagtggaattgctagaatattctaccagaatctgtaacaggggctcaaggatgactctgaagacctctctatccctctatgttatcgagatttctgttatgcctctgtacttgtggttcacaaatgcaaatttgtttgtacaacattactgtacaatttgtcaatactgcaggctgatggaaagagaacgatgaatggaatagcaggcattttgaacatgacctagagtacattggcaaaagatgagagtgtaactactttccccttcccccccactcacttcataaccataaagttacaacacaaatttctaaatgagaaaaaaaaatcacaaattctagtcaagtgcgatagatggcattacagaatgtaatatgacacttgctgaaactgcataatgtgaattcaaaaaatgtccactgaatattacattgcattgacatgcaatttttaaaatgtcattattggagcctctacaaagctagcttattatagattcacctctttataaagaaaatatgtcattggcaatttgttttgctttataagactttctcttctctatctggaagaataacataaaagttttgaaaaataacaattcagaaacaaaacagaagtggttggctctcactgggataagctgcagctggcactgttattcttaactgctggtgcgtccacataacctgtccactttccctagaagaacaggttgtccctgtaagtgctcattgaggaatattaccctgatggatgagaagtaacatgaaattaattttcagattcaccaaacactttacaacgtaggttaacctgcagctttccagataatcaatatcactaaatgctataatagtatatgtcatgtagagactatgctaaaacaaaggtggctgtaccagctcctgtggaagcatgggtttgtgaatccctttttaaaataaaactgattctgactcttctggcagtaaatgactgcattactcaggtaattataaaccaatgagatagcctgggaattatgtaagtagcacatacagataacaacattactattaggagtctgtaatattttaagcaataaaaattgcaaagtgttcccattagtcaggatttgtctgcaaattacagaaatccaacacaaactagtggtaaaatggaatttcagtcttgattacaaggagtggatagagtagatgtggggcagaatttgtatccaagtattcacgtatagtcattagataccaatctcatttttttctccatttataagtatgtctttactctgttggtgtcttctgagacaccagttcttaaaatggcccctagaaatatgaggttatgatacttacaatctcaatgggagaaaaataatctctttcaaaatctataggcatgacctcaaacaactttcattgaccttcctaggttatcgacagaaacttctaattgcctgtttctataccagtttacttttgctttctccttagacacagaactttacctcttagcttgacatattgctgtctagaagttatcacattttccagcttctcttgtgttgtcgtgtgactaagttttgaccactgagatagaagcagaatgttatgtgggacttccaagaaaatggttcaagggtagttttctcaacatggaagggcttcttcctttgcccttctgtcccttttcctctggcctgcaaagttatgtcttgagctctagcagtcatggatggtggagcagaaagatagaagtgtcagttcctgaggacatcacctggccaccatacaatccctgtactgcctcctcagtgcctctctaatgtaaaagcataatgattgatcacatttcagcagtaaattacaatggaccaactgtgctctagggcagtagacagtacgccaccctaggtcaggccgtcctcccttgtggtagtggaagtaggaatccagaattaacggcttcaccaggtatgagaacagtagtttcaaaaaacaaaacaaaaatgaaagctgattaaaacaataagaatgttatatatttactaagtgcgtatgcaccaaaaaaaaaaaaaaaaaaaaatatgtgccagtaaaccctacgggctacagaaaaggagacagagaatatgttctcctcacatctgttaccactttgggtgaacttgtaatcagtcaaggagatttagtacatttgcaaaacagcatgtatagttatttgtttccttataatgtaaaaagagacgttgaggagtgtttaaaatgagagaacagaattgtataaggttgatttaaaaagagaaaataatgacttctctataaaaggtcatgctttgatagttaagagatggttaatctgcctcccaagagaagatgaggtcttctacaaaagaaagtttgccagttctaactccatccttgtgactccataatgttataatctggaaatcaaaggaaaaaggagctgccatgattgaagcttaacttcattgttcccatagttcttttcacctcattatttccattactatatttatttatttatttatttattggtaaccaacattactacctgttacccaactatttgtaattatcatgtttcctgaaatagaagatggaaaatggtaactacaaaagaatagtagcaagaaggacaaaactttgtatttccaatatctcttaatccccaaattacagtcctcttcctaattttactctaaaatggttttatgcattatattttcaaactaatagcaaacttaaaaaaaaaaggaacgaaacaatttttctggtcagctgaataaaacacatggctgacttacaagtggtatttcattttctaaacaactaaaacattaatcaatagtgaaacaatatataatttcaatttgtttaggtagctactggttcattattttgtgacatatttaataaacaaaaaattacatatatacacaacaggctttatttcacatattcattgaagaactgacagtgtttccccaataatgtaatgtatttatcttgacctctgccacaaagctaaaaaaaaaaaaaatgtagaatgggaaacttagactccatctctacaaaaaataaaagaaaacaaattagccaggcttggtggtgtgtgcgtagtccaggctacttgggaagctgaggtgggaggatcacttgagtccaggaggtcgaggttgcagtgagctatgattgcaccactgcattccagcctgggtgacagagcagaatactgtctctgaaaaaaaaaaaaagttatatatgaaaggcctacatataacattttaattgttagatattagtggaaaaactttgtggtgtatgtttatttagaatgttttcaggaggagataaaaagtggtacagaaaacatgaaagcatgaaaacatccttaaattcacagattaaaataaaacctttggcactcttgaagaagatgcatctttagacaatttatatcctatattctgaatcacatgtattatagttaggctatataggaaagcactggtctctactaaaagtacaaaaattagccgggtgtggtagcacatgcctgtagtcccagctacttgggaggctgaggcaagagaattgcttgaattcaggaggtagaggttgcagtgggctgagatcatgtcactgcactccagcctgggtgacagagcaagatcccatctccaaaaaaaaaaaggttgcattcttttgaatccttgcactgatcacacaatttagtctaggtcattgaatctgcatttttacataaacaatagggcagagaaagcaatcagatatgcatttgtctcaggtgaacagagggatgatcttctgtcccctgcacctgtgaagataaactcagcgtttagattgccaggttgaaattcagcggaactgttttaggataaatatcctgaggttcacaaggaatttccttgtgagcaaattgtgagggaggtatgcagtgtaaaagaaaaacaaaaactttgtagctgtgttatttaagaatgaaatgaaagagaaagacaggtttgcctgatgtaattctcagcttgacttttcccttgtcttagtgattttagggtcctgagatttattttcctttcacatgtgtaaatatccctcttttattaccatttcagagactgaatctcagagcagttcaatcatttgcccaatgctacatgctgaaacagggaagtagcaacttgaatccagacagtctcactccagccatggtgtgtttcccattactttgggatacatgcaaagtcttgagaatactttaaaacttgcatgattgatgagcataaataatagaataattctgtttcattttaattatgaaacagaataaaaacatggtagcctcaaatgtcaaataaatctctaggaaaataatatatgtactttgtatgtacttttttttgctatgacttatagttaattaatataaagcattcaaattctggagcttaaattctgaggctctaaggaagtttgtttttgttttgttttgttttacaggcaattctctgtaattcatactaccttcccatgctgataatacctaagtattcagggactaaatgaacaatattttatcatggtgtaattgggtttttaaaaactccttgcaattctaatagcaaggtaattttaattaaaacaaaatgaagtacacagctcttattccgtttgatgagtttcttctacagtatacaacgtgtgacagacacccaaaacaagatacagaaacttttcttctacccagatacttccctgatgctcctttcagtcaattctcccaacactcctcttcacatccactaattcttatatcaccatggattggttctgtttgtgtttggattttatatacatagatatggtagccattattttgcttgtgactttttcatttgcataatgctgtcaaatattgtttaatgctgtcaaaaatatttttgacttattgtatgttaagaatttagtttttttattcttgggtaatattcaatgttatgaatatattccaatttgaatgattttagtagttaatagttatgataagtttgcttatcataatcagaaaggttatagcaataacatgtctcatacaaattagttttataaatatttacttttatttttattgggtgaatacctacaagaaaaattgctgagtcacatggtagatatgtttacctttatgaaaaccagcaagagaggctaggtcttccatattctcataaaaattagatatggcctttttgatttgagtaattccagtagatatgtagtgttatctcattgtagttttcatttgcattagcttgatgactaatgattttgagaaccttaatttgctactcaaatatgttgtgtgtgtgtgtgtgtgtgtgtgtgtgtgtgtgtgtgaagtttctattcaagtgttttgccaacaaatgagtaggctgtgtaagaatttttatatattctggataattcctttctaagatatgtatgtgataaatctctttatttaatgatatgtccctcatctattcagttggttaatggtgtcttttaaagaccaaaacattttaattgtgttgaagtctaatttatcatttttttattttactgtgaatgctttttttcaatgcctgtccaagtaacccttgtcttttccaacattataagagtattttcctatattctagaaattttacattatgtttatactttcagattgcttttttatgtatggcatgggatggagatttatgttttttatagaggtaaccacttgttttagcaatatttgttttaaaagacttgcctttcttcatcaaattgactacaggcctttattgaaactcaattgaccatatgtacattacttattttttaattcattttgtccaatagtacattctcttgattactgtagctttacagtaagtcttacaatcaagtactgtaaattctccagtttaatttttctttttcaagaaatgtttgattattctacaacctttgcatttccatttttttttctgtttgtttgttttttacatagagtctcactcttgtcacctaggctggagtgcaacagcatggcacagctcactgcaacctctgcctcctgggctcaagtgattctcctgcctcagcttcccaagtagctgggactgcaggcacatgccaccacacctggctaattttcatgttttttagtagagatggggtttcaatcagttggccaggctggtcttgaactccttacctcatgatctgccagcctcaacctcctaaaatgctgggattactggtgtgagccaccaccacgcccagccttttccatgtaattttacaacaatcttatctgtttcttcaagaaaatcttgctgtaatttgacagtgattaaaccaattatatgaatatatatatatataaaactatatatacatatatataactatatatatataaaactttggaaaaaatgaacattttaaacaacattttcagttttctaatccataaacatgatatgtatctgcatttcttaggcattattcaatttttctcagcaatgttttatagtcttcagtataaaaatcatatataaattttgctagatttattcataggcatttttttcattgataccattgttagtttgtttcatttttgtttattgctaacatataaaaatataattaaatttatatattgatctatattttattaccttcttaaatttacttattacttgtagtagttagtagattcctttgggtctaaagagaaacttaaattccattcccactgttgttttttatttcacttctccacgtcttgctcccagaggcatccctagtgctagatttttgaatcccttttcagaaatatcccatccatatacaaacaccaataatattacattatatactacatataattctcctatttaaaggtctctcatattacctttctgggaggatcaaatttattaccagtaccacatatattatgtgataatatgcttaaaatgaaagcaagttccatatttgttttctccatacttataatacttgaaaaagggaataatgagatatatgaatgctatttaacagtataaattaatgtaaaacattacatattgtgagcgttttatattaattactctggaggtaatataacatggaaatatatatgttctgttttatatcagttttttgagccagtgatttttaattttggtttctcattggaatcatagactagcttcaatgaatactgatggttggatcccaccccagagagtctgattttattgatttgatatgggatatggtttgggcaaagagatattttaaagttccccaagtgattttaatgtgtaaccaatttgagaactgatgttttaggccttactcatacagttccccctctaaaatgtgtctctttgtgtgcgtgtgtgcacctcaagggaggtttgaagtgcagaacaatgctatgtcgtttgtatttgtaacttttacaagtaatttcatggatcaaaaagttaaataactcggaaacataaaatttgtataactttacataaggcagctaatgtttcctgcattactctttcttcatgccccaaaaggaaattttagcaatgaactctaacttgtttttgttaagaaataggtgcaggtatttttaaacacaaactatgatacaaatgtttaaatatagaaaaaatacaaaatggatttagaaaaaaaaatataaaacatattaaattgattgtcattaccaaatattaacctttggcagtcaaggagaattgttgtgctgagagtcagtgctataaaactggattacatgggctatttttctggtccagtctgatctttcttattttcttatatcctaacattttaagacatgatttaaaaatagtacaagcaggccaggcatggtggctcacgcctgtaatcccaacacgttgggaggctgagactggcggatcacctgaggtcaggagttcacgaccagcctggcctacatggcgaaaccctgtctctactaaaaatacaaaaattagccgggtatggtggcgaatgcctgtaatcccagctactcgggaggctgaggcaggagaatcacttgaactcaggaagcagaggttgcagtgagccaagatcatgccactgcactccagcctgtgggatagagcaagactccatctccaggaaaaaaaaaaaaaaaagaaagtacaagcaacacatgcaaggagtaaataagactaatgtttacacatggaacagtatttttagagtttattataactggcaaataaaatagacatccaaattgttcagtacaaaacctcatattttcagtggccattcaatctaacatatttcctgattgactgaggtgtgcagaatgtaacattagaaattctgcaaaatttaggccaaattttaaacctaaagttaaatataacacagacaaagtggacataatataaagcagaaaacattgcacctgacattctgaataattattagcaggcaggaagaaaaggaggaagggaaattcaggcaatacttaaaaaaaaaaatagaaaaatgcatttgaaatctatcataagaatttctctaataaaatgttgctggagctggatataaattcctacttttccatttaatatatttgtaagattggagaaattatttaaatgttttgagagttattttcctcatatgtttaaataaatataacaatactttaaaatattgtgaggattgggtatgattctgtgtatgaaaatgcttagcaaagaggctggatcctcaatagatgctcagtatttaattttcataagtatacctaagtcacttttgctttcttaatgttatttaagtctgaattctgtaagttgcatttcgaagtaaagcacaaaaccaccaccaataacctacccactcctttagctaatttgttttgctagtctgagactggaagcacttcactatccatctctagtatggctgataaggagttgatctaagtacacgaaagggaaatgtgttctaaattgtgtattgtattaaggcttataattttatcattttagtgttatttaattcataattttgatactttagaaccttgctattcagtgtgcttcatagacaaaaggcaatattattgccagccagctcatcagaaacccagacctactgaatcccaatttccattatagcaaaattcccaaatgacttatatgtatgcacattaaggtttaatggagccctgttttagctatacatagttcaatattactctttaaatacatatgatttaaattttaaataaattcttattacatgcattctgattctggctgatatagatgtaagttacatttgttgtaaaaagcgctaaatcaggagtagaagcacacttcctttatattggctgtgccatttaataatagtgaaaatttattaagttcctaaatttccaaaagtttttatttcaccatctgtaaagtgaaaggctagttaatactttcctggtactcagtgcaattgtttaaaggttcatgtgagatggaacataattaatgttcaaactctgtacacatgtgaagcattattataacctatgagtttatgagtgggcagtggacaggatttagaaagaacaactaatcacagatcagttacgaataagagctccttagggagaaagacaagatgacaaccacagaatatgattaataaccatatattttgttgcttcatagaagaaatacagggtggataagagaggaagtgtcctaaaggaaaggacaacctcccgaagtgctgggattacaggcgtgagccaccatgcctggccaattttgattttttaaaaactgatttgtgttgactttgcttggatggtccaatcggtttcttactgattagctcgcggtgaaagcatgaacagtaacaacataaaacaagacaaaaaatatatattttcctcagcacttgccttcaatttttcctaaggatgcttcttagtaactgaattaaggaaacattatatgccatggatttggcatggcagtgaggacgttgtgagggatgtcttcatggaaatctacaatgcaaactctggttctttccattacagataaaaagacttgtggacctcatgaattccagtgtaaaaacaacaactgtattcccgatcactggcggtgtgatagccaaaatgactgcagtgataattcagatgaagaaaactgtagtaagtaactcttgcctaataatgttttgagcttgacagcccattcaataagcaggatggcaatttttagttctgttaaggtataaatttgaacctgtcttatggctcacatttttatgcatatattcacatttggacaagaatattcagactacctgaatttcaaatggtagaattattgaaatgcttatcctaagagttattttgttacagttctcacaactggtatgaaagtatcatgaggtttaatgcaacccattagtatgcaatgaaggaaacccttgatgcaagttcacacaatgagctgaatgatgtggagtcactacaaaacatctcattctttaacaaatagtattcatttcatttcagtctcaaatccttttacactataaattcgcccatgagcatatttcagtgaaatatcacttattctctctacagtagtcaacaccttatatattcaggatgcatttctctgaaaatagaataacactattgttatcatctgtcttctccattttatataataaatttaaaaataataattctccccaaattttactttctgaagagtatggcagttatataaaattgtgacagtatctcctgattgtagcatttatttcagaatatatatatgtattttttgagagagggtctcaccctgttgctcaggctggagagcagtggcatgatcatgactcactgccgccttgatctcccaggatcaggtgatcctcccacctcaaccttccagctgggactacggaagcatgccaccacacctggctagttttctttattagttgtagagatgggatcttgccatgttgcgcaggctgatctctaacttttgggcccacgcaataaaccctggcctcccaaagtgtggggatgacaggcgtgagctgccacactcggcctgaatatatttcttattggcacttttatacactgtcatttaaacaaagaaagctatacaagcatgtttaaaataagataataatcaaattccatttattaaatatttatatctggtacttccaagaagacttgaagcagattagtaacgataatgactattcttgcagacatctcattggactaagagcattcatttccccagacgcagaagactaaatctacataggaatatgttatattaaagcatataattagtagagtgaaagccttaataaaccacttggatatttggcttgcaaaataccaactaatgttttggataactttcaaaacttaatcagacctgtctttgggaatgaagtatattaagcatgaaatctctggattattgtgattacagaataccctgaatatagaaacttttataactccctctttacatacatatcttctaacaggtcacagtctttagaaagataaagagcattgcagagagtcaatagagttttagatttctttaatcaccagtttttaaaaactgtatatggaagttctctgatccacttaatgattaaaataaaattctgacggggtggagctggtagggatagaagcataaatataaaaaatcccacaattatgcatatactttctgcttatttatgaaacagaacttaagtgcacaaatatctacttagcttttcttttgatatatttggtgttaatcatctatgaggtaactgagagcaaatgccttataacggaaggatgttgaaagcagaagaaggtggatgagaggccaactctgtagacatgtcttggagaacttttattcatggtgtggttgaatctatgtgagaagttagcctactgctataataggaaaagcaggagaagaaggaagggctcgcctgcttctgagtctgctgcggttttctaagcggctgaatatcattgtactgacatctaaaagtcagcctttggcacaagaaagcaaggagaaagaacattgactctcacttgtcactgtggaaactcagtgataaatcactgtagccacagtgcccttaagaaaaagcaggggaagtgcttgcaaaatcaagcattccagtataaaatacccaattatgtgtggttctcttttagtttctgttcactctgagcttgtcgactaagacaagtaatattgatgaagttgcagaggagagatgacagcgaacaagaatgaagtattttacaattgtaatatggaagactagtaggcatatatgggacaagtataagagtacgtttacattttacacatgtaagaggaatgtcagagtatgttagggcaaatatcaaagtatattaacatgttttgaacatgtaagaggatggatccagggatctagataattgaatagggcttgaagatactattttgaataggccagaagaaatgggaaggtttcaacattgacaatgccagtcgttctacacaggcagaaatttagtcaataaagaacgagaaaagaattcaattatatctttggggagcaccaaaatattagtcatatagaaacaagctttagaaaaaaaatactattgctgtactaaaatctatcaagatatttgcaattgttatctatgaaaataattgtaaacacacacacacacacacacacacacacacgcacatcactgtcctaatacattagggctgtggtatatgttgtcctattttctaaatattattgatcaatgttatgaactttgatttacatttggcagttattgttagctattattaagtagtgaaacatatcacagacatataaatcaacctatatcatcatgtgttgcttaacagtggggatacattttgagaaatttgtcgctaggcaattttgtcattgtgtgaacgacatcaagtgtacttacacaaacatagatggtacagactactacacacctaaactatatggttcagctaattgctcgtaggctaaaaacctatacagcatgttactgtactgaatactgtagggaattgtaacaccatggtatgtatttgcctatcaacatttaaaaagtacagtaaaaatattataatttatggcaccaccactgtatgttgttggaaatgttattatgtaacacataactgtagttgaaaaataacagcaacataatttaaagtcacttttggacttctttgtttatgaatctgatttcatgcatttactttttaaattgtgttggagatagtccagtgatagatatgggaagagttcaaatagtagtggggcaattaactgccaactacgttttaaatttaatatgctttctatatttttatatatacataggataattagttcattgtcattttattatcctctgcttatcatttccctcattaagtgttcagcagggacactttgcttcaacaattatttctgctcttcaaaacaagaaaatctcattgtcattggagttattttgtaatccggatcagaggtttggaaataattgagaaatctcaacatatctataatatctttatcaacaaaaaataaaatatgtcatatatgccatctaagttactgatttatgaaataaattactttatagccttacattattaagaagtaactaaaaatccaatggattttaaaataacaagtgattaaaaattaaggtttacatagagagacaagctgcttctgccttatttgaatttctagtactttcacactgaatttctatcagaagattatttgtatagagtataagttatactaattgtattctaaaaattcttgtcaaatgctaacatcgacattcatataacttttgaacttatcactaagagtttttaagatagtagagaaactgaagtccaaaagtctttctgctctgccattaactctatggttttgaaagccacttttatttcctgaacataattttctacagttttgtgtaagttgacttccaaagctcttttcagttctgtggttgtatgtttttacctccatcagtattgaaagaaatgatcagtctacatgatgcccctgtattttgttcttttctcctctttttttttttttttttttttttttgaaagggagcctcactttgttgcccaggctggagtgtagtggcgcaatcttgactcactgcaacctccgtctcttgggtgcaagtgattctcctgcctcagccccccaagtagctgggattacaggtgcgcacaacagtgcccagctaatttttgtattttttgtgcagggggttttcaccatgttggccagactggtctcgaactcctgacctcaggttatctgcccacctcaacctcccaaaatgttgggattacaggcatgagccaccacactcagccctttatattttattcttattgaagaatcccaattagccttctgaaacatggaaaacataccctgcaaaagcttcttggttgccaatctggcttgtctagatgaggtttatggaaaacctggttaattgttcccgtgtagagttccccatctactcttggtccagggatataggcaatatcagagaaaattagcatgaatatagcattttggaaatacgggggagaatgtcacattcaacttttttttcagatgggttagcttttactacagtcatgttgtttttgttattgttctctttcacaagaaaaatagtatcatgataaagtctgaaaattggtcttttattttatccaaataagatcaaagttaagataagcaataaggaaaaattccttagggctttccgtggtaactaaattacattttcctgaagagagagtttctttttgagctatctagtggcaaaagattctgaggtatatgaatgatggttagaaatagacttggtaccctattccttgatggtatttgtacatgtataaataattcatgattattattcagaagtagatttgctggcatttttaaaaacgtgatagaaacatgcagaatttccactttccctggaaaagcttttcccagcaaatctctcagcctctctactgccattttgaagcagaataattaataatgttaggacaaagtctctagaaaatgagcattctgtggaactcttgggcaaatgctttcaactactggcttgataactttttttaacctacatcaacaactttcaaccctttgtatagcaaagtgtgtcaaggcctgtgaagcctttgctgtgtagcacatcatgagcacacttacttttaaataggataaaggcaaattagaacattagaggaagaattagtcccattctacaactcccaattctatgaaattagatgtttcttctgctgtttttaaacatgtaagcacgacatgttttaaatttactctttctttattcttttcatgaaaaaattttgggctgttattttccattgttaaataaattgaacatatttcactataatttctttcctctaagaataaaactgcatgtgtctgcaaccaggagggcgaaatggcttcagtatggaatggtgataacagcaaatgagtttcttcttgttattattaataaaatagatattgctagccatgtgctttagataagtaacttggcttcccagggctttaatgttaatctctgtaatatgtggacacttattttttcctcaattgtatgggaagcaatgatacagcctactaggaaaaagtacaggccctggtatctggttgtcttgattcaagttcaattaatagctcttctgtacgctctgtgatttgaagtacgttacttatctctgtgcctcaatttacgcatcttaaacagggtacaagtatagcacgttccttagagagttgttacaaaaattcactggtgagttaattcaagtacttttcattaactttacctagtacctgacaacaaataagcaatcggtagatggtaattattattagttataataaatattagtattaattgttatttttaagattaaagcataatctatgtgaataccttatataaacaaaaagggaaatttctattgtcacatttactaaacaaaggagtgtaggaacatgagaagattatccacttaagggcattttcccattctatcaaatggcaccttgtcttataccgtgaaggtcttgttttaaactaaactaagtagcagagtagaacgaaatgcttgctgacacacattactttttctatagttcttcccatccaatgttctgaagggtttcttttctttttttcttttccgaagcacagtcttgctttgtcgcccaggctggaatgcagtggcatgatctcagctcactgcagcctctgtctcccagattcaagtaattatcccacctcagcctcccaagtagctgggattacaggcgcctgccaccaaggcaggctaatttttgtatttttagtagagacgggtttttgccatgttgaccaagctggacttgaactcctgacctcaactgatctgcccgcctcggcctcccaagtgctgagattacaggcgtgagccaccgtgccttgccctgaaagggtttctttatataggaatgtaggaaccctcatgataccaaaccatcaagatgttactctatatgtagaaaccaagggattgtgtagagcaaaatccagatgcagactgatttactcacaatctttgtgcagaaaatcaggcatcatatggatattccttaatgtctgttagttattgcttcttgacccagtaagaatattattatgtgtgatacagctgcaaacacaaggaatgaacagagaaaacacgaagaggtctttcatcatgtaagatatcagtcctgtttagagaataaaaacaaaacaagagatgatatccagcagtcatattgattacttgcatgaacgaatttctgaaatcctacttcattttccagatgaaacatattccaataggaattaagccaagtagtaagtcattactatgtggcttatgccctatgtggactatgggacaccataattaaatcaataactgctaaattatctaaattgacaggcaagtgatatagggcacaataaacaatggcataaacaaatgtgcagtttttaaagatgaatcttacaaactagctttgtgtaatattatccctatatactgttcttgttccaggaactccagattttctggggacaaaattgaataattagaatgtttttagaatacataatataaagtcaaatacaaaggctagactcactgcccagttaataataaacagtccaatgggtacagagagtcacaaaatgtcatacttacttaaagtaaatacataaaatgacatagaactccagcaactaaaaaagatcattgttacagtatgacaataggtacattttcaggcttatttttattaaacagtagaccatttatcttttgtcctacgttccaacttgtttttgtaatgccattttgtacttatgactttaaaaataaattggaaaaattattatattatgtaccatagatgcttcatgagatttttcctaaacaatatattggttctgtctgactaacctctttttttttctttaatgctacctcatgtcatatgtcatataaattttacaatgcacttacatataatagaataaccctgtgctgtttttttatccccagagccacagacatgtacattgaaagatttcctctgtgccaatggggactgtgtttcttcaaggttttggtgtgatggagattttgactgtgcagatggctctgatgaggtaggcatctttgtaaaatcaaaaagaaagcagcgctttagaaccacatttgtaattattattattcagtccaataagtgcggcaaggacagctcagaaatactttgctcctgacacattgagataagtattatatccatgtgctgtgcttcacatccccagcacagggaatagctcttgtgctgctattgacagttaattttatagtctgttttacctcaactggtgaatagctgcgttgtaggaataggatgtttggaaaccctattccctatagctgatgcccctgccatctgtgaattagttcataaatttgctgcagtatttatagtcaggactaatatttttatgcattttaaacagtttcttctccccagtctctttcttcaatagatatagtcttacagacatcgatgtgggtcatcaatttttatgaaaccacaggttgagctttgcttcggtgatgaatcacaatccatttataataaggcctatgtacacacagctttaagtgaaaaagtttacaaatcctctggataattctataaacttagtttgtgctaacatttataatacttcatacaatttgttatttatgcatttatgtccttatgtttcagatattaattactccatgatgctttaaaaataataaacaacacatgattatatatatttttctcaatcaaatctaaaaggaccccaagctctcatatcccagtatcagtgatttcacatggataatatcagaaacacaaggtttgcgcaatcaagtccagtcagaagtgaaggaaaaaagagctctagccgggcatggtggcttacgcctgtaatcctagcactttgggaggccgaggcgggtggatcacgaggtcaggaggacaagaccatcctggccaacatggtgaaaccctgtctcttctaaaatacaaaataattagccaggcatgatggtgcacgcctatagtcccagctacttgggaggctgagggaggggaatcgcttgaacctgggagccagaaattgcagtgagctgagatcgtgccactgcactccagcatggcgacagagcgagactccacctcaacaacaacaaaaaaagatcctgttcctcagtgtataccatggctcctgtattgcaatgattccctaaagctccgctgctctggttgagaagcatatgtactcacctctcatgaatgcccgcccgctgaccatagacttggccagaggattttcgctgcagctctggaggtttctgtgtttgttcccaattccctaggcatccactgatttcatgcctctgtgggagatactacaggtctctggtatttacagaattcatgcaaactaggtctcttccagccctgaggcattccctgtaggactggacaattctcccttctctgaccattttgaaaaagtcacaataaccacattcaacagcctggattttgaaaacaaacacatgtaatttctcgcctgagggctagcaaaacctaagtctcaaggatgcaaaggtcgctcaagagaaaaagttgaaaaatacactgcttctagtcatggagctcttcacaaaataaaagtcaaaacatttttttttttaaacacaaaggagagttacattttttacactcatttaccagccacatatttacctagcattcataaatttgaaaattacattaaacttttctaaggcagaaaaacacattttaattaaactcatccatgaaaatatcttggctttggttttgtttatttaatacgttgaaccaatctgggtaatatgtaaaacatcaagaggtggggatgtattggttaaggcttatatatttatcttgaatcatattcacaagatatgcaaagtgcatatgcgaaatcaaatactactacttctttaaaatcttattcatgtgaaagtagatatccttattaccatgtatctcatcccataagttggtggacatagtgatttgatggctaaatatatctccatatatccagacattttcatgataaggctcagaagaaatgaaattaattgtagtaaagtcatttttctctacatttatagatgtttagtgcagtctatatgtaagtagctaacactattggtagttgatttctacttttttttttacagtctagaacaaaaaaaaactgaacaagtggctagaaagcagaattacacacagaatactctcacattaagaataaaaattgggagaattgtgaagataagtttctgtatgaatggaactgataatatgattagcttgttaataacaaaacaacaaagaagaagtttaaaaatatggttcaatctaattgtatagcaagtatttatctctgtggcacacacagaaaatgattacttaaagtgattttaaattataatatttttgctctacatttagcgtaatatgttgtaagaacaaaaaaacaaagaaatcttaaactgcatccatagacattgttaataataatattggctctgctaatttgaaacatgtagggtggttcaaatgcttatttatgtcaatgtcattagaatcaaaatttcagagaaaggagatataaatgtagaaacaaaaagttaagtaaaatcctctcttattaaatccaaaagtatcagtataagatcttgattaatctttctctttctaaaaatatatgatttctacatctgccagtgaaaagtcctagaaccaattataaaccaatggtaatgactgtcctgaaattcaccaagtggtctctaaataccattttccaattaaaggaaacactcctttgagagatgcctaattttaagtgtgagaaaataaattgacaagatgagctgctaacatctgagattattaagagagtgtacaaagtgcacaacaacaaacttacttaaaggaacttccactgacaaaagggacaatttgtgcattagaaagaaaaacgactgtaagggattaaaacacacacacacacacacacacacacacacacacatacacacagtataaaaatcaatgagttcacaacaatactttaaaaagcaaaagctcattaatcactttggaggttgcaaaggtatcaacattcttagggtgcaattagtcaaattcagaatgtgagctattctatagtataactgacttgttttcttcaagtagtaaatggcatttaaaaaaactgaagaacgagaaatagttatacattaaagaaactttaattcaaggtatagatctcttttgagtccttactttaccaaacaatattttatatggctaaatgacacaacagtaccattggtcattgagctgctttacttaaatgagcccacttgcagagataatcattcatcgctcctaaaaatgtttactggatagttattataatcatgtgacagtattagatacttggttcacagacaggcatgatctttatcccagtagagctgggataaagttatatgagatgttaatttacatttgttttctatatttgctagtttattaatttattaattcactcagcagtttgtactgaatgtttactatgtccccggcactaatagtatggagaatacagcggtgaataaaacatatgacatctctttcttatgacattctctaatgtctttcacatcatttgctattatgtagcttcctccagatatcccacatttccgattatccttacacataaaaagccttttcttaagtagttccatttctacttaaactgttatcacaaagagaaaatttcaggaatttagaaagtgaactctttttccttatatggggatgaacctgggaagaagcagcaagtagtagttcaacgtgctttacttgctaggagttccacaaaccatgagattgttacactttttgtggaagaagcagacaagtacattttggcaaaaatagaaattccctaacaacagaaaacatcatcccagtgagacacttcattagagtattccacttcaaccagagtgttcagacccagggaaggtgatttctagtgactccatttcatttatctcctatacagatcctcaaaggtaaatttgccatcttgtttgacttccacataaaatctgtatatggactagcagaaatgaaaattttgacagttcatttcacagctctttagggaacaatgtcagaaaagaggagaaggagaactgcaacaactaaactgtaaaaggattggtgcaaaggaaaagagatggagagaggagaaagaaagaacaccaggggaagctttgcccatgcaaaacagatttgtcttaggatttttgtttgtttcacattccatatccttagccttcttctccctatagccaataaactggatgtagttgcttagaaataatttttgaaaaaaattgtttagagacaggatgtcactatgttgcctagactcgagtgcagtggtattcatgtgtgcccatcatcgcgcactacatcctcaaagtcctggactcaagcagtcctcctgcctcagcctcttgagtggctggggctattgcgccaggtagaaataattctttaactcttttattatctcataatcttcattattacctaaaattattaaaattccattaccctataactatctactgaataatgatactctcagagtaacttaattagtatgatgaagccataaaatttttttttatccgttttttgttttattatgactcacagggacaaatgaaagtagaaaattgttataattctgttgtatattcatgggcttaaaatattagcatctgagccacttttatatagcagacatggttcttacacttctgggtttctatgcataagttgtctagtctttcggtttgtaaacatttttctaaaaacgcaattttaattacatctatgttgtttttgacagagaagttgtgaaacaagttgttccaggatcagttccaggttttctgtacataagttttcttgtcttttgagtgtgtagaagtgtttctaaaattttaattttgattatatctctgttgtttttcatagagaaattgtgagacaagttgttccaaagatcagttccggtgttccaatggtcagtgtataccagcaaaatggaaatgtgatggccatgaagactgcaaatatggggaagatgagaaaagctgtgagccaggtaaaaggattgaagtaatatatcatttagttaacattttaccttgatagaatttaaatttaagcagcaatatgcagaaaacagtggcaaatatgtcatatgtttaccatttttaagaaagggtctgcaaatctgtggataaattaattagtgtgtgcttcatatgttttgaaagtgttttggaaaataagatcattacttatgaatggaatccaagcataatttccccaaatttgattttctggtttctatatcttattataccatttggaactgtttccccaagataggaaagtaaaatctgttgaaattaaaagtacagtaaaagataggttttagttatggaaatggtgattatgaaatagaatgtaatcatttcaatgtgatgctagctaagaagcagcataattgtgttgtttgtatttacatcttgggccaaaatttgagtaaagttagaaagcaaagccagaaaaaagatacactactcaatttatgtgctaggtgtctctacaaatatactcattaaaacacttcattttttaattatatattttaattacattatcttacagaaaaatattactggtggaaaactgtactataatgtatgtatgaccataaaaccattaccttgagagactaggtcagaatcacaagtacaaggctcacacattactatgccccagtaccatgtccatgggctatattgttaattgatcacagatttccttcttactgaatacagacatgttattagactccttatgaatacagatccctagacaaacactgccaattaaaaggagttgaactcaaggaaaaagctttttagtatccctgagctaaggaattcagactacaaagtcattaagtaagtatgagagactacacagtggtctaacataaggccagaagcccagacatttgaatgcaagcctagccaactcaagctcatagaaaaaggcagctatcataatttctgtcaattaattagactgggtagtatttacatcttgtgactgatacacttataaatattataaacttgcaaatattacacttgtaaataacatttagctgcttgttattcttaatttcggcatcataaaggaatactgcacattctgttaactctgttaattacacatgtattcatatttaaaatcccaaaacaatacaattcttagaacttattcaaatactttatttatgtcaatgcaaccaaatagatattattgggtctgtgagaccatgccaagattttgactttgtgctttatacagtgaatgtaagaattaacatactcaaaggttgctaaatattattacagttttgaaagtatttggagacttcaataatttaaaatgatttaatttaaaattgtaaaaaaaaaaactcatgtaacacttcaaaatcaaagggatgaaggatatcaaggtttgtttgtttttttttccttctatggactattgagttaaattcttactgcacaggttattgcatcatgaagtatatttaatataatgcaataatattataactaattctaaaattatttaaataatttaaatgaatctgtaataccagtcattaaatgtcgttatatagtataaactatttttattaccatctataaattcatatatttatgtgtttatgtttttatttctaaaacctgttatttttactctatctcaatttcaaatttataattgtattcagcttctcctacttgctcatcacgtgaatatatatgtgccagtgatggatgtatttcagcatctttgaaatgtaatggagaatatgattgtgctgatggttcagatgaggtaaaatatattgtttaattaaaatatttgaattacatgaattaggtttgggcaaacaaatgtaatgaaaataaagagaaagaatcttgattcttagcatggtttaacatgttagatatgtacattgaatgcaatcatttcagcaaatacctgaattttcatgctgtccatatactaaagctcattctcatttgtagaagttatattcattaagacaaaatgaaagaaagcccatggtataataaagctctagtattacaagctgcatgtttattttgcccatgattgtatcattatcattaatgaaaactgcagtgtccatttgtatttgaacagatggactgtgtgactgaatgtaaggaagatcagtttcggtgcaaaaataaagcccactgtattccaattagatggctgtgtgatggaattcatgactgtgtggatggcagtgatgaagagaactgtgaaagaggtaaggtatttttgtgtgtgtgtgcctgtaaatgagagaatgaaagttaaggttctgtgcagaatatacagtgtatgctagaggcagaggatagaatctttaaataattctctttactcttccaagtttcattacatagcagcctggtctaaatatgcaaaatccagatcattgtcagacagagtataatcccaatctgggcatgacaaacacgaacacagggcaagtgtttactgagtgtctaccatttcagactagatgccgggtcaagtatagggatatgtggagaatacagagaaagtagccaatgaaaccatgactacaaaagtatatcttgaattttctgtatatcctttcctttcacattgcttgccttactctgaaagcataggaacaacatatggcatactcaattgcttacattcatatgctgtatgatatataggttataggttgtgccccaaatccctaaatttccttattgccgtatcactgagaaaataacctacatttttttgtcagtctaaaagacaactttcctttttgtcatatattatttcctagctgtgcgaagattattttctgacagataacaacattttagttttaaaccaccatattaaacgtagcaattgttacttctttagagttatttcgcaaagcaattgtgtgctgaagcttaaaatgatcacaaattaatccatgtttgctagtttcattttgttagatatattttttaaatacaagatatcttgtgacctacttacaaagtctctcaatagattttacacttcttggtatttggaagatcatccatagagatggtgctagatattgccacatgatttaaggcacttgaatgtgcactctaggtttatgtattttaaacctgtctaaaatgttacttttgtaaatatgtagtcacctaagaaaaacagtattttactttctttaatattatttcagatgtttatgattagataatatctccatcccaaacctgataaagtgctgtattatgcagaaaaaaatagttttttttttttacagctccttgcagagcagggttaactcatagacagtgcacccaaagtaggccttcagtttccttttgaatttgccatttataatagagacccatgaaatgttaaatgtctataacggctctttctaccttaggctaagttctcacactcactttctgtaattggtcactctagagacagcaaacattgtggaaagtctggcagcaataactcatgcgacttttgcgttcaaaggtttggggatgacaattaagctactccttgttttccatattctagcgaatcacctctattgctcagcttcaatcactaccacccgcctagttcattctcccattgcttcttgcttgggctggcatgatgccacctaactggtctccaatacatcctatttactgttacaaggttcatcttatgtaagtgtccttccgattatgtcagtttttactcaaggtacctgattacatacaaacaattcaatctagtaatcagttatgagaaaatgaccccattttatcctcccagacttactttccactgcacctctttatgatttgtatcctagccaaactagaaaatctcaagtacctttcagatctaaaattattctactaaatatttaatcttaatgactgaaaaagagttgagagcctttaattcaatcatttccaaatgtttcaaagcccctttcccctccattcacacctctaacttggttttctttgctgctgggtaattaagctccaatgacatattttagtggttacattatttgatcccatatgaatgtaccttaaggcattaccactttagatttctagtatttaatttactcccaggaagtggcgtaggtattgggtaaaggcattttaaggcattgaggaaatgggatgccagaataaatatcttttctattaaatctcatttctattcatttccaatcaggatacatgagcttataggagctgagtgttgggaactggaatataagagagctgaaggataagcgtgacacagtttcccaattaatcagttttactggtttactttaaaagacaaaaattcaaaatactctggaattaaaagcagcatttgcatttttgaaggtaaaatatatgacctcaaggaagtgtggtgcttgttttggcctgagctttcaaactttacactttatataatactggtggaaaagattggggggttctcttttgagtaattatcagctcaacaatgtgttagtcaaataaattataaagtattatcatgcattaaagcttctctcaacccaattaagatgagaactctagatgcttattttctgtgatgatgcacttgaccagatttatatgaactttccaaggtctctgttataatttagatgtattattgttaattcatatatacttttctattttcctaatattttctgttgagctgattaagaacatgaccaggaaactggaattttaattcagccaatctctttaaattataccttttttgttgtttatatgtgctttatgccatttcaaaataaggaattttaagtgagtctcaagatgtcacagtagccccatgatgcatttttttagtgcaaattttttggagtacaacatcaagtctttagtaggttatcacaaaacctttgcctttctcttacaatatgatttcatttatagttctcttcttttaaataaatcagtggcatatccaacactcatgtggagaaaattataatgttatctaatgcaataccttagggaactcattttttaacaagactgatgtatatgatacaaatagagttttctaaaataatcagagaatgtcaaacgttcacaaattttgtttgaatgtaatccattgtaaaatggagcatgcgatgagatttagtcattagaatctttatgctgaaactctgcttcatattctaggcatttgattttgagttaaggcaatatactcacttcatactgatactcatctctttaatttctttagtactaaggactgcatactgcatatgctatcttttttattgttttcagagtgagacagttgttaaatagtactgaattttattgcacaggatttcataattgagattaattgtaaatacagcagtatggagctcagcattgcagaagtttgagagaaaggagtatcccaatgacagatgttcaattgtcggagtctcacatggtgatattcactttggtggattcacccagctcttgcctttgtctgtttcttagtttggtggttctcagagatggcaatgtaagctgtaccagttctgctaagcatttttgcagacaattgtactattattcagatcaatatcactacaaattcttggtctaagctttaacttttacttaagatactaagcagtttgcccttgttttcctaatcatgtttctgccattaatcataccaggtttttaaaaaggcaactctctcaaatctgttaccaagctgcctctcttaattaataacttcaccttcttctttaaagaaataataacaatcatgagcatttttcaacatctggccaccaaactagcaaatctgcctgtagctgtcctcaggctttcctccttccttcctcccaaaacagaagatttgtttcacttccagtctaagcctattccattcattttgctccgatctcaaatctctcacactccctggatcctccagaaactcattacattaattactcttttgctctcctgtaccctcaaatgtgtcttatctactgaattattatcagaagcatttaaatgtgttcagggatctgttcttcctcacacaagcaacaaggctcactttctggtctctttcttccctttatggccaaacttctggaaagatacgttggcattcacctccttcttcttctcattcaatagccaatgacaatcatttcattaaaccaaccaccatttcactaaacctgcttagcattagttacatgtgctatccctctcattagaacacttttcccatgtattgtctggcatcactctttccagatatttctgtaaccattttgattactttttctcagtctcttttgtagactcgtctttacctacccaatctgtttttctctgtgttctcttttaaacttcaaatcataactatattctgatcactgccagatgcacatttacagctcaaaaacctatcctatatttcagacatatttatccaccagcttgctcgacatcaccacatggaccggtacctcaaatgaattatgtcttaagcctgctcctcctgcagtgttcctttatttaatgaacaataccatctaccaaatggtccacacacactaaaaaatgagtacgatgtttatgtgctcactctcctttgccactctcatctatttagccatcaggtcctgaggagttttccttctgaagagctctcagctgtggcttctctagatcaggttaccatcagttcttctctggattgccatgacctctcttgaaatatgtctttttcctccagtgttgtctttactgtctctctcttcatttctgaattctccacaccagagctagagttttctttctacaatccaactgattctatcacttcttaaattaaaacttttgctactggatgtgaattatcagagatttgtgtaacaagtcagaactcacagcaagaagagttatttgatcttcacaagttcgggcacattattccttccaaagtacatctgcaaaaggaacaatggctctttctaggcattttctaggcttttaaggatgaccactgtcactgctctgcctcatattttggtaaatgtatgtgtgtttaaatatgttaataccttcagtaagtcaaatctagacaacccatgaattgtatctcttacgtatacatgaggattaactaggtagtgtaaccctttgggagcaatctaatttatcttaattctatactgtgatatctatgttgtttccccaggtacttcttgcacctgtgacgctatacatcactttaactgtacctcttttataacatataaaaacattgagtcccagagatattaatagagttatccaaagcaagactgggacccacagttcctaactctcaagtcattatagcctccactgtatattgctacatctctagacatataacccaaatttattcattacttaggtcctttgcgtgtggcagatgtacttaagaattttatatgagaatatttttgtattcctgatgtttttatttatttgttaaaagagaaaaatgcaaacattttaacaatccaaaaaataatgctttactgcacaacttttatttaaaaagaaccctgaaatatggtatgatatggccaaattcttactgctattaaaaaatcgtttctttgtgtttgcaaaaaaatttttactggctattctaagtttttagtgatctagtttatcagtatttcagatacagctaaattgtctaataattctaaaaatgtcttttccccaagaaagacacaaattttaaataattacaattaaaactaaaaaatataaatttctgtgtattcagtaacataaaaattatgtgaagcagagtataacttagattcttaaaaactttcttctaacatcagtattttctaaaaaatagacatatatgagagtaatattagaatgttttgaaatgtcaacaatgaatacatgttattaaaaaaaattgaatattacttgttcctggtattatgcttgaaataaatataatacatatatggaagcagtcaactagatactgtttgctaagattcagaagaatatggatcctgctgactggcactgattactctgaatctctttgtttctttttgttttaaaataaaggaggaaatatatgtagagctgatgagttcctttgcaataattctctctgcaaactacatttctgggtgtgtgatggagaggacgactgtggagacaactctgatgaagcccctgatatgtgtggtatggcatttcacgtggctctagattatacttttatcttctgatctcaggcaccagcatgaatcaatgaagtggggaggtgaactaccaattataccatcctggggttaggtagataaagtataaccacagatacagcttttgttcaggtaataaagggataatccggttccgaagttatgactttatagagactcatcctaaatctgaacttgcacatgtcaacactattcagaagagagattatggtctctttgggtgggtttagagtaattgacattttaattgaataagattcatataataattttggcttcacatcaaattggagtttaggttaattttggagggatacagataagcaaattaaaaatatataaataataaaatctcatagtttcacaagccacccactaatgaaatatctctgtatctatcaatcatctatctgtatatctatctatccacatatctgtctatatcattacaagtcctaaacacagaactgaaattaggagttatttaacatttaaacttaaaaagtcttaacaaaagttattgtttctccaaattcaagtttctccaaattgactgacatttgtccggtgtatgcttatgagaccaacaaatataaaagtctaattttagatcagcaacataaaggatctattttaatgaacatttttggtccctgttatcatactttttatctaatctctgcaagaaatgcagtttcgcctatactttaaaggaaaatgctgccacatcagatataactcagtggcacaccaggtaaataaagaaaatacagcatgagtgtacgtacttacactttttgttctgtttgttgcatcaagttaaggcaatatttagatatagatggtgacatttcactactgaaatacaaaagtgcagggaaaaatacaaaaatgcaggcagctttattttgttaagtacttaaaagttgaaaaaaaacaggttttggagagtttttttctatagatacaactcattatgatgagtaatgcaactaagtttcagcttcagttttctttacataatcttagaaataaactctgggtaatcaccagggattagattgtttctgaatcataaaatatttaacaatatgagagcttatctaccaacatcaatccagaagctattatttttatcaattatgtgattttttttctattctctattccacttgaccacaaaaccagtgagtggaataggaaattttcaataattgatgtacagctgcagagtcatattctcctagagctgcttccagggccatgaactgattctcaggagcattccacacagcacagatgggaaaccttgtaaaatccagattgactgtctgaacatttttgcgtttctctcagtgagcaatatcaacattgagtcaagctattatgtgccagaaattgtgctaattaggacaacaaaagggttctttttgacaaggagatcttattctggctggacaaataaaaataattttcatacactctatttccagcaatgatagaattaattaaaagtatggaaaaggcacagagagattcaatgaactctacctaaagaacaattcagaaagctacagtgttgaaggagctagactaaaagacatcttaagcaaagtgaatagcatgagaaaaggtgtcattcattcattcattcattcaatagacatttgttcagcaagagaccatgattattttggtgatataatgatgaaagaagtgaacacgaaccctcacctcacagagcttagaatctagtggaagatggatattaatgtgcacaaaaatatatacttacaaactgtgatacatactataaagtatagtaatttgtaaaagtatggaacagaaagactttatcaatcatagagtatgagaaataacattttagttcaggcctgggaaatatttagctgctgaatagatgaaaaggcttgaggttgggagtgaaagtgtgatacaaaattgcggacaaaggaaataagatttgtgaaagctctgggcagagcaaaccatggcttactcaaggaactgaaggatccatgttcccagagggcacagagccaggtagctacaggcactcctggatttaccagattgtagccagataaacctattgtaaacaggaaataatgtaaattgacagtgtgtgtttgacttaaaaatattttcaacatataaaggatatatcaggacataatcccatagtaagtagaggagaacatgtattgctttcacactgtcataaagtcagaaaaccttaaattgaactattgttaaattggagatcatctgtatttgcttaggatgaaactagagacagcagagatacctgcaaccttggggattctaaattttagctggaaagtaattggaaatactaaggagttttaagcagaggaggtccatggtcatatttaaagtttacaaatatgggatagaaaggattaatagtggttaacaccatggcggcactttaggcaagctatgttagtagcttgggttgagatgacaacagcctgtgctagcacaatatagacagatttgaagatgatataaaaggcagaataaattggattaaatgacggattggatatggtgaatgagagacagcaagttgtggggtataatgtgtatgttgtttttgctttcccatttgaatggaaagggtcacaggaaagggaacagttttgcaagtaaagattagaagactggactgtgatgcatttgaggagacattcgagtagagatttcaagtaggcattagatgcttgaatctcacattgaaaggaaagaggtagtctacagatataaattcaacaaccagcataaaatgtggtattaaatacaatggaatattcaagattacgctgtgtggaaataaagataggtcaggaaggggattatcaaagaatattgagtgacaacaagcccctaagtgaagatgagctggcagaagagactcaggtaagtgaccacagaaggcactgcaaaaaagaagagtgaggcaccagagacaccaaagtaataacatgtttcagcaaagatgtgatggtttctgcagaggcatgggaaaatgagttccagaaaaatgattacttttacataggaaacaactattcttctgtctctgctcttaaaatatagaaatgagttgacagactacatgtagatacaggtagatctgtaattatttaataatatcttaagaaatttcccatctttgtatttctacttatttttgttatatatatatatatatatatatatatatatatatatatgctttccaagtagcattgataaatattcatacttggtggtatcagttggccttgtagtatgatcatctgcaacatttctggcttcccagatgcagatattgggagagcaggtggtttcgctcacctaaatttagggttattttggataactgagatgaaaaagagaaaagggccagagaatccaggttattgggaagaaagtgggtttctaaacttacctagtacttagagcagtatccaacatattataggttactataaatattaatggggagaaaagtacagacaaaatcattggtgaatagggaaaaggtagttacatcgatgagctagaattaagataaagctgaagagttgttgcaatgatagtgattggattaaaaatcattaaagagattgtgctcaaaataggacattctagtagtggttttacaaatgaagtaaattataggaaacagcaaatttatgctgcaactgtttctataagttagcattcttaacagcaagcaacagaaactgccactgtgaatcaaaaatagaaatttgttgaaattcaccaatgtaaacaacgtcctaggagagtggtggcttacgtaagattagagtaaaaggacatagggtataagaaacttaaggagctaagaagcctcactggttggtttcctcatgtgaatattgaagtcatctgagttgctggaatgaatttaaatggagatcttaaaagactatgctggaatgtgctagtcttcagtaaactggggcggaggtggtgattttgaagttaattagaaaatagcagcagcgtgaagatataatcaaatatctagccttcaaaataacattattttgttttagtttattttagaaaatagaaagtaaagataggataaagctatggaagctgtagtaggaaatgaggatgttttcaaacgtgaggtgacataaggtttgagcaaattaagagacattcctaaaagacctaaagaggagggagtatatttggaaaatggaccaaatttcacttaaagcaaggaggtcagggatggagtgtaacatatttaagaagctgtaataaagcaatattgctcaaatattgagagggacaagggatgagtctgcaggattggcacgagcaagatagtgacaagtctattaggccattcaaaatatcttaaattgtattctcaaggaaattgataaatgtagaataaatggttacatgaatatgttaaactgatttttctcatggctttttgaggatctgaggatggaatatgaagctggagacatttaggatatctctctgtaaaagatcataaacagctaaactattttgattgtaactggtgagatggctagaagatgccaaacctggggacaatagcaacaggacttggtgactactgagaattgatggtcaatgagaggaatacattagaataattccagacttttggctatgatatgccactaactgaatgatggaaataaaacgtgtttgagaacaaggggtaagacgagatgataaagagctgagtgatgagcttgttaaatttgaaactattgaggggatgtcctacaaccaactgagatgtttgaactagatagagaattgaaagtcttcaggatgtagtaaatcaatgagagtgaataaacataactaagcaaataattcaagagtgagaacatcaggggaacaaggacagaatcctgggtaacttcacatctaaggatgaagactaatgacagatacttcctgctttaagagtggaagtcttcagattagatagtgataaggagacaaatgtaaaattccctggctttcattgtggtctttttaaatacacacaaaaacatgtactttaaagatgaataactaagatcatatatgtgcctcaaatacatatctaaacttttgtttacagagacaaagagtaagaaatcaagttagaatattgttgggatttttgtttgttttcactgaatgacctattttcaattttgggcctgtaacatatgcttgctccggctctatgctgtgtgaaattgctctttgagatagctaagtgtcctgccatattgcataattgtaggcataaattaatttgttacactaagtgaagtcagctaagataaggcatctgggaatgagaccatacagtttggctctttcgtatttcctttaagatcctcagctgtgcacatttttctgtagttaataactagaatcatcacatatttttctggtagccactagtaggcaattgtcacaacaaaaaagatatttagaaaagctagcttatggatttgaaaagaataaaagaaaaaggaagaatgttcttcataaagcaatgtactcgaaggagcttctttgttttttcttctttttcttcagtcaaatttctttgtccatccacgagacctcacagatgcagaaataacagaatatgcctacagtcggagcaaatgtgcaatgggattgatgaatgcggtgacaattcagatgaagatcactgtggtggtaaatgcatttaatgtgaaataattcagtgatggctatgaggttctctgatgacttggagtacaaacattttaaaaaatacatttcttatgtggacatctgagggcattattttcagacatttgatcttctgacaaggtataaaaatattccaccagcatttcatttgccttataggtgtgcacctttatccatagttcccactaaccctttattctagaaaatattcatcccggagaaacaatatagagatttttaaatgctccttgtttaaagacttaattttttgaagaaagggagcttatatagattgtatgtctatgcaattcttttttctgaattccgaagttcaaaaagtttttaatgcaaaagacttatgtatgcagcaaaatcatctggagacaaagcttgacctgacctaattggagccatttaatatcaccctctaaaaaaattacacttagggtaaatattttaaaatttttctgtagatatcagtgttatttacttaaagtaaacacacagttacttttctaaaatccaaaaatttcagaatgtttaaaaatttggccttgagagcttcagataaaggattgtaaacccatgtttttcatagtagttagtaaaattttggagctattacatgctcaataagagtgttttgattctgtgaagcactaatcattttttgtatgactctataggtaagctgacatataaagcaaggccttgtaaaaaggatgagtttgcttgtagtaataaaaaatgcatccctatggatctccagtgtgatcgacttgatgactgcggagatggttcagatgagcaaggatgcagaataggtgagcttgttttctgttaagcaaagcaccgggatacacaagtctaacttctgcttgtacatgactaaaatgttctggatggaaatattgctcttcaaagtatgcttgactgatgccctttttcaaaaacctttgccaaagcaacattagaatattacttaatttcagaaagtatgaagtggacaaggttggctttgtaatgagtacccttgttaaagcagaagctgagaaatcaatattcaaatatcgaagttgatgtcagcaatgtaatctatatcatttagtaatttatcttatacaaatttagtgttaagttttataaacggtgatatttagttgaatgatagtaaaggtcttaattttttcaatgttaaaaaaaatttaatccattgctgagtcattcttacagaagatgtgatttttttttttagttacagtgccatgatacttgagttattacctgctgattgcgaatagtttgtgtctaatgcttggtatttgattttttatattaaagaaaaataattaaatgtatgatcctaaattcagtttgcttacaaaagtcacacaatatttcctacttttacatcttttttttttaatttatgcatctaaaactttcctcatttagggatgaagcaatacccaccaggatatggctgcatgtgtctaaaccatggtatcattccactgacctattttaactaattgcaaaatattcaagtcagtggggttacaacgataataattaaagttctcacatttctcaaaaatttgatttaagtaacttagagatgatatgatgtctctataataatgtccctctcatttatttaaaagagaaggccttctaaaatgttttcctgaatgggagataaagtaataaaattgcaactgctatcctggaaattacaagtaactttttgtctgtcctaaaatgttgcagcttatgaccaaccattatgagcacattacacactcaaatgttactcttcatatgtatgtccagcataaaaaaatgaaatttaaactgctgatttagacaacttgcttgagtaacttagcagtacccttgattgagtttacaaatattaagcttaggttagcaataaatgcctaaatttctaggtagcttataggaaatgctttggctctcagagaaggatgtagtactcatatatcgtactataataaagatagcctgtcattagaatcattgactcctgacttatttttaaaaagtgttacagcttaacagcagctctaaatatcaactgttagcagcttggtctaatctgtatttaatgttaatgagtttagtttttatacttctatacatttataagacatgggggcttatatggagagaagaccgtaaccttgtacattcaaaaagagttatctgtggaataataaataccatttcaaacattttttaaaagttaactccccacttcaggaattagaattatattagttttgatcatatttttaaatcccagctcctactgaatatacctgtgaagataatgtgaatccatgtggagatgatgcatattgtaatcaaataaaaacatctgttttctgtcgctgtaagcctggatttcagagaaacatgaaaaacagacaatgtgaaggtagagtacttttcttcaacagtttgctcataaatctttgggttatgaagattcccaagacttctaaattgtgagatcacaggggattgactttcatcaaaatggtgtgtatctacgggataccatttcacttatgagaatgaaagtctctggggtcaagagcttgtttgtggagctaagctaaccacgacagaggctacaaagctttttctatagcaaattcagagctgcaggaatttcaattctattgctacaatactgttttgaaatgcaaataacgaaattcctggttcaggaactattggagaattagtcttgcttcatgaaaaaatatgtttatgatgacccatttctcttgagtgtggaatttgcaatactggaataggtaaatcacatttagagagtcatgggcttttgtcctaaaaccatgttttaaatagatcataatgtatctttaaaaattcaaagtcaggatctacataaatctgtcaacttacttgagatcatttaaaaattgagcatgtaggatagccaaaatcttatagtaagtaagtaaatataattacatcagtgttctaactatagaaccatgaaatacagacccatatgcactttctgcaagtttctccaataaaactgctatttgtattcatattcatattaatgtaagtacagccaaacctaaaataactaagtctggcttatccaggctaaattcaagtctttaagtgcttttacctaccagcttgcttttgttatgtctctttgtgatattttgaggttaagaaaaatgattctacttcgtgttaatcaaaatggaattatttaaatgaattgattctactcacccaaaaggggaaaaagtgtagtcacgtcatgtttatctacattttgagttaaatgtgtatttggattattcgtgacatttgattgttccattactatgagactgaaagatgacaacctaggttttctgtgttttagttaaaaaatgaattatctttcaaactatggtatttatttttcccaggctctttctatcaattacatataaacacacacacacacaattctttcaatattttaatttcaataacatttattttctaatatttgtcagtgggttttttctgtatatatgtactaaatttagaaattatattattaaagttttcttaatttttaattacattccacagcaaatataacctgcacactacattctttattttaaattgctatgaatccacttttttgtattattttgtaggacagacgagtaacttctgaactctaataaaatgttcatctatttttaataaataaagttttgattttaaggaaaatagttctatttcagtgtcaaagaagggtaagacataattggattctataatccaaaaatttaaatttgtttgtgcccttcacttatgtatctgaaaaaatgcataagaaattgctatttgatgttaaagcccaaacacttcaattagaatatctaaagggaaaaaagtaaagaggaatggtggaagaaaattagaaggggattaacagttgctgagtgccaggtactgttttgggtactaggcatgtgtggaattcctccatccccttcaaaagctcatgatccaggctttctagagatgaggcgaaaatgatggttcaggccagtataatgacaagtgaggaagttgaggttgtatgaaatcatgcagaatactgcttatttggattctgtaccaaagggaaaccatagtgacaaataactgccggttcaaagttacaggggctgaacaaatcagaaatatttgttgtaatcgtgatggttaagtactgacaagatgcattctacttcattcctgtaaaatatttattaaaaacaacgaaatacacttttctgcatctctttactctacatttcaatcaaatagcaatgtgtggtcatgaaaatgcttatgtgttcttaggcaaagtatcacagtaaagtcaacaaaatcagaaaacctgagtttaagccttgacgttgtgatttacaagtgtctctacctctgagcccttagaacattgtttgtgtgctacgcaaaagatagttattcttactgtgctgattcttaagttctctaattcaagggaaggatttatctcacagatttattaggtaattaggagattataagtgataaaatgaggcaggggaaatatgctggctaaacacaaaagtagaggaggaaaagagaggaaaattagataattccctagaatcacctggcctcaatcctggctcttcataagcccttaaaattagagtcatgtgccaagctacatgactctgattaaatcacatgaatactgcctgtgatttatttatttatgctagtgatttagaggtatttattcatatataggcatgcagattttgcttgcttaattcacatcacataacctcaatacagcccttcttgttacgtagtcacttcatatatatgagtccagaagtgtgttagagatgtgcccaaatctttgttctctgccagtcattgtgcaaaatctggcaataaaaaaggaatgtatcataatttatgtcctcaagggaatatgaatatgtaaccacattcctgaaatataagcaacagtgtaagagagaaacaccaggagagcaaaaactggagaaactaaggatgaatcatcactcccatatatggttggagaccaaggaaggctttatttcaggtggatcttgaaagatgagtagaaattctgtatggaaaagtgggcaagggcattacgggatgaaagaatagcccatgataccttcgaaggcatggaggtaggtcatcagaaacagcttaaaagaaaacctcaagacaggtctatttgcgtgaatggaaatctatacaacaaacccccatggcacaagtttatctaggtagcaaacctgcacttgtatccatgaacttaaaaggtaaaaaaataaataagtaaaaattttaagaaagaaaaaagaaagccccagggaagtttgaaattgaagctttaatattttaagtggattaataaaagcaatgacaattgataaatcttctactacaaatattgtgaaaaatgattataccttcaaaaatatgacacagcaggtcacagattaaagatgtgaaaggacaataaagctagtaataagttaaaaataattttggcttttttgaaacgtggtaagaataggagtctgaattgagggtatgatgatgctattttgagctcttcttttctagaccttaatgaatgtttggtgtttggcacatgttcccatcaatgtataaatgtggaaggatcatataaatgtgtgtgtgaccagaattttcaagaaagaaataacacctgcatagcagaaggtaagattataaccactattgcaaatcctattacaattttgttgtaaacattttatggagaaaaatgttttatatttcattccagcaacagcttcatttctgataaaatacttttaatgatgattaatttggccagttggttagttaatattaatgaatttaatcttagatggtttatggaaatgactatgaaatatatggttactgttaaaatcacattgtgtcattgtgttcaaaacaatttttcaaaaggggtaaaattttaaaagccagtgtgatagaatgtgaagtatctctcttgatggtctgctctaagggaatatgagaaaaattataccccagggataaaaataaacattagcattataaggagaaaggaattttgagtaaggattttaaaggttttaaaacaagatcttgctttcaaatttagaagtcctccacttaccaatattattttttaaaaagattaaatgataggcctggtgcagtggctcatgcctgtaatcccagcaccttgggaggccaaggcgagtggatcacgagatcaggagttcaagaacaacctgaccaacatggtgaaaccccgtctctactaaaactacaaaaattagccaggcgtggtggtacacacctgtagtcccagctacttgggaggctgatgcaggagaatcgcttcaacccaggaggcagaggttgcagtgagccaggattgcgccactgaactccagcctgggtgacagagcaagactccatctcaaaaaaagaaaaacaaacaaacaaaaaaagattaaatgataaactagggttctgggcaattgtaggtatagattttaatattcatgtgtttatgctaaataatactgtaacttcaatattgttggctacaaagtatgattggacattattaagattgttattacaagaagaaaacaggatgatgtaatggatcaactgtgggctatagcatttgatatgcttggatttgaatcccagcacagcaccttttagactgtgtggcctcaaggaattcactaaagtgtcagagcctcagttcagtttccatagttataagaagtggagataaactgtgaaaggcttaacatagcgtctgacacataataagcatttgctaagtgacagctattaacattacagagctgaaaggcacctcatgaggtattattattattatttatttgcagaaactatgtatgcaatcgaacatctctttagggcttcgttaatattttaattgataattttggcatttgctttagggttttacttgttagtatgaaaatgacattagtactctattgtaggtgtcaaaactttagaatagaatgttacacttagcaggattctagataatttagagattatagaactttaatggaataaatactgatatctttttatgttaaaagttagtaagcatttaagatgtataaatacagtaagaggaagattcttcatattttaatttttatttcttagcctaaagtaatgatcactcaggtgcataaattaagtaatcagaaacttttgaagcttaatgagtatacaacatagtacttggatattgacaattgatgcattataacctagtgtattgtgacttatcaaataataatctctcttcataaaaggacatttatatgtacataatttctagccataaggaaagattggcagtagaaaaacctctatcaataattattgtaaatgtttagataagtgagtatcagaaataataagccataaagactaaaagacaatataaaactggttgatttttgaggaaaaactgtattaagaataataattcaagataatttaaaagtacaattattgcttttaacattagttgaaatttactttatttttgtattttattataataatctccaggctctgaagatcaagttctctacattgctaatgacactgatatcctgggttttatatatccattcaactacagtggcgatcatcaacaaatttctcatattgaacataattcaagaataacagggatggatgtatattatcaaagagatatgattatttggagtactcagtttaatccaggcggaattttctacaaaaggatccatggcagagaaaaaaggcaagcaaacagtggcttgattgtaagtaaataccattgtatatttgaaagtccataccttttccccacctgctttttaaacaaaatttatctaatataatatctaattatactaagtaatatattcaattattctcccaatattctccttaaatagaaataatgcatttctctactcattctcatagctgtacatgatttattttagttgcatgcttttatgtttttgctttaatgtatttgactattatataagaatgctaatgaatgacatataacatctccagaacatctatttcatagtgctttacaattattatgaacataagcttttttatcatgagatgagattgggaaacatcactttatttttacattagaaagtagcgtaatgcagggataactatttctcttcttacattatcataaatatacttctactgtagggcaggacatcaactcaatagtgtaaccatttcttctgactcctgataactatatttcaggaaatatccaaaacagaaatattgtgcacttgtgtatgctggacatgttgattatcatggttattgtttttgagaaaaaataaactggaacatgtttcaatttatggttgtagattagattatccctttttgttttagggcatgtcaagttattgtgtgttttatatttttaagtaacctggaaggaaaatgacagataaatatgtgtttttatagggcctggcccattcctgtacaaccaaaaagtcaagtggtgtcccagcaggatgtaattgaagctttgtgtttaacaaaaattagaggttcctatctagaagttctcactactttttctactagcatctaccataaacacttgaactacataaatccatttgatgcaaatctggaatatactttatcagcagtagatggcaatatgctggttttaaaagaagctattttagctttcaaattcggatttagattaacttagatgaaacctttgagtaaaaatccatgtataccagaattgttcaattcctattccctcaaacacaatagctaacattaactttcgttagctctaaaacagaaatctgcttgttgaaaacattgcttctacggtaacatggcatctgttgttaatgaatggagtatatactgtggacttaccttggctgagtttgaatcttattcctgttgcttactggcctcctagcttcttggtactctctatttcaagaggttctagtgatgattcaatttacatattagtatattaactatatactaaaattaattgtatataattacatacaactaataaataatatacattaattctatgtattttatatactaatgtttaactttctaggtacataggaagtattatttagatggatgctattaacaggatgattctgttgatgatggtaatgacattaataatgataattggcaaaatgttctttgcttcatattagcatattaaaaattatttgcaatttacatatctgcattttacaattgataaacatagacacatcttcaattttgacataatttttcagagaaaagtctttgatttttatttagttttgtgctttggggaaattgattgtcctttagttcagggttctagttcaggggtctccaacccccaggccacagaccggtatcagtctgtggccattaggaacctggctgcacagcaggaggttaacagctagtgagggagctgagctctgcaccctgtcagagcagtggtggcattagattttcataggagcgcaaaccctattgtgaactgtgcatgtgaggaatctgtgaaatgtggatgcgaggaatctagattgctgagctccttatgagaatctaatcccccacacactctattcataagtaaattgtcttccatgaaactggtccctggtgccagaaaggttggggaccgctgttctagtgaacagaattcacaaaatttattgtagattagaagccaaattcactcaatgtttggtaactaagttttcattcttatacatgcaaatatatttatgtattttacttgaatatttatatgtgtatatttttacatattttatctttaactttattaatgtgttatagaatctttcatatccaatggcaaagctgttgattagacttatttgaataggatataaaactttacttttaatgatagtaataacttgtgttatatcatccagacttcctgtgttttgcttttgttttcacctctgtatttaaatctcccatgattattagcattcgcaaagaagaaaaatagcactcacaaagaagaaaaatgcataacagtaggagtgcattttctactaaggagtccatcataactaactaaatgacataattataagtttggaacctctgagccatgagttttagcactataagccaaatttcataacaatactagccaatacattattttaaaaaatactttagagctacactgataaactgataaaagcaactatttaactttgcctcctaaatctttttgtattcctgatatttcaatattataaagacagactaaatctattattaccaccttaatgagtaatgtgaattgtagagcaactaacttgaaaggcatatcacatctctgggtctcagcttattcatctgaaaacaactgtaatattgaagtacacaatttctacagcccctttgagataatatattttaaatatatttgatttccaaaagatgtatgacatgtcatatatctatctaattattatctggacaatttgtgtttattcctctgaaatctgtcttatgtattaataattgattttctatcttatgaattactctgccatgtaaacacttgtgccatgtaaacacgtgttcttctaacagtaacaagctagtcatcccttagtttaatgagcatgcaatctaattcatcttctaagttttgacacaaatattaaataatactgacggagactttcccaccccttgaaaaataaaactcaagatttttccccaggctgattatggcacattgatttctacctatctctgaatcaatagacaagggagagaaaaatacacaaatcaagctatgaatacattagttgtaactccattgtcagtgaaccaaatggaagaagttagccatgtggtagcaggatgtttttaaagcatacttgcagatactaaaaatattggaatagttcaatttccataaagagtagaaaatctgttgcatcaaaaaccagaagaatattattcagacaactaaatgttaaatgaagtacattctaaaaaaatggttattttccatgtgatcccgtttcttttttttttttggaaattgtgaagggaatactcttctgtgatctatgaaaatggttagaatactaataattattataaatttaaatttcaaatgcagatcaagttgtttatagttagttagaaatacttttataattttctaaccctctgggctatacaagaggaatggatttttttttcgtttaagaaataatttaaaacttaaaagagtgacatgatttaatctgtacataaggcaaaatgagacttctgaatgttaattttagtacccagaacagaatataacagcattatgcaacaattgtacatgctcttgggcaatttatcatttttagtatgaaatgctatacaaaaaagtatatgaggggaagcactataaagtaggttaatgtttggaaaaatgcaaataactttaaaagtacagattaaatttttaccactaaaaacctaaatattcctaagcaaaacaaatgctcagatttatctgatctacttgactttgaaaagtaaatatgagatatcatttttggtatattctcatttttgtaaatagaatgttcaggataaacatgatttttactgattaataatcatatctttttcttaaaaagttgattaggccattttgttttcccaaaaagcttttagcaaaatatctatttaagttactcttaataggtctcaatttttaattgaagttctatttataaacctcatacccaatatatgagtctgtatcacaaacatacacacacacatgcatgcacacacaaagtgcataggtgtgcatatgcacttacaagtaagcgtgtgtgtgtgtgcaaaaacacttcaaagtcttggcaaacacttaaaagtcttatttcagaacatttgggtactggtaaaaattgacagtcatctgagttcattcaaaccagtcaacaactacaatcatttattatgattgtggaaaaaatctaaagctatcagatcattacatcattaccatttgtggttttattgttgttaattgcacaaaacaggtactcaataataatattgactcaggtaagtgataatgttaacagttatgatctagtcaaaattttactaaacaagtcaaagaggtataaatttgacactttgctataatggatttttagttccttaattacacaatatttactcattaaaaatataccaatgataattattatatgagtctacaataaattatgctgaggaaattattaatcaaaaagtgtagcattttagggggaaccagccaaaatgtattcattcatacccaaaggcttatttaaagcctacttgttacttttggtgctgagtttttagaatagaataataataataacagaactggaatcttgctttcatagcacttattttctagggaagaaagagaaagttaaataaactcataaagaaatcaatacagaaaattccaattgtttgtttaaaatgtattaaaggaattaaataatctaagaaagaaaaattcagataatgcaaatcccaagataagatgagtaaaggccaatttgaagagaggagatttgagctgagatgagaaagaagtaatgctattttttttatatatatatatatatgtgtgtgtgtgtgtgtgtatgtgtatatatatatgtatatatgtatatatatgtgtatatatgtatatatgtgtatatatatgtatatatatgtgtatatatgtatatatgtgtatatatatgtatatatatgtgtatatatatacatatatgagttatgagaggacatgaattttatatatatatctatatatatatatacacacacacatatatacatacatacacaaacatattctgggctagagatacacattaaagaatagcagaatagaggacatacataaaactatgaagccagattagattaccagtaagaatagaaaggaggaaaagaaggactggaatcaagctctcaagcaaaattaaaatgctgacaaggagtagccagtgcattaagagaaaataaatacagtgcattaagagaaaataaataagaagatatagaggtacaaaaactgagagaggagagtattttgaggaagagatcagggtcataattttagtgtacttctaagaaatcaagtgaatgaggacaaagaagtgttcaacaaatttcatggcagagattcattaaggaccttaagaaatttagggaatatggaggaggcagacatcagagagcacaagtaggtatgatttcctactcatttagaaatgtctggagatatttttgattgttacaatcgggagagtacttctggtatcaagtgggtagggccagaaatgctgcttaacacactacaatggataggataacacactacaaagtatcctgagcaaaatgttggcagcagtgaaattgagaaacccttcaccacaatgtcagcatctccagccaagctttcagtagatagttatcatgtcatattatgtaataataagcctgtaaaacaaaatgattctaaggtgaatcaccaatgtagttattttattggtgttttaacatttctttttttcccctcacttactcagtctcttttgcttgctcctgttcttcacccctcttaataatgaaataccccaggctcagcccttagtcctctactctcttcccttacttccttgttgagctcacatagtttcatggtttaacatatatcgacatgctaacataattgatatcatcccctgtccaactgcttactttgtttttcttttgtatctaaaacaaaaccttgaaactagcatgccccaaaataaacttcacattgtatcccccaaatccacctttgtaatctcatttaacgacaactctatttttcacatgtttaaaataagcatcttggagtcattagttgttgctgattcctttccttctgtcataactcataaatcaggcagtcttgttgaatacaccttcaaggtatgtccaagagttggctactttatattagctttgctgaatcattagttgttgctgattcctttccttctgtcataactcataaatcaggcagtcttgttgaatacaccttcaaggtatgtccaagagttggctactttatgttagctttgctgaaggcacctaggtttgagccaggcatctttcttttgaattggttcagtagcctcctaacttctctccttgctgcacttttcactcacaacccagcagtcagaatgccaaaaagtgaaaacgattccttatactgtttcctcaaagtccacagttcccttaatagacaatcaatttgttctgtaccatgcaaatatttttgtataaatttacatgctggtacatctagagcatttttagaagcttaagctataattgtcataaaataagctctacatattcaaatatacacagcatatacaatttcacaagttctgaccatcatcgcaatcaaactaatgaacgtgtctatgacctccaactctttccatatggtcatctaattccctcagtaatctattcccccagaccctgcccacttctctcccatcaccaggcaactactgatttgttttcttccttgtagattagtttgctctttctagaattttatgtatatagtaagtacccttttttctctgtcccctttcacccagcacaatgattgtgagattcatccatattgttgcatatatcaataaggcattctttctttggctgttacgtggatataccatcatttgattagctatttacctatttatgaacctacatacttgtatgtcactagggttttttcaatatgtagtagaatcttaccataaaaagtcatttctgctgtttactttgttcactaaacaagttttgagaccttaccgtgtcagctaattttacctatgccattttttaatgattgcactcatagtatgtatataacatccttcatttcaatatttatattttgagatacataattcgtttgatttttgtcttgttattgcaaataatgtcttagcggtcatcttcaagtataagggtaacaaagcctgtattagatagtccaggcattttatgaagtgaaaatgcgagattaaagagtattcgcacttaattttgaataagtactttcagattgccttcataaaggctacttttaaaaaatgatcagcaatatatgaatttgaatttttcctaatgctattgccaaaaccggcatcaaaatactaataaacttttgccaattgtttttgatgtgtattttctatactgtgaagtttgaacatattttctcatgttttattaaacattcaaaattctgcttcttccaagggtcttattttgatctatgcttatttttttccttaaaatgtttcattttccataagatcttattatgcactatttatatactgtaaatactgagcttttgtaagatatacaccccacacacaaaaaaaattccttcaaatgaatttgctttgtttctgatggtttttgctatatagaagatttacttcttatgtagtcagatctgactgtcttttccttcagtgtttctggacatcacatcatatttaggaaagtcttttatccagcacatgcacacattttctattctttcttttaatacttttacttttaaatatttatgtttctgatgtatctgaatgcatttatgtgtatatggtttgatgtagagatttaacttccaccctaaatattagtctttcatttctctggtgattgagtagggatttctattgttctgtggcactaaactctcaaaacgtatacgtgagtatggagtccccatcctattctttggatctctttgtggatctgtgcaccattaacatattttaaaaatgttctgtagcattatagcatatctctatatatgaactccacagtcattcatttaaaaattatttgaaaatcttgcattttttatttctaaaattgttttggaatattataagaataaacacattagaattagattgatgttgcattgcatttctagattaatttgtgagaagtcacatctattatgaaatccctatgatagagatcctaataatgaatcattcttgtgtctgaagggttatagtatgtcatgcataattggccttcactgaatagtaaatatttttataaccatagtaagaaatacatggttttccttgaaagtttaatttcaaagttttttttttttgctagttatatattgcctaacaggaaatgtgagtatgtatctttctcccaaaccttaaagaatgaagttgttgtatgtactatgaaagttgaaagaataattataaattatatgtggcaaaatgaattcacaaataaatagttatataatacttacatagcctcaccagcatctgctatttttttgatgttttaataatagccattctaacttgtgagagatgggatctcgtcgtggttttttagattccatattttgtccacctttgtcttagaaaaacctcgatttaactttccctctcttctccctggagttcattaagttagtctcctctggttttgtctatccaccccagacccaagccattctccacaccatagccaaaatattcttaaaacattaacctgatcatcgtatgtccctaagtaaattattctgctggatatcctttaaaaaaccattggtttacaagcctcttagtcattttcagcctcatctcccatcacacctctcccattttcttacatagctataaacaagcacatatatatccccagacacaacgttttgttccagccatacataggccatatttcgctaccaagaatgcaactttttatcttcccttcaaagtcatttacatgctatttttttctgtcttccttaattttgctaattaaccaaagctcttttattaaaaagacactacttatattattattatacttattatcacctggagaatggtcttgatcttgttgaagcatcagagatctcatcccacataatgtgtttttaggtcttccaaaggctctgttgtcatttgaagggacatgctcaaagaaagactgaagaatgttaattttatgcctagaaagtagcctacaaggtgacccctttatttttctaggttctgtttagacttggaaattttattgtcagtttaaggagtaataaaatgctagaaaattataatgaagctggcaagaaaatgatctacgaaactcagcatttcctatatttacctagcacgtgtgtgcacacacacgtattcataatctgaatgaatttgatggatgagagacactgagatataagaacacaatttattttgtgtatatcatatagatcattcatatatacatgcacatctgcttcaaagactaaaattcctgttgatccacaaggaacttacctaatgattctggaaacacactgtcatttgcttctcttaacttttctatgtgtttgttactgtcttcatcctctttctgatagatacataatttctttattaaattcaattccttttggttgcaaaatgattatataaagaagttatgtaggtaagatgattgaaataggttaggtataaacattgggaacactggtgatagacacaaactgaacacatgtaattaaatgagggtgcagcaggtagttggctcttctattctggaatgttagcctggtttcgatataccaaaccgtgtaggcttaattttcaagaaaaaaaacaaaactttggatatgtaatgtgacatgttaattttaaaagttagaatctacttatttttttttttaattttaacttaaatttactcctcaaccaatcgttttgacaggtttactctcaggtaaccctgaattatttctcgaatgttatgcatgtttaaattgtaattgtcagaggtatcctacttccttatttccttatttcacatatgtgaatgacctggaaataaggaaggagaataatatcggaattagcaccccaagcaccaacaaattattcactcactaactaatgcctaaaaatgagcaattaccatagatatgtatttaaggctatatgaaatgcacacttacccagaatggataatatttcaaactgttatacaatttactgtttaggagctagacatgttcaaagaccatctaatccaaagtctttattttatacaccttataatatacagagaaactaggactaggatttaaatcagttcttctgattccaaattcagtgtgttttataatcatctgtgatatctttgtttttctgatagtgtgaataaagctttagagagccagtctttctttttatggaggaccgaggtgaatcaggaataaaaggttaaagaacactgaagaggcttaaaaaaaaaagagtaacaaaatcacatatattattgagtctttaattcaaagacaaatttggtctttttcaacaactgagaattatgtctgaagtttctttttcgtctaatagaagtttattccaagttgacatggtcctaatgtagatcattgcagccttaaaattactcagattgaaataatctattgttcagtataaatcataaatagaagccaaagttttcatctctgcaatagttttttttaatcgcgtacacattctagctctaaatataactttttcttagttcacttaggatttctccactgctgtatgagctccttgattgatatatgaaatatttggatattttaataacattactaagtcaatagaatttagtaatatttagaatttgtgtagtcattattttacatccactcattggaagtgaatccgattcatattttgaggagcaaaatgtaaatagtcttttcatttagtaaaatatcctacagagacacacacgcacacaatttcttgacagtggttctacatctttgttttaatacaattccattgggagataactaactttaataaaacaactcaaattttctattcttagatgtacaccaagatgaaaaaaatcacaaataaatatgtgatatcacctcaatgtatcctgtgtaaactaaattttcttaaagtatattgctaactgtaagaaatttgttaaaacagacagcagtattttcatggctcaaatgcttgaactcccctgtcacatgtttttcctttttcctgttttaaaacaaatgtcttcagtgacttatatcttcagtttattgaagctggaattgtgacagataccttacaatctacacctataaaggattagtaatttaaactagtaacctctaattttgttacaatcaagctgtcactttttttgtaagatgtaagggtttcattcatttgactaatgcattcctacaaagaaggatgcctcaggtctcaaaactggctgtgtatttagagagcttgttagaaaagaaatcgtctgtctgaagaaagcagtcaaaatgtgtcttccactctgtgcaacaagatgagaaatgcccttttgttgtcagggaagctgcatgcttctgcagtctctcaaacaggacacatttgattagtgtctctatttcatgggtgtgcctgtctagtgagctagccaatggggcaagtgaaatttttatattttcttctctccaatctggtatgcttgtttgttttgcttcatgattttttaaggcaagtagcttagctctcctgttctgttttcccatgtcaatcttcatttccactctcagaatgtcagtgtacttttcctgtgtgtttccatttttttgtgtttacctgattgattttggtaactctccttaaataaattgtgtgatcataatatgaagatccaacaggggtttctgcctttcatcttccagtgaacatccattcaatatcagactcccttttatatggttaatactattcagaatcctggtcaagatgtgaatggtagagattatttcattcctgtgaagctcagtacaaagggtgatttcctaatttggccataggttgagagtaggttaatatgttgtcaccttctgatagggttgtcttcttcctcctctgctcctttcttccctcttcctccttattgtcttttgttttgttattctctcttcagtgttgaaaataaataagcatttagtttattgtgagtcattgaggatgaacacctggtaacatctccaccctctgccattattctctgagaatcatcttgtcatttatgatatcataaatttagtttgaattaattgcatgtgtctattttttaccccatattctaactgctttagttgttacttgaatgacattagggattccttgttccagaagaaggagaataaatgtatatattaaatggctctgcaagtcatcaatataacttgtacttatcatgaaaagtaagttttttttttcgtttttctaatccatgttctttaccctagaaatgtgacctaaatttatccttctacaattcacccttagtaaaatcttcaccagcctgtttacttgaaaaagtatcactaaatcaaacttctgaatgctctatgaacattaggaaactgggttattaattggcatcagtctaggtttagaagtctaaagttgaaggataatcagaattttttgagaatgaattaaatgaaatgaaaatcctaaattcaacagaagtggaacttgcatggaatatgacatattttaccagggataccatgaggattgaaaataaggtgtaaacatttacatctcacaaacagaaaatagatactttttctatgctcaatcagacaaagggcattataagttttatgtcataaaggtttgtgtcataagtgttagaaaattacacatatgcttcagcaggcttaaaacagcttataatggtgatttttcccattgtctttcatgtttgtagatttatgattcacactgacatgcacatgacatttggtgatatatttacttttaaatgatgacaagttgaaaataaaaatacggttagcttaaatgatactggagcatttgaaaatgattttttggtttggctaggacaaatatttatattctaaacatctatgaatattatttatatgacatttctagagtatactgtattgcggagtgctttacatttaattcaggtaactgagatatcactggttatatggataacatttattgttaaagttgagaaatagggtaataaaatttcataatttcagttttaaagtccaataggtcaaagaactgatcataaacagcattggaaattgtctatggattctgtgtttaatgtaagccgtattttccttgagatcccagtaatcatgcggcagacagtgatttgcaattcctgtttcttggcatcccgtgttctttttgagatgttcagtttcttttcttttaatccaagtccactgattgataatattggttcctccgaacccacacaagaagacttcatgtgttaaaaactcatatttccactgcttctcaggtcttaaagatgctgttacgtattgattacacatctagttgtaatcaccttcaaataattgtttctactcttgccataatacccctgggaataccttctcacttttggttatgcacaataaacctagccatgtcaaattaattactacactagttcctgctcaaagtgatcaagttaattgaagggcacagaaaataagttatttttcttgctgtccagtctcaatgaattctgctacctttgtctcacagtaatacagtaaaacagaatgttaagataatccaacctatcaaatgtaagataaataacagatattgtgactttcctcaaaagatgttaagatatagtattaccctaaatgtgtctagccatactaatcattttttcaattgtagaacaaaattatgtgtggtgaggatgcagagcatctgagtttttctcacattgctgaaaagatcgtaaattgctacaaactctttgaaaattttttctagcagcatcctatcaagctaagtgtgcataaacttgaagacactaattctattccttggtaaatacccaaagaaattgagtgtttgtatccatcaaaaaaaaaaaaagtactaaactatccataactttagttgtaatggcctaagactgtaaccaagccaagtggatattgtcagaacagtaaacaaatactactgagcaatgaaaagattaaaaattgatatatacaaaataaggatacatttcatagtcatgatgttgaacaaaagatttctggaatgaaagactatgattctttgttacattttacgccactaatctgtggtgttagatatcagaattatggttactctaaggaaaatattgactgcaggaagtcacgggtgaacctcctatggttctggaaatatttcagcagagtaatggttaaacaggtgcaatctggttaaactccagtgatctgtacaattaagattcatgcagataatacatctgcaaagattgaaaatagcattaaatatctttttgacatctatatagcaattaactcatgactatgttcttacaattcccccataacttcaatgtaaagatacagaaaactccgctaatttcctgttgaaaataccgtggtgtgttgttttgtttccttgtagtgtcctgaatttaaaaggcccagggacattgcagttgactgggtggctggaaacatttactggactgatcattctagaatgcattggttcagttactacactactcactggaccagtctgaggtactctatcaacgtagggcagctgaatggccccaactgcaccagactcttaacaaatatggctggagaaccctatgctattgcagtaaatcctaaaagagggtaggttaatggcttagtatttctatttcttgataatgaatatcctttttagaaattatgctctatagattttgtctctgtaatgagtgttcaatgtgtaatagtgtcacatgcttttaaatatccttgtactatttcttctgtaaaaaagcatgtcctattcataccaaatgatgatacaaattttttttctgaaatattcctgtattatgcattcagtatgcctgtgtgtctgtatgtgtgtctgtgcatggttatatgtgtgtattgcagaataatgagcctggtgtgatgtttataatctaaaattgaattattaaaatattaaacgtaatatcaaacacattacatgtagagtactaacatttttctctatggtaataaaagatgaaggtacacacacacacacatatatatatacacatgcacacacacacacaaatttaaagagtgtgttacagacatttccttcttttagttagagatgtaaacctacaggcaatggccaaaaaggaaatagaaaaatgttaactaaaaatcttaatcatctataagtggattgataactcctgagtaaaaagagacaacttatacttaattattagaattatgcagtcttccaaattaaagaataatttctgtttgggaaaatagttacttctctataaaaaaaatagcgtgttcatacagcatccataataaaatgactattctgttaaaacaaaaggggagtttcatgtggtggaaatattttttctctgagttttaatgaaattttcaaaattgaattttggatattaaataatgagctgtagtacatcatagtatacaatgattctcaaatattaacgtgtgtaggcaagactttctttaaaatgttgattccccaggccatttattggaggttctcattctgtgtgttttgagttgactctttttaagagactctggggtgattctgaggcacgtggtctgaagagccactgctttgcggagcagagtctggttatagcagcaccatcaccaggctaacctctctgacccgctctcttcaggatgatgtactggactgttgttggggatcattcccatatagaagaagcagccatggatggtacactgagaaggattttagtacaaaagaacttacagagacccacaggtatgatttctgacacacgctaaaatatgaagcagaatgacaagtatattactgttaacagttatttctagtgttgttggcaatataagtatttttacaagtggataaaactatttagagtatgattttatgaagttatttacatttcatttcctattttctcaacttgaaaatcaggtccttatactgtcagttacattacaggaatattatttgaaacttgcctaagttgtaaggctattagtcggatttcacaggcatgaaattttgacagtttatagcaatacatatacattagggtatttttacagatatatgttaatggagttgggatatttggaaatattcctagagaatgagagatgaaatgaacaaataggtggctaaatataaataccttatgtaaaagacaggtttggtgtttttttttttgttttgttttgttttgttttttttgccttttcattcagagctcttttcaatatggctttaatctccctggccaccttgccatctaagctactactccaaagcatctgtgttctcaggactgcccagaagttcagatcttttctgtcttcatgatctttctcccatgccatttttctcccagctcccccatctggaatgtccttccaacctttgtctacctagttatatctttcccatcttgtacatctaactttggcacttcttcagtaaaacattttcagactacaggagcctcaagggctctgtgccacctaccctccaccgactatacctccacagaaaggacataatgcattgttcgtagtacatattatttaataattatgcattgtaatatcttttgtagtttaaactatttatatttagtgcttatattcttattaatctttaatgtgttttatacctttccattcatttagattgtttttactctttatggggagaagcaatatttgaaatttagtctatttacataaatctgttttcatcccatgctttaacaaatatgcccattgaatgtctaccatgtgccagaaattgttccaaatgctgaagaaacaatgtgaagcaagttctaaccctcatgaaatctatcttcctatagaggatagaatatgtatttatatatactgtcacattgttatacatgctatacagaaaagcaaagtaagagatgggctgtcaatggaggtactattttagttatgatcagagaagttatctgtagcagggggatattgaaagagagacctgactaaagagaggcagcaagtgaagtgaatatgaggaaagagttttttaagaaaatagaatagtacgttctgagtaaggaattagcttagcatgaaaacagaaagaaggtgagtatgcccagaagcatagaaacaattcaagagaatggaagatatgaggatggtaaggtgactcaaatgcaaaactggattctattctagctttgaagagagctatttgaagaatacggcaaggtaagtggcataatctcaaacacagtttttatttttaaaatacttctttggtgttattttacataatcattattaatagtatatgtaacatgtttttattttaaagaatgacactggcagcagtttgtggaattacctgtagcacggtacttaggcgagtgcctaaaatgagaattcttgtaaaagtcatttatgacggtagttgtatgcagaagaaagctgtaaagacagagggagagaaggggaaggagcacagtaaactgtgtttcaggtcgaggctagtcttggtttgagccactatttggagtataaatttatgacaggcaaggggatctgcttttgatatgccccatcaatcattaattggccttggggctgtgatgttccaagcaaagctgcttcaaccagttaagcacaattatctggagaaggagggtatgtgcgagtcctcactacaaaagcaccagtgaggaattggatactcctgtttagtaaaggagatctgcataaggcaccacagtgtctccaacactgggaccagtgacagatgcatggatctgacactttccatgtattacccattctgctcaacaactcttatgggcaacttagtgataaacaaaacacagtcctttttctcacaaatttacgttagagaaagaaaaaaaaatgaggcatatgcagaattgtagtttttgcaaaaggtaagaattgtgtcattgtcgtgttttataacagcagagttcaaaggtgagaaagataatctccaataaagaaaaactgtgtgaaaagtgacatttgaataagtacttgagggataaacaggtaatccatcatgaggaaatttttaaaaagctcttcattggagtcagatacacctggttttgaatctcaagggattatttattagctgtgagacctcagaaatgaatttattaccttcaaaccttggctttatcaatagaaaatcaaaagattggctgggtgtggtggctcatgtctgtaatcccagcaatttgggaggccaaggagggcagatcacctgaggtcaggagtttgagaccagcctgcccaacatggcaaaaccctgcctctactaaaaatacaaaaaataagccaggcatggtggtatgtacctgtaatcccagctactcgagaggctaaggcataagaattgcttgaacccaggaggcggaaattgtagtgaggcaagatcccaccattacactcctgcctaagcaacaagagcgaaacacccttttaaaattatatatatatatatatatatgtatatatatagtgataactaactttaaaaatgccagatatatgaaataatatagtcctctgagccaggggctccaatgtacagcatatggatgctctgctgatgtcaggaatcatggcacatgtagaagggcacaggttgggtgacataatatgtgagaagagaacaccttaaatgccaaagggcttcaacataactttttagccaatattgagccattgtataattttaaggagtgattcgaatatgtgccttcaaatgacacactgattattattgttattgggcaccgtataagacacaataaaaatatgttgtttcaatcaagtgtgtggcaggtaagcaatgtgttccatgacagcaggaacatgaaatattttgctgaggataatggcttcaagctgcatccacgtccctgcaaaggacatgatcgcattcctttttatggctgcatagtactccatgatgtatatgtaccacattttctttatgcagtctatcattggtgggcatttgggttgattccgtgtctttgctattgtgaccagtgctacagtgaacatacacatgtgtgtatctttacaatagaattatttatattcttttgggaatatacccagcaatggggttgctgggccaaatagtatgaaatactattgtagtactatctaatagtatgaagtactattagattatttctctaataatcagtgatgctgagctttttttcatatgtttgttggccaaaggcatgtcttcttttgaaaagtgtctgttcttgtcctttgcacactttttactggggttgttttttcgtgtaaatttgtttaagttccttgtagattctgaatttagacttttgtcagatgggtggattgcaaaaattgtctaccattctgtaggttgtctgttcactctgatagtttattttgctgtgcagaagcactttagttaaactagatcctatttgtcaattttttcttgttaacaattgcttttggcatcttcatcatgaaatcgttgcctttgcctatgacctgaatggtatttccaagattttcttctaggaattttatagatttgggttttacatttaagtcttaaatctatattaagttaatttttgtataaggtgtaaggaaggggtccagtttcaattttctgcatatggctagccagttctcctagcaccatttattaaatacaaactcctttccccattgcttgtttttgtcaggtttgttgaaaatcagatggttgtaaatgtgcagtcttatttctgagctctctattctgttccattggtctatgtgtctgtaccagtaccatagcttttggttactatagccttgtagtatagtttgaagtcaggtaatgtgatgcctccagctttgttctttctgcttaggattatcttagctatacgggctcttttttggctccatattattattattattattattattattattattattattattgagacagagtcttgctctgtcgcccaggctgtagttcagtgatgctagtctggttcactgcagcctctgcctcccgggttcaagcaattcttctgcctcagcctcccaagtagctgggattacaggcacctgctaccatgcccagctaatttttgtatttttagcagagacagggtttcaccatgttggccaggctggtcttgaactccagatctcaagcgatcaacccgcctcagcctctcaaacttctgggattataggtgggagcccagcccatatgaattttaaagtagtttttttgtttttgtttttttttctaatttggtgaaggatgtcaatggtagtttaacaggaatagcagtgaatgtataaattactttgggtagtatggccattttcacaatattgattctttctacccatgagcatggtaggtttttttcatcttgtgttttctctggttcccttgagcagtggtttgtagttctccttgaacaggtccttcacctcccttgttagctgtatttctaagtattttattgtctttgtagcaactgtgaatgggagttcatttatgatttggctctctgcttgcctattgttggtgtataggaatgcttgtgatttttgcatattgatttggtatcctaagactttcctgaaattgcttatcaacttaagaagcttttgagctgagaagacggggttttctagatataggaacacgtcatctgcaaacagagacattatgaatttctctcctcctatttgaatacactttatttctttctcttgcctgattgccctggcaagaaattccaattctgtgtggaataggagtggtgagagagggcatctttgtctgtgccagttttcaagggaaatgtttccagcatttgcctattcagtgtgatattggctatgggtttgtcataaatggttattattttgaggtatgaggaacatgaactcttttgttgtctgctctgtgcatagtacctggcagtgtgtggtacaggggaggtacccatgagtatgtagggttaatgaatggtgtgtcagacaaggatactttccagctttgcatccagtaaggagagtatgtagtattacatgagtttgatttcaaactacattccttgatatttaaaagcttatttacattgcctcctagctcccccagattgcagcaatttctaagaaaataaataactacatactggtcctggaccactcataattaattgtttgattcaataagcaaatttgttggccaacataatgtctctagttaaataaagtggatatgaatgttaggattattttgctgttatttgaatttagtttaccatcactgtcataaatagatgtgtgtgtgtatgtgtatgaaaaataagtgtgtttgtgtgtgtgtatgaaaacatgactttaatgtagtttctaatctgaaactctaacaattttttaaaataaatttgacataatggtatgtatccagcttttttggctcctttatcacctcttaaatcaagaatatggtaattcacacttggtggttattactatcttacaaattttggctttccattaaaacagaatggatataattttctctagttctgaaaaacagtgatttaaatttattgttctctccaagtcctgcctcttaatactgtggtcatttcacataatattttgttttcttcattttctttttttttttctttcattttcttccagcctacaatggaaattggggaactagtagatcttagaaaattttagagtttgacaagagtgaaattttaaaatccctaaaatataaagtagtcttggtatcaagggagatatactgaaaatgactacataattagctccattatcctgtgtcactaaaacttagtgagcctatgtatcttttataaactgttcaaattgtgattctattatacttaattaaaacaagtatgacattttatttcaaattttctgtgctcctagtgacttggttccaaatattcatcttcctctgttcagataaaaatgagtttcttgagaattgatttttttccactttattattggttctttattacagagcaaaagaagacatgatattttaaagatagacatgaacttttttcatataaacttgattctcatctctgtaacaggaaaagttagttgattcctttattaactttttaatttagaagactatctcttttattaaagggcttaatagaaaatcaaaagtattgatttgtggatttttggagtataaattccattcatccataaactttgttatataatttttatcaagatgtaattccatccaatagtacaaaatatggccagagctgataaaagtgggtcttagacaaacctagaccaacaatgcaatatgtgacacttttgagacctttttactgcttctgaaaaacaatattgttgattaaattggattacatactcactgttttcttcctttctgtgattatcaatattaatgtttttaagtctaaaactaatgttaccgggaacaggtttttgttttagctacttctttattgtagcacattggtagaggagagagaatcatgttttatgtttttaacccttctcagtcaactgttttgaactataggagcagcagcaaaaaactgggtaatttgtggttcatattactcataattctacatgaaaatgcaaaaacatatcttcttacatgacttcaaatagcgatttaataattgagcagaaaccagtaaaacaatgaccacttgcttaattattatttctcaggatctggtcaggcatgatacatctctatacattacttgaggaacaaaatatttagttcgattacatgtgagctaaatatttgtatttaactgaagaattattcactagtggtttccaatgtggattatttccattctgattattaagtcttggtccagttacacaggaataaaagtctagcacagactcaaaagtacctttcattcagttgcgttgccattaaaatgtacttcagttgcttattgaatgttttcattgggaacactcttcagttgcctaaggtatttaactgcattgtacttccgaagtatgcaatatgtcatattcagacagtagctatgtcacaaaagttaatctacagcagtgaagatgtattatagaattcatgagtcatacatattactcttccatattgaaggaagtttactttcttagatattctctgtgttgatgatatttctacaaaaatatactggatggattccaatcacattcatgaaatcaaaaaatgaaactaaaaaagtagaaaaatattatttttactgtgtattatttcagtccattatcattcactgacatctacctgtgatgaaactgaagacaagcactctcagagaaaattaaatatcactagaaccttaatcgagaactttactgtttattcttccctaccataaacattttttttttttgaggcagggggtctcactctgttgcctaggctgatctcagctcactgacctctgcctcccaggttcaagtgattctcctgcctcagcctccggagtagctggaattgcaggtgccagacaccactccctgctaatttttgtatttttagtagagacagggtttcaccatgttggccagctggtctcaatctcctgaccgtcccgcctcaggctcccaaagtggtgggattacaggcgtgagccaccacacccagctaatatcaatctttagtcacattaacttcagcatgcacacagatatccgataacaccgttggccaactctgaatgggtgaaaatatattttaattaaatacatgaaccttgtatattctgagaactgtaccttcgtgaaggaattaaaaatacatatactaattcattttaaataatggtccgataaatgatttaaataatgaattcattctccatataatatgaagatgaaaatggaaatattaaagaaaagtctattagagaatagctaaaattaagaaaccacaaatatggctagaagggatatttaggacagactttcctatgtgaaataagacttttgctagaatttgttaagtaaatgccatgtagtctgaacctatgtatttgagataaagactgagttactttttctaatttctacagtttcatgatgggcaccaggtaatttctatgatgcttgaagacaaatgtcaagtgtaattatacaataagaagcaaaagtatgattttgaatgatttcaaatttacttgcactatttgtcttgtgtgtgttgattttgcaggtttggctgtggattattttagtgaacgcatatattgggctgactttgagctctccatcattggcagtgttctgtatgatggctctaattcagtagtctctgtcagcagcaaacaaggtttgtgaagtgcttttgtcttcatttttaattgttactgagagtgttaaatactaatacaaaaatgtaagtatggatactttactttgcattctggattttcttaaattctttctcctttcaacttataaggcttactagtaattaaaattttcattcctactggaaaaaaatagaggccagggcagaagtttgtccatcttgacttgaacaaacatggccattgctgcccagattcagaaaataatttcattctgtggcttccgtggctattccattctgagcagaacactttcagtagtcaagatcagcacctgtggacactaacttttatttcaattgcaataacaagcaaacaatgagttactgtatgtagcaaaatatcacagtaatgattgttaccaccgaaggatatacccttattcacataaacagtgatgtgtcaaaaatgaccatttaactctaccaccagtgactgcttaatctacttgtgctcctctgttgctataccggttttatgcccacctatctgcctggctcctattttttactgtctcatatttccagctcccttctcttcctcatactttttctctgcctggctgtctcagttctttctgctgaatttaatttcttccctttctgtttcactttcttttccctacttcaactccttcccacaatttttttgtaaccacaaattatcatatccactttaaatttttatatttgcatgttatatatttactgaatatagctttgcttccctttttttaataacacagggaagttaaaagaaaaacaactaaatcaaatttttattgtgcctttgcctaaagtgtgtgtgttttttttttaatcaatggcctcagatggaaaaaaaaaaaaaaagttcagatccctgtaattaattacaatgaagttaacttgttctggctttggtacacattttactatttcatgaaacagcaaagaaaaatatatgaatataaagacactttatactttacaacctctagataattagtaaaatataaatgtcgttttgttataaatttcagtttcaaaagttagaataattattctataaaatctctgaaaataaatcacaagatgtgaaaataatggttactattatttttagacaaactaatcagatgaagaatgattttcatttaactgttttctttattccacttctgaaatgaataatagtaatgtcaaatattatttttggatttactcattaaaaatcaactgattgattgattgcttaataaaccagtcatttgggcatgtaatttgatcatttatttgatccagaacacaaactgagttgtgtaaattgcctgtttgtatactacagataacattggcttttcttttgtcaactgcatagcagagaggattagtctgcaaataataacccccagaaaatgctttgtgatggtaaagatggttaaatgatgatggaagtgtatttttatgttttaagtaacatgtttactatattgcatatccttacttcagatatattaattctaagaacttcatagctaatattgtaaatattccaattctgaaagtttatttttaaacagtaataaggttttcaatatcgtcttggataaacatagtttttaaagtctgagtatatacattaaaactttcataactgcctttttaaaattccaggtttattacatccacataggatcgatatctttgaagattatatatatggagcaggacctaaaaatggtgtatttcgagttcaaaaatttggccatggttcagtagagtacttagctttaaatattgataaaacaaaaggtgttttgatatctcatcgttataaacaactagattgtaagtataatatattatgaagttgtctatattggtaaattattttcttgtatctctcaaaataatatatttttaaatatcttaactatgtaaatgtcttaacctcagtaacttaagtaactttaattttgatgtcactagactttttcaacttaccaaactatagataattctatttctgctgtaattgggaaaatgttcagcatttggccatgttttcttgaaattaaaactgtctttcttacaataatctgttattctgtttctaaaattcttttattttattattattatactttaagttttagggtacatgtgcacaatgtgcaggtttgttacatatgtatacatgtgccatgttggtgtgctgcacccagtaactcatcatttagcattaggtgttaatagaaccttgtgagtgcatagacgaactatctaaggaaggaaatttattgttagccattttgactcttaccactaatcaacaagtaactatcattcttaaatatatacaaaaagaactcttcccaagagttgtatattttctctgatttattgtatatgacttattgttagtctccctcctagaaaggagtgggtaagtcattgaggtaattaaggtaattctcttgaaaatatatttctaacacagctatcaaaaacagtgaacaacaaagtgaaaaataataatatggctgaaattctaatgatcagttcgctcttcaagatgctgttgaagggttatttgtaattactatttatggcaaatgaaatggattttatcttgtttggtgcatttatctggaaagataacagttggtgtttattcaaatcacttctcacaacagataaaaccaaatagagtttcctaaaacatcctgaaattttatccaaagtcttgctgctctttaccaataatttggcatataaggttccaaggttaatatgaggacagtttctctcatcctccagttcttttttatattcatagttgaatattgccacattcataaaaagtagacaaaaccctgtcttgaatataataggcatttgagtagtggttcttccagaaaaaaagccactctcatagtcaccagctcagctacctgggtgccctttctgtttaattctgatgaaataatctctaggaaaggtcaaaaatcagctatgactgcaaaggatgctgattggataaaaatttaaacaaaaatatgtatggcacacatttagacatgcacacaaactcctacttgatggaaaggaagccactttagacatgtcttttcaaaaaaaaagtcgtatttttcatttataccttgtactgacaagctacatatgcattttcatcctttttattaataaatacaaggcggggggattgtttttgtctgttagaacagctctgtaaaataaataagctgttgaaatgaaggtcagatccccccaaaacttccattggctttagtttccaacacagtcccaatggtacttcaggttctaggaccaactcttatgccaaaagcaattagaagcaaaagtaacaaggtatagatttgaataatttcttctctcttttggaaaatataaataaggcaaacttactattaatgatgagcattgggtaatttttcttcacctataaaggagaatgatgatattgagtgagatactccacatcagtggaaatttaatgtgattacttttcaacattgctaattaatcatttcgccttatttaattttatgcttttgaagcctattgtatctatatttacacacttctttgttttcttttgtttcaccagtacccaatccatgcttggatttagcatgcgaatttctttgcttgctaaatccttctggggccacttgtgtgtgtccagaaggaaaatatttgattaatggcacctgcaatgatgacagcctgttaggtgggtatactttattattctgtaaataatgaattaatccttatcataaaatttcacacctcgtgaaatggagtgaaattatctgttccatcatcagtttagctaccttgatagcagtggttcttgaatgcctgtgtaaactgtacttttctctggagaagactttcaaacaattcattctgcatttattcacaaagcagcattgaacatttacaggcacttaacaacagatcgagaactttgaagtcactcacagacccaaaagagattttttttataactcttctattagataaaacaatattttttgagaacattctgctatgggtttcaactcagccccaaaatccatttatttattcaatacatttctattgattacctcttgtgtgccaaacactaacttagaaattgagaattaatttagaaaccaaattttagcttcttctctgtaaaatgggacttacaatactactactactgctattaccacaaagaataataataattattctttgataattatgataattatcataataattatgagggctgatgaaggaaggcataacactaatgtaaaaactaaaaactaacagaaacaaaatggataagatttttttcattcatgcagtttgtatttcagaagctagaagctggaataatcaataaaaattgaaacattacttcagatgctaaatattaaataacaaaaaataaaaaaaacacaaaacagtatggtagcacaaggaaagaaaatatgtctcttgaatatccagctagactgacaataaataagttacctcatattcaagacattaggtataatggggaaaatattgttactaaaagaaaatccacacataatacttttaaaaattattttaattttattcattcattcttactgagacagagtgttgctgtcacccaggctggagtgcagtggcatgatctcggctcactgcaacctctacctcctgggttcaagcaattctcctgcctcagcctcccaagtagctgggactacaggtatgtgtcactatgcctggataattttgtgtgtgtgtgtgtgtatttttagtagagatgggatattgccatgttggccagcctgatctcgaactcctgacctcaggtgatccgcctgcctaagccccccagagtgctgggattacaggcatgaacccccacacatactaaattttatgtcacagacacaaaggcagtgttcttgccaggcgtggtggctcacacctgtaatcacagcacttaaggaggcagagaccagaggacagcttgaacccaggggttcgagacctgcctgggcaacatagcaagtacccattctccacaaaaaggaaaaaaaaaaaatgtagcgctccaaaatcactggaggatcacagcaaacattttccaatgaggtacagacattattcatggcagggtttgttacctgttgtatttccctctgctagaatgcactcctcacgtggactctgggtccttaccctcacagtcagcatctccacctctgcatgatttttctctttgttctctgctgaaggttacatccaatttgaagacttgtgctctttataaggcactcagtgtctaaaactattgtagtactttcattttatattctttaagcatttgatatgcagagccgaagcgtttgaaaagatgaattgatgaataagataagcaccaataaatagatgtttatgtggccagtgacacaagccacagaagagacagagttaaaactattaggagaattcagattattattcaaataggggatcagtcagaatttcctataggatatgacatttaaacaaggtctgcaaaggcagattggatttagattaaatggaaggagggaggaggacactaagacagaaaagctgtctgagaagtatggaaatatggtgggtaaaggaaataataagtcattcattttagttagtgtgtagaagtgtgaagccctgttttgggtaataaggttggaaaatttgtaacagagagctaagtgtgaatcatgattggtattttggacgggcattttggtgccaattattgaaaagggatgccatcatggcactgggatgctcccttcccctttatccattctcccagtcagagtagctgttatctcaactgtgataggggaataagagaatcaagtgaacatttccaaatattgttagtaccacgttctcaaaagctgttctgcctgcgtcatagaggtaaactctgcaaagtatcacctaggtattaagcctagtatccattagttatttttcccaatcctctccctcctcccacccttcaccctccaaaaggccgcagtgtgtgttgtttctcttgtgtatccatgcattctcatcatttagctcccactaataagtgagaacatgtggtatttggttttctgttcctgtgttatattccacttaacctctcagaaacagatcctttaactgtcgacaacttttctgtagaaatgtcataccttcagcagttccacataatccctcacccattgccctcacaggtgcctcctctgtactgtatctacttagaaaatttgggtgagagaggcatttaggagagagattaggataatgcacagaaataaactaataatgctaccaagtgacttttacattggctctgatgttacaagtattgtttagagtcaagtttcagacagtttttggtggttttcctttcctcttttatgtaatcctcttctgtgtaatcccatgtttccacaacctcttctacataatcctcctcctttcctctttgtttggtccaaattatgtgtccaaaactaaactctatgaataccctgcaaggacatgacctagtacagggctgagatgaagctttagattaggccgaagtctaccacttaaataactttgttgtgcttggactctatacctgcgtcccttggtctcagtttattctatataacatcaaattaacaataaatactactaatattactaccactgacattagtaataatactaaatattttgaaaacctatgaggaaagcaaattctatgtatgtttgtagacatatatgaatttatttaatcttcagattttattatctagtaatttctcctattttacagataaaatggaagcattagaagctcatttgattgtctaacattacttagtaaatggtggcaccccagggtgaatgtaggtggtccactctgttaatcgtcacacaatacatcccagtatctctgtgtcacccagagtacccatttccagagttattggaaattctagcttccagagttattggaaattctagcaataacgtgcatagaagggctagcacaataccttgcaaaaagtagacacatagccctttaaaatcaatatgtcactttgaggtaggtaagaaaatgaaacaagtttttggctgcattaagtcaccaaattgtatcattttatgcttgaaagaaggaatcttgcttatttacatgcacacttatccacgatctaaaactttttttggagatgtgttttgctctttcaaccctgcttaaaaggcatgatttcagaaacctcaaagcccattcttgtaatgtaagagaaaatcttacatttaatcaaagtgataacaacactcaaattagcctttacacatataggtcttgaaaaataaacagtttggaccattttagttggaacataaatgagtggatttcagaattattgattgctgaagataaatgctagttattttttttctgacattaacatttgctatagccaagcttttcatttctttataattatttgcctacctctggctgctattgttaactgatgagcaccctgaacatttttaatctttgtgtaagaaatttgaaattcaaatattactcattcttggggaagtgttcacctgctttttcctatagttgattataattgctggaggttggcttctgggggtgatttagttattgacaaaagcagctttctttttcattatagaaccattattatgagttttgcaagaatgtaactccacttccatttcatcaggcagtgttgtactttaaaatttctggtgcctaatgaggcacgttatagtaacgcgcatgccctaacatgtaaggattttgaaaatccttgtggttttcatagaactgacaggtaaaaatgagtaccccataataatcctatctatgatcataatgccttaagtgcttatcttcactgtccacatccacaacctttattaggacaaataacgttgactgagttagaaatgctttggtaaattttaaattaaacaagcatatttccactctgcgtatttcttgagagtttgatctctgtattcaattatttgctggagattcccacttacatttgcaagggcatcttcaatttagtatgccacctcaaaactacccctccatttcccatcatccttgtgttcccacctaattgtcctggtcagaaactgaagaatcatccttaatttttcctcatttttctttacataacactgctgtgatttttacctctgaatgacctttagaatacatccacatttattcatcccacattactctattttgggtcatcatcttacctatcctggataatgtatacgaagttctgagagtctccctgcttttttaagctgccattttaacccctgccagtacattacccttccaagacaccacattacctttggggtggagtctaaaatccatggatcttctcttactgcttctttcttcaaaatcacttacctattgtaattcctttctttaccctctccaatccaggtccgcttacagtgactttcattcatgtccactcacagtaactttcattcatttcctccagtgctcacccataggtctgcctagatggtattccgccggagctccatcctctgtaaaccttctgggcactcggtcgataatgctgaataagaatgctacttgcttactttaacaaatgaacatatcaatcgcctgttgaaattttacagtacactttggagacccaactgtcagcgcttcatctttctcctagtctagatacagtcgataagggctgaagtcaaattttcatttgtgtatatgtgtgtatggtacatacttaacacttatgtacttaatatttacaaagtgttacaattttatattttatattttttttcccatttcttatttactagtcatacaaacctgagttaacttgtgtatttgtcattaaggacattttaaagtgaagtaactgaggctcaaatcaggtaacttgtatgcctagtaagcggcagaaccaggacctacacgggtctcattataccactgtaattttttatatttctattacgtcatgagagagttattcatattacaaatacaaacttcagtaatgccaatctgaatcctgcctacatgacaatgtattagaaacttttcaatgaggcaagtctcagaattgtatggcactgctgacagtttctatttatgacagtggacatgatacttgaatcattgtgtcatttgaagccactgaggtgcttaaagatgctcttgaaatcattgcagtgatatattcaagcttctgtcatgtatgtgccagtgcatcttgaaaaaggatcataaattgttttgattttacctactttaactataaaatggacattactatagtaaagggcatattctagaatagaatgcttattacaactttctcaatcagttttgttccattgaacactctatgttgctcacagcaaagcagcatttctaacggagaaggccatgccaatatgcacagcaaaataacctagaaaatgattccaaacctatctttatcataaattatacttgccatattgttaaaaataattttgctaccccaaggaatgtccaaccttttttattctgagtcaaaatgttattaagtaggtagactctacggaatcatttaggataaatgttacacacagaaatgtttctgacactgttctgtcaccaacttgtaccaaatctcaatgacttttagtttgggagatttatatatggttaataaggaccaacatcaaagagtctctcttcatgtaaacatttctctatactatgtatattcacacacgcataggctatagaacaaatagtgtgtgtatgtgtgtgcatatgctataaatgtatcttacaaatttaaagttttcttttttaatagcaactactcctaaaaataagctatgtttgtccatattataaggaagatttcttggttggaaaatataatacttttagaagcctaggcaacacagtgagaacctgtctctacaaaaaatttaaaaattggccacgtgtggtggtgcacaatatagtcccagctacttggaaagtggaggtgggaggatcactggagcccaggaagttgaggctgcagtgagctgtgatcatgccactgcccaccagtctgggtgacagagcaagaccctgtctcagtaaaataaaaaagaaataagatgaaaatatattacttttagaaagtttcagttagttttactattcagtattttacaaatacaagaaaaggttaataatgctttaaatttaaagaagaatacacattaatttaatatgtatatttaccattcaacaaccagaatctatctgttttcagatagtatttaattttttcttcttttgtacttggggttaattattttatggaaacacaagatcctagtatttaaatattgtatctatttgaattattttattaaattactccctgaaaacatgctaatttgtacatttcttctcataaacagatgattcatgtaagttaacttgtgaaaatggaggaagatgcattttaaatgagaaaggtgatttgaggtgtcactgttggcccagttattcaggagaaagatgtgaagtcaaccactgtagcaactactgccagaatggaggaacttgcgtaccatcagttctaggtaaatatttcattgtcattgtatttcacatctttttcacttttccttatatatgaatcgaaaatgcttaatgttacaaatatacttcctaatatcttaatgaacaatagactaacacaatataataacacaaaattaaatcaatggcatttgttctaaattcagtatataaaagttcaagccaaaaatttaacaattactctgggttgagtatgtaccatgtgacaggctcagtgtttatagataatttgcccctggctcagaatgattagtagagccaattttccaagcttactatgtttgaccccaaagtttatgttttgtttttgttgttgcacgtagttttcctaatgctaaaaatcaattgttattgaaaattaggattattttaaatgtaaataaactgtaacagagaatctgatagcatcctgattcccatctaaaattgtatctattcttttggcatcacactgtatcatataatgtgctttggaaatacaaggtttctacatcttaggatatatttgagattattattaatttatgcaatagctatgcttgcagaaagtgttctgtacagcacataaatgaacatagaaacatattcttctactgacttgtattaaatttaaaatgtgtcccatgaggaaaaaataaccccaatgcataataaaaatctaatttgcaaattccaatatttagtgcaagggatattatgcaactattatagtgcaatctatgagcacttaatgttactaccataaatgcaaatttagtcaaatggaaaattctatattattttcacattcccctacatggttaatttctatcttagtgggagttctcactgcttctattgtttatgctgtgttttgaagtatttaatatagtgctaactgaaagaattatatgaagaattttcagtgtggatctgaaaaatcaagctgtttctgaaatgcactctaataggaaaagttagataattttatgtctataaatattttcttattaattcataatgaaattattctaattacttaatagcattctgaaaaaatcaggagtttgattagattgaaatataaacggcaataggagtcttaccacatatttttattctgttaagggaggctagttcataaagtatattctgttactacagaaaaaattgtagtactgtgtcctttattgaatatacaaataagaattcaggttcaaggaatacgtgtgtgtattttattaacacacataatatctcctttagggaaaaagtttttctcataaaaaattaattgtttggaaattttattatttaattagtaacttaattttctcattgagataatgaaaaccatggtgttatagctggatgatttatctatatttatatttagaaatatttaggccaagtaaacaatttggaattccaaactattgctgcctattgaacctgcaatgcatctcagggataaatctctacaaaacattgaatttgctgtcttgatgcatcctgagttgtatatagatacagcacaacttttaatgttttgttcaaatcatttgtctaaactttaatgcatgctcaaaatctgtagttcgattttgtctgtgcacacaattgtatcctgatttacataaaatgttcaagaaaaatatttttaaataatataaattagttctcattagtaatgtaaattagttctcatatggattcaatatgagatacagacatgcagtttattttatagcatctaataataattatatgatatgtaattaagtcacttaaaaagcatttttcacttttaaaatgtggttttataaaaacattgtttggtattttagactgtagaacctcattatctccacacaaatgttaattggttaaacaaatcccagtgagcaattcatggatttattcattgttggtttacttacagttaagccttttggcaaattcctgtgtggacactatataactagggtttggggcaggcttaattataatttataagtttatgacagttgtataggacaataataattgaacaaaagaaatgtcactaattaaaagtacacatcgttgaggcataattaaaattttacatgtaggaatgagtttttctcattccttaaggttactgtttgtaataatgaacactaaaaattaaatgtatgagctatattcatacaaaaagatactaaaaatgaaatattttgatattgattatatcaataaggattcatgtaggccatttttatgacctgctcataggaggatagatttaagatgaaatttgcttttgacaaaataattgaaatcagagtaaagcatagtattaagcatttgttattgaaaaatagagaaaatttttgaaagattttatgcatcatagatatcattaagacatttttgctgttaacagctatatttacacttaatctttacttttatgaacatttattctctatagtatattcatgatgtttggtatttttgtactgctataggtctgttatttagtcttttaatgtttatatcaaagtgagtcaaactttcctacccagttgatttagaggaatggaactagagggtttgtacttttgagacaacattcccaattactttcttctactcctaaagtttggagttatgctgaggggaagtagatgttactttgggagtttgtaaatatgcaaaagcacagctagctaggttaagaagtgaaagtgcaatttgggatatggtgggcacacatttgaattgaatattttaagtgaataccacaacaagaaggcagaagctgtcattgtagctctctctgccaccacatctgaggactttggcagtgaaggattttttttcccccggaagtaaagagcattccttctcattcattcaagggttttctgtcttggtaactgtccccacatcagatggtagaattgctcaaagtcaagttaaaccagaatttttggataacttcagaacattatgaaactaatgacaaaacatatgtagtaaaggatatcaagtcacatatgtacgtggggcataaaatccacagtcacctaactgatatcttaaagagtgaacattcatttaaactgcccatctttgcttttctttgacttctcatttaaatgaagatatttaaatcaatctttgcatcctagctcccttaacataggttaattaattatatttagggaatgctgaaaactggatatttggttctacttgccttttttgggctttttttatttgtgtaaatttagggaatacaagtgcagttttgttacatggatatattgtgtagtggtgaagtctggactgttagtgtaaccattagctgaatagtgtacattttacccattaagtaatttcttatcctttaccctcctcccacccttccacttctccaatgtctattattccacaacatgtctacgtgtacacatgatttggctcctatttataagtaagaacaggtggtaatagactttctgagatgttttgctcaagataatggccttcagtttcatccatgttactacaaaaaacatgattttatttttttctatggcgaagtagtatcccatagtgtgtgtgtatgccacgttttctttatccagtcagtcattcgctgaacacgtaggttgactgcatatttttcctgttgtgaatattgctgttataaacatacacgtgccatatgtttttgatataatgatatttttttcccattaggtgaatatactcagtagtgggattgctgtatcaaatggtagttttatttttagctatctgagaaatctccatactgttttccatagaggctatactaatttacattcccaccaacagcgtataagtgttcccttgtctctacatccttgccatctgttatttttggctttttaatagtagccattctaactgatgtaagatggcatttcattgtgatttttatttatatttctcttgtgattatttattttgctatgcagaagtgttttagtctaattaagtcccatttatctacttttgtttatgatgcatttgcttttgaagttttagttataaattttttgcctaggccagtgtcctggaaagtttttcctaggttttcttctagcattttttatagtttcagttcttacatttaaattttaaattcaacttgagtttgtttttgtatatggtgagagttagggctctaatttcattcttctgcatgtggcaatccaattttcccaggaccatttattgaataggatgtcctttccacattgtatatttctgttaattttgtcaaagatcagttggccataagcatgtagctttattcctgggttctctagtctgttccattgatccatgtatctatttttataccagaaccatgctcttttggttattatagacttgtggtataatttgaagtcaggtaatgtaatgcctcctgtttctttttgcttataattactttggctattcaggccttttttttttttttggttccgtatgaattttaggattgctttttctaattctgggaaaaatggcattggtattttgatagaaattgcattgaatctgtagattgtgttagacagtatgatcattttcaggtaaataattaatgatgttaaaattgaaaacacaaaatagagaatataatttaacaagtatgtgatataggaaattataactccaacaaagcaagtagaaaaaacacagaaagcataataagaaagtggcaaaagataagtctcatacatatatgcaggagtttggggagcagaaagcagaggaggagcccagtcagacatggatgaaaccagcatttacaaatcactaccagaagaaaatgttgatgatgcaaactttgcagcaagcaattttgaaacactcagcaagagtttaaaaagttgtcaatgccctttgactaaatatgaacactttttgaaatatgtcccaaggattatgtagtaataaaaaaacaaaatttagaagtgagaacatttgattgtgttatttgtagtattacgaaattggagataaaattgaaattcaaaaagaacaggatatacaactgctgtataatatgagcctagtagggaaattatgtatacataaaatatctgtataaagaaatagatctttctttatacttttgtattttccagatatgccactattaacatgtattattgttttcattgaaaattaaaatagcaacaataattatattagaaactattattagaaattaaaatattgtcaggatcatgataattatttttactggttgcttactaagtgccagacactgttctctccctttgaatcttcataagatacctgtgagagaataaaggtaagagtctgtcgaattttgctgctggcttcatgagtcacagttagtgattcgattggaccatatggtgagagcaataccagactattcaatcttacggctctctgggctaatgttagaaggcttaagttagcttacttatattcacagaaaagacaaaaatgcttcaatcttatttccacaatgctggctgaaaataaaccttctagaagtatatagaagtataaataaattgtgacctataatttgaagcatatcagaatatattaagaagtacctgggagggagctagataaagctcacaattcttctttttctttgtcaggctttgctgaatagttctgtataatcttttttatgcttaagaaaacctgacagctatagtcaccttgctaaaattatttataagtggacactcactttaaatccaggaaaacattacattaagtagaaaagtagaatgtcaaatctccttattgaaaagactagcatttttttaaagcattcagaacttttattacttgaatcaaagtctgaagtcaagacagattcacaaaggacagtagtcttagggacaagaggtcaggagataggcttttctattgcaatcctgtaactaactggatgacacagtggtactttgtctcagtttatgatgtctgtgctatataaagggacaggaatgtggctactgtccaaatagtagaaatgttttgagtaagtattatgtcatattttgatagtattttcatagaagggcattaaatataaacatttataactatgctctgcagtttaagtgtcacttaaatactgctattccttacactcaatgtttttattagaccaactgaactaaaaaatcatgtatatacataaaactagttagatatacataaaactagttagatatacataaaactagttaggtataaaacatcatactcaaagacaaaaatttgaaagcaccagactgactcaaccaggaccaagctaaatgggggtaagcgtcatggttcacatagacaaatgagtatgaattaaaaattgacttaaaaagagagcagactaataatgctcagtagcatgtatctacggcacagaaataataatcggtcactatgtcacagaaagctcagaaggaattacttttgctagcattcctttttggcaatcagccatacttgttcaagcgttgtgtagatagaggaaaataaatcataacataactgtccaatattagagagggttttttacatactttgacattaaatagtcattaaattatatcaataaataatgtttccataatcagtttaagaacagtttatcaaataaatctagcttttaaagacagacactcaccaggtttgcagtaagttattgaaaaatatcaacatcaaatacctctacaatattcaaatgaaagtatattgcttttgagaaaatgggtgtcaatagtgattgatatattacttgacaataagtatcccaacaaattttactctaaaattattagcaaataggtagtaatttctatattgagcatagtatactattttggaaattattatctttaatgtagcaattgctatattgtgaatgctctataaataagaattctgctaaagtccttagatatgttacttaatttttattactctatgatgtttacattgtggcatttttcagatgtgatctagattggttaagtattaagaccagaatctgagaactttgattattccaaattaagtgctctaatacattacttattatcactgaaaatcaacactatctgcccatatcaaagaaatagctgactatgactatattactgaaggtgacacacagttaaataggtccatttactggaggtacaatgtaaccaaatcatataaatttaatgctcctttaatgggaactaaggataaatctttacaatatccatgcagttatttatccatataatagaaaatattctattgttatatacttaaaaatatattatttcaactgatatatatgaattcttaggagcatcttatgtccaaaagtataaaatcaagaaaaaaatgagcaataggattttatatgaagcttcttagcaagggcatatactcagtcaagtttaatagcctaagcatagataatttgtttaacaatagtaatattaatagtagtaataatgccaatatttctactaatagtaaaacttccagttactgtggactggctatgtggcaggcattgtgccatgtgttttacctgtacacaataggttttgctattgctgtttacagaatgtgatgtagggaggaaatctatgttttctaaagttacacaatttaaatatcaaacgtgactttattccaagttctctctaataccaaaaacaaattatttaacactgcaccaaattgatattgttcctttaaatattagtggtgaaatattttatattcagccatttttactgagacagattttgctatgtaagggacatgtgatataagtgaaatttaaaaaactctatgagattccaagacatttccatttttcttataagcaatacaatatttaaataaaatatagaccttaataatatttactattgctcctgaatgactactgggtacataacgaaatgaaagcagaaataaaaatgttctttggaaccaatgagaacaaagacacaacataccagaatctctgggacgcatttaaagcagtgtgtagagggaaatttatagcactaaatgcccacaagagaaagcaggaaagatctaaaattgacaccctaacatcacaattaaaagaactagagaagcaagagcaaacacattcaaaagctagcagaaggcaagaaataactgagatcagagcagagctgaaggagatagaggcacaaaaaacccttaaaaaaaaaatcaatgaatccaggagctgtttttttgaacagatcaacaaaattgatagactgctagcaagactaataaagatagaaagagagaagaatcaaatagacacaataaaaaacaataaaggggatatcaccaccgatcccacagaaatacaaactaccatcagagaatactataaacacctctatgcaaataaactagaaaatctagaagaaatggataaattcctggacacttacaccctcccaagactaaaccaggaagaagttgaatccctgaatagaccaataacaggctctgaaattgaggcaataattaaaagcctaccaaccaaaaaaagtacaggaccagacagattcacagccaaattctaccggaagtacaaggaggagctggtactattccttctgaaactattccaatcaatagaaaaagagggaatcctccctaactcattttatgaggccagcatcatcctgataccaaagcctggcagagacacaacaaaaaaagagaatgttagaccaatatacctgatgaatatcgatgcaaaaatcctgaataaaatactggcaaaccaaatccagcagcacatcaaaaagcttatccaccatgatcaagtgggcttcatccctgggatgcaaggctggtttaacatacgcaaatcaataaatgtaatccagcatataaacagaaccaaagacaaaaaccacatggttatctcaatagatgcagaaaaggcctttgacaaaattcaacagcccttcatgctaaaaactctcaataaattaggtattgatgggacatatctcaaaataataagagctatttatgacaaacccacagccaatatcatactgaatggacaaaaactagaagcattccctttgaaaaccggcacaagacagggatgccctctctcaccactcctattcaacatagtgttgcaagttctggccagggcaatcaggcaggagaaagaaataaagggtattcaattaggaaaagaggaagtcaaattgtccctgtttgcagataacatgattgcatatttagaaaaccccattttctcagcccaaaatccccttaagctaataagcaacttcagcaaagtctcaggatacaaaatcaatgtgcaaaaatcacaagcattcctatacagcaataacagacagagagccaaatcatgagtgaactcccattcacaattgcttcaaagagaataaaatacctaggaatccaacttacaagggatgtgaagaacctcttcaaggagaaatacaaaccactgctcaacaaaataaaagaggacacaaacaaatggaagaaatttccatgctcatggataggaagaatcagtatcgtgaaaatggccatactgcccaaggtaatttatagatttaatgccatccccattaagctaacaatgactttcttcacagaattggagaaaactactttaaagttcatatggaaccaaaaaagagcccacattgccaaggcaatcctaagccaaaagaacaaagctggaggcatcacactacctgacttcaaactatactacaaggctacagtaaccaaaacagcatgatacaggcaccaaaacagagatatagaccaatggaacagaacagagccctcagaaataataccacacatctacaatcatctgatctctgacaaacctgacaaaaacaagaaatggggaaaggattccctatttaataaatggtgctgggaaaactgactagccatatgttgaaagtggaaactggatcacttctttacaccttatacaaaaattaattcaagatggattaaagacttaaacgttagacctaaaaccataaaaaccctagaagaaaacctaggcaataccattcaggacataggcatgggcaagaacttcatgtctaaaacaccaaaagcaatggcaacaaaagccagaattgacaaacgggatctaactaaactcaagagcttctgcacagcaaaagaaactaccatcagagtgaacgggcaacctacagaatgggagaacatttttgcaatctactcatccgacaaagtgctacaatccacaatctacaaagaactcaaacaaatttacaagaaaaaaacaatcccatcaaaaactgggtgaaggatatgaacagacacttctcaaaagaagacatttatgcagccaacagacacatgaaaaaatgctcatcatcactggccatcagagaaatacaaatcaaaaccacagtgagataccatctcacactagttagaatggtgatcattaaaaagtcaggaaacaacaggtgctggagaggatgtggagaataggaacacttttacactgaaccagtttacagtcccatcaacaaccattgtggcagacagtgtggcgactcctcaaggatctataactaaaaataccatttgacccagccatcccattactgggtatatacccaaaggattataaatcatgctgctgtaaagacacatggacacgtacgtttattacggaactattcacaatagcaaagacttggaaccaacgcaaatgtccatcaacgatagactggattaagaaaatgtggcacatatacactatggaatactatgcagccataagaaaggatgagttcatttcttttgtagggacatggatgaagctggaaaccatcattctcagcaaactatcacaagaacaaaaaaccaaacaccacacgttctcactcataggtgggaattgaacaatgaggacacttgggcacaggaaggggaacatcatacactggggcctgtcattgggtgggaggagggggggagggataggattaggagatatacctaatgtaaatgacgagttaatgggtgcagcacaccaacatggcacatgtatacctatgtaacaaacccgcatgttgtgcacacctaccctagaatttaaggtataataaaaagattttttattaaaaaataatattttttatagaagattagtgattttaattacatcttcaccatatttgacattagctattatttgctatcaagttaaattgtaagagtttattattatgggctaggtgtggtgtctcacgcctgtaatcccagcactttgggaggctgaggtaggaggatcacaatgtcaggaattcgagaccagcctggccaacataatgaaaccccatctctactaaaaatacaaaaaaatagccaggcatcgtggcaggtgcctgtagttccagctactcaggaggctgaggcagcagaattgcgtgaacccgggaggcggaggttgcagtgagccaagactgtgccactgcactccagcctgggcaacagagtgagaccccatctcaaataaataaataaataacaaacaaataaaaaagagtttatttttatgactttgtggtatgacccattgctggaacattttagaagatatatgtaaagaatttctatctatgaagaaaaattgtataaataaactaatctccatttattttatgcatatatatttgtatcatacaaagaaaaagaaccgatatatatgtgtgtgtgtatgtccatatatatatatatatatatatatatatatatatatatatgaaggagatttataattggaattggtacatgtgcttatggagcctgaggagttcaatggtatactgtctgcacactcaaggaccagcaaaggcagtcatgtgattcagtccaaatctaaaaatcggagaactaagggagccaattgtgtaactctcagtctaagggcaatgacctgagcaactgggtgggaggaggaagcaattcaggtgtaagtctttgagtctgaatgctcaagaaccaggagctctgatgtcctcagccaggagaagatggatgtcccagatcaagaaagagaattcacctttccttcacctttattctatttgggccttcaattaattggatgatacccacccacactggtgaggaaatatctttcttacttggtctgctgattccaatgccaatctcctccacaaccacctctacagacacactcagaagtaatattttaccagctactttggcatccctttgcccaggctagttgacacatgaaatgaaccatcatagtaattatctagcaaagcactttgctaactaacagagtgcaacttgaatatgaagtagacctaacactaaaagcagctatagtctagtgaaagtatgtatgccatggaggacaaagtttactcttttagggagtgggaagagtcgatgaacttaccaactgtccagagacatcaacatggaaacatacaaggagtaaaattgaaggtctgaagtttaggaagaagaaggagcccagaatcagaaaattgggacagaggcatttagacagaaagataaatatttaagccataaaattgggtaatatcaccagaaagaagtttggaagaacactttttgagagaaagagaaaacataaagacaattgtacaaaaaggcaggcagaaaacaaaagagaaatcaataaagctagtgtttcggaagccactggagaaagatcttccagctagagatattagccaacattgtgtaatcaaagagaaaatttgaagaagataatggttgagaagtaattaatggattcagtgaggaagtgattagaggtgagttttgaaatagggtatgtgtatatgtatatatgtatatatatgtatatgtgtatatatacacacacatacacatacatgcacactattgcatatatattcatatattagtatacatattctaatgcactttgattttttctgtactttatatatgtaaagtacagaatatttataaactacagaaaatatacatatatgtgtatatatatataagcaacactacacattattcttaaacctttcttaccaccaaataattaaaatcagtttatatgaggaatacattcacattgagcattctggcctgttttctgagagcataaagaaagtaatatattaagatacataattttttatattaaaaaaagctgtaccttcagtgaaggattggaatgtgatttttatgattgaatattttactctgtcacacattcatcaaattgagagcagagagtataactgccttttgaagaagctcaaggatgtaccaaaattaaaatttgtacaaatagacagactcggaagatattagattttctctttgatttgtttgctgttgtagcatgtttgttctttcctttggaaagatagaattgagcatgtttagaagctaaagggggaagaaagagagtatgattgtcttttgaagaagctcaaggatgtaccaaaattaaaatctgtacaaatagatggacttggcagatattagatttgctttttggtttgtttgctgttgtagtatgtgtgttctttcctttagaaaggtagaatcgagcatatttagaagctaaagggggaagaaagactcattcttcaaagtctaaaaatgttagaccctgagagtaaagttgatggagaatttcagctctagcccatcactaccataaaagtaaattcaaatttaattttatcttaaataaataatagagataaaacataaaatttaataaaagtttcagaatgatttgcttaaactgttaagtaccttggtagacataaccacagaataagtcctacctaaaaaaggtgaatctcactcaatagaaataataacaataacgataataataatcagagctaaaatataactctgtgctttctatgtgactggtacagctagaaatgcttcacatgtgttatctaatttattctacatgattctcccaaacaactccatgaggtaggcagtattattatgttgattttatagacagggatacaaacacatatttccccatggtcctacaaccagtacttgacactcataggctatgaatctaggcagtctgaaaaccttattcttagtgtctgagctaaggaaactgtcaaaactagactgatttagagcccagaaacataaggtatggagcctccccttctttcctaatgtcaactgatgttctttcatattgtgctacccttgtaggctgtcaactccccagctccctggatgcatcgctgctataaatctataccttaatcattgtaacaggactgtttctttttcaagtattaaaatcaaattctgctacctaaaaatctctgtaaatgaatccaatccaacgtcttagggtgcacctagagagattcttgaaaacagcaaatagggcccattatacagttctgcaacagaaagttcatttcccatcagaaaacaaaagatcagctgtatcaccaaataatttctgttaggtaatattcccctgaatatgaagatttctacttgtcagaaagaaatctgctcttcaaagaaagagaaataagaacttttaaaataattcagctgcactctgaatgatctaagacatatgctagctgtggacaacctagtcactctgctgtagtttcaaaacagctgtaaatgagacaaaaccatgaaagctcagtgtcatttctttgagtgatggggatagaagaattttcaagtacctcagcaggtaccgtttgtttctttcacacttgtatcattttacttctttttccaaccctaatgtaaacaaaaaaaaagaaaaacacatataggaaacaatgaatccacagtgatcacattatatgtttgtgtggcaccttttcagattgttctaatgtactttgtttttgtactttacgcactgtttatttcattgttttgctcatggtaatttttattgctatttacttgttctatatctctgtaaggtatccattgactgtaattgaagaattacttctgttgttttgggctcttgtttttttcattaatcacgttccaacaattattaacctcttcatttactaccattatttgttttgttgtcctgtagctttgtttttcacctactaaggtgccagtgaagatactgtgtttctatatcaacaacaactagaaaattgcattgccattttaaggaaaatatctactaaaagttagtgaacattttttggcaacaaaaaaatatgagattactcagcgtttaacgtatataaaatttaccttgtttctcaggccattaataggcatttatctgccaccaaactaataacattcataaatgctaagttttagagaaatattactcaccataaaaatgtatattactttgttcatttagagcatcagtctctagcatttttgagcatgtagagtcctttcaaagtaaagttaataagttatggaccctcaattcactcattttcttaaaaatgtatatgaattttatttgtaagcattgtattcactgaggaatgtttctcaaaagatttagacttcttcaatgtagaatctatagtgatagagaaaattatatcattttcacacttaagtcttagtaagatttacactcatgcatttctctaatcagtttaattacacttctgtgtctacaaagatgacagagaaatggcatgaatattctctaggtctacaaagacaagagaaagatggcttgaatattctctactgctagtcaactgagtgatattgtctgagtcttaactgaaatctataactaagtctctctcatactctttcatgttgtttctttacatttttgcaaactttgaaatttattattttaccatttaaatgatatccattcattttgttttctttctccttctcttctcctacagagctagttccatatttcattttgtactcaggccttgacagtctgagcagttagagaaacttattcctaatatacaagagttaactgtgttatgttcaaaacaccatacaggattgttgacctttcatcctgatgttagtccccacagagtaaataaagaaaaatagtcaaagatgatctgtcatatttggtcttatgtgctgttcatgttaaacttctaagtcatcctgttatttactagacttcaagtacagtccactcttgtgaataacaatatcaaaattagacaaaattagatttagcacttatgtactaaccacagtatgtgtatttaagtcaaatagagtaatgttactaaatttaattattataaattacatgtctactttaaacttattacaagatttatttataacatgtgtaatctaatgttttatgtagattcagcagtggttggtagatgatgtttgaacaatgtgaaattgtattttaggttctaatgaaaatataatctgtattatcacatgagtagaataaaaataattgaaagggccaaattgatatgagaacagaagtaaaaataagaagtactttaagcaaacaatatatgcatgcaagtataattaattattcataaaatgatctttgattattttactgaattgaaacttggatatcttctaacctagatttccttgaacatatgaaaaactgagacccaaagaagtcttgttactgcctaaagtcacagagtaaatcatggacagaccttgaccagaaacctggcttctcaacttttatcccatgaaaattccttgaaaataaactattttggttgaataatttgctttttattacttattgtttccaatagggagacccacctgcagctgtgcactgggtttcactgggccaaactgtggtaagacagtctgtgaggatttttgtcaaaatggaggaacctgcattgtgactgctggaaaccagccttactgccactgccagccggaatacaccggagacagatgtcagtactgtaagtaaaagcagcacccagaagccagctttgatgtttatgttaatcttctgatttcctgtatccactccttccattatcttaattttagccatcctctatttttcaggttcagtctctgtcactccaacaattatttacccattcttcacctttctcttattgtaaagattttatctttcttcctccctcagctttgattgcatggtccattattataaccattccctgtgtacaccctcagctcccttcctctctcttcccctcttttgcacttcttagcaaatcataaccatagttaaatccaattctccatctctcctgaattgacatcccataggcgaatgcaactgaagaaaaactcataattatattggctggcctcatttcagttctatcactaatttcaaatgggcacttactaaggctttctatgtagttccctaatccattgactctcccactcccctagatgtctatgtcacaccttctccttctcatgaaacctccaatgctttctccctaactttaccctcagctgagaaacttgctttatatttcatttatatgaatagaaaccatctaaagagagctgccgcaaactcacactaactagcacatccccccagcttctttctcctatgcccatgtacttgtctttcttcttgttactaggaaccccaggctacatctaatcctatgctctccatctcaagtcctgacccctccctcttggctacttatgaacacatctcccacaactgtcccctttttctcctgctttatgactattttcctgtctgccaagttctttctggaaaaaaccttcacttgtgcccacatctcttttttgtaataaccttattttactactctctcctcttttttaacagaagcattacttgaaaatatagttgttgtccacaattcttctatttatattttttctttgatcccacctctgtcaggtttttgtctttgctgttctgctaaaatatcttttatgaaagtcaagttaattgattttatttaatgtcctccatgttgccatatataatgatcaaatctcaattcttattttacatctactttcagcagttaatcatttcatccttcttaaaacatcgtctacaaagattttcattcctctagcctgtgttggggtatctatatttaaatttttcagatgtttcacacatgcaaccaaaattgagacctactgcctcggcaaattcacccaattgcgtgtttttttaaacatcatccaaatactaatgactgtaaatttacatatcctgcttaacctattttctgaattccaggtttttatacctaattgtctatttgacagcttgttatcactctaatttaaactgatttgtttttaccccaagatttttcaacaagttggatatcccttatctgaaatacttgagaccagaagtattttggatttcagattttttcgaattttagaatatgtccatctgtataatgaggtatcttggggattgaacagaagtctaaatacaaaattcttgtttcatatacactttatacacaaagcctgaaggtaattttatgtgtattttttactaatcttctgccctcattacgggaggtcaggtgtgaaattttccactcgtggcatcatgttggcactcaaaactgttggatattggaatatttcacatttcagacttcccaattagagatgctcaatctgtactatagtcttttctatctctttaaaagaaaatatactcactgtccagaccaaaataattgaatttttttgaccacccctttttttcacttcctgttttcactctcaattttacctttaaatatactcaacatctgaatacttctcaccactccattctaccagtatctcttgcctggattattactaatggatctccatgctccctctctttgccccaaagtatctattctcaaaaggtcagtcatagttcattttattcacaataaaattgctatcacagtcacatttattgagatttttctacacccaaggacacttgtaattccttttttgcattagttttattaattcgtttaatcctatcaataaactagatattgtttttagtctcattacagaagaggacaccaggaaaaaataaataggcttctgaatattacctatttagcatttgcgagagccaagattcaaaccagccaatttagcttcagggctcaggtcgcatccccaagttacattaaatatcattgaattttcacacaaagtagcctaggtctttggtcattttaggaactacatgaaacagcacagagtcaagctataatcatcggcttatctgagaatcaagcataacacttagtatcttgcctctgatggtacagagggacttcttctgcagaagcaagaaaacatttaaagtagtttattttccaattgtttattcttatcatattaggctagcctttccttgacatatgtagatgcccctaccctaggccaatgttccttttcacattgcctaacttatttcttaaatgatgtgcatcacaggccagaagtttatatgaaaatacaacctggttacatccatacatccctatattattgtataacactaattagccaggcgcagtggctcacacctgtaatcccagcactttgagaggctgaggcccgcggatcacgaggtcaggaggtcgagaccatcctggtctagagacggtgaaacgccgtctctactaaaaatacaaaaaactagccgggcgcagtggcgggcacctgtagtcccagctactagggaggctgaggcaggatgatggcgtgaacccaggaggtggagcttgcagtgagccgagatcacgccactgcactccagcctggcgacagaccaagactcatctcaataaataaatgcataaataaataacactaattatcctttctcatgtattgctcacatcttcaccactctcattcccctcctcacaacacagcagactatctcaacacaacttccacccactaactcacgtgtgtttattttctgttccaccattgtcatgaccccaaatgattccatgcaaatgaaggacaacactactatcccacttaatggagacccctattactatccatcctaggtctgcagcctctcctttattctagtaaaaccacaccaattgcccttccctatatagagccagcttccctgacattgtgactctgctcagcttaaacaccatttgctttttgaaattgttcaaattctcagtttgaatcaacctctccctcctcttctgactctgatcatttttacctgttgattatgtacattccccttacttgtctgggatctttttgagactacaaccaacaatggcacttgccaaatgaacaaaggaacaaagaatcacacaaataaatacataaataaaaataaatgatttgaataaatgttaacaaaagatcaatttaagatcaatttactttaaatgtaaaattacatttaatcagtgttcaatgatcttgtaactgtatgtggttcaactagagctagtattttctcctctgtcttttggttcccaattggtagaccaacatagaacatgtcattttcccctcttgtttttatcttttcattagttgaaacaacagtattcttaattaattttttaaactaagtttaaaaatattatgtggccatagtttgtatagcagtttggatccttccaaagaataaattcagttagcttatgttttaattgacaacttaatagaatcacagtctgaggtagcctgatgctttataaagagctgcattataattttattatcactattagtagtcagagcgcttcccaccttttactgcaaagcacttattaaaattaaccaattaatccttagacagaggttaaataacttgctcaaggtcccgaagtagtaatattatagtcagaattggaccccaggagttgttgatcaagatgtcaacaaacattcttgctgtatggtgatgctgtttttttggcagcataataagtctgtggacagtggcattaaaatgacaaattcaacagctgacaaaaacataataaatttagaatctattagatgtaagccgacaaggttcagtggacctggtgttctgtcaaaattgtatcttgcatatacaaaatcttctctctataaaagaaggaatgacagaatggttcattacagtgcctaattaaaggtccattagtgggagggaaaacatcagctcttagttgtgctgagtaaaaacatttcataactctaatagcaatataaagtcctgaggtctgaaatgcaaattaattttaacagcagcagcccagggaggagaggcaaagataaataatggtaaaagtaaaatcaagtattctttaagtaagttgttaaagaacaaatatagcggcacttctcactattctagaacaagaattactagtataaataaaaataaacaagtgagcatgacattttggatttaaatctaggtgttaagcatgaggttaaccaatatctgaagttatttgtgattaaatgataataacattaggccaaccaggccaattaagaccagttggatctgtgtctaaggaataggtagtcaaattaagtgaaaacctgcttgttctctcactgatactttcaaagtcctctggtaatctgcttgcagaaccattataatttcaattagaactagacttatcagaagtatacctgtacagcttattctccctggttccagtaagtacagacattaagtaatgtccctacttacagagttagaagtacctgacagtaatccaaagatatcatgttttgcaatcggtattagaaccacagactatcaagtaacgtataaaacaattatgcactatagatataagcctatcgtatttgatgacacgatgggattatttttaccatttgtcttctagggtagctttatcccatgagtcagttcatcagtgaatatgttttgatgtttacaatgagcctgtcactatgttcggcattaagaaaggaaatagtgaggtcagaaacattttctattctcaataaactcacagtgtaatgtctgattctaaaaaggaaacgagttattataggtcaatttaatgaaacacagaggctactagaaccttcagaaagaccacagagtttagcctttagaaaatttcttgaaggaagtggtgtctaagctgaaatcacaagaaatcaagaagctaaggagatgagaaagggaagcagcaaaggggaacagcatacacaaaggaacagcatatgcaaagcggaagtagcaagggggagcagcatatgcaaagagggaacagcatatgcaaagggaaagccttcagaaatttatttttcctgtttctattagatttttctacaggagagctggcaagagaaatcacactcagtaaacatgtgtaatgttttaataccagagatgttgctatgacacgttattttatctaatatgtgaatatgtatcctttcaacaaatgctcacacaaccctttgagattaatactattagtccaaatttgcaagtgccaacaacatgagattaaacagttttccctaatctgcaatttagagagcacaggaaccacagtttttagctttgtggatctgactctgaaaactaggcttctccgacatttatgcagctaactgacacatgaaaaaatgctcatcatcactggccatcagagaaatgcaaatcaaaaccacagtgagataccatctcacaccacttagaagggtgatcattaaaaagtcaggaaacaacaggtgctggagaggatgtggagaaataggaacacttttacactgttggtgggactgtaaactagttcaaccattgtggaagacagtgtggtgattcctcagtgatctagaactagaaataccatttgacccagccatcccattactgggtatatacccaaaggactataaatcatgctgctattaagaaacatgcacacatatgtttattgtggcactattcacaatagcaaacacttggaaccaacccaaatgaccaacaatgatagactggattaagaaaatgtggcacatatacaccatggaatactatgcagccatagaaaggatgagttcatgtcctttgtacggacatggaagaagctggaaaccatcattctcagcaaactatcgcaaggacaagaaaccaaacgctgcatgttctcagtcatgggtgggaactgaacaatgagaacacatggacacaggaaggggaacatcacacaccggggcctgttgtggggtggggggagtgaggagggatagcattaggagatatacctaatgtaaatgacgagttaatgggtgcagcacaccaacacgacacatgtatacatatgtaacaaacctgcacgttgtgcacatataccctagaacttaaagtataataaaaatatatatatatatatatataaaataaaatttcttgaagtggtatctaagctgagataagaagaaatcaagaagccaagagatgagaagagtaagcagcaagggggaacagcatatgcaaagagggaacagcatatgcaaagggaaagcctttggaaatttatttttcctgtttctattagcaggagggctggcaagataaatcacactcagtaaacatgtgtaatattttcatcccggagacgttgctatgacacattattttatctaatatgtgaatatgtatcctttcaacaaatgttcacacaaccctttgagattaatactattagtccaaatttgcaagtgccaacaacatgagattaagcagttttccctaatctgcaatttagagagcataggaaccacagcttttagctttgtggatctgactctgaaaactgggcttctcctggtctaatatatttttctgccattcaatatcctgcccaccatgctgcgacttttagagactcactagaacactcaaagctcaaatggcatactggctcaacctggtctttcaagcttctacaccatagaaaagaggcactaataggaactttaatcttgagctgttaagcttatggcaggcccagctaaaagcgaccaaagtacttttaaaatgatcaggaaaagagaacaatcttttcagttgttcctgttaataggaaggtcaattattcgaacagagcctaaagctttaagaattgtgatttggaaagtgaaagtacccataagaaccaaccccttcctcagtatttgaatatttaagattctttacaacattcacacttagactagcacagcattttggagccctgtctactttctcccaactcttttcctcttaatgagaaagtaagtgttgtcttcattcaggttcttatcatcccttgtctggattaatgcagcacattactttatgtaccttttcttctaaccttgaaaacctgtttattgcctccaaagtgcatctgctataattgttaatacctcttttacgtgacacattacgccctcaatgtctgctaaacctctttaatccccctactttgtcttcttaactctcctttttcctagaatctcagcacttctctttgccatttttcactttatattcatatcattcatgaatatctaccccactagaatattaaacaggccacagtgttttgcatacctcatcaatcttgcaagtgaattcagtgcctggaatttaggagtttggatgcatgtgagcaaagtagaaagatcctgtttacagactggtaggcccagttatttttctgtgctctagcaagatccctctccaaaggcaggatcagagttctgggccatattttcttaaaaactcatgaagatccttgatggtccatgagaaactgggtgcttacattccagtttcaaagattaaaggaaaaaagtgtaaaaataaaattagattttaatcaatgtgaagggaatagatacatatattttctagtgtgataatgatagagaatgttgaggtaagggtaaaataattaattattttagttattcttttaccgtagattatttcaaaaaaattgtcagggttgtaaaaatttgttgaagaccattttgacccaatagtaaaactagacttttcaaacagatttttgttttaatgttatgccttcattaaaaaaaaaagtaaaaataataagaggaaaataattttaggcgtacgtgcttatacataaaaggaaatttattagaaaccaatgtatgtttttccaagcagatattaattcatatgtgatttgaaactacaaatgctgattattagaattaactcattcaactgatatgtattaaacaacattaaatatcattcattgctctaggcattggggatttatcagtataaaagttttttgaagacacttggcttgtataactttgatgaatagaaaaacaactgatgtatctttttagagtaaaagttagataaagcggacttcgaattgtatagtcaaaaatgataaaagatcagaaatggactttatttcatactacttagaagcataccattatttttcacataattgtttgaaatttcagcagcatgtttataaaattaaactattgataaacttttatctgtacaccacggaacttgcccttgaaatattagtaattatatttagtaattttggtgagcactactgaataaaaaaattttaagaatgcttaattactcttgttggcatcatagcaggaacttttttccatgccagcttcacctgatattgagacaactctaatctcacaatgcttcacctttactcaggccaaggtggtttaatcttctacttttatgccatgttagcattatagacatgttttgacccttctttttacaatgtaaggaagagtacatatacaaagcagtgtaaagacaatgaaaggcatctcaaagtcacttagttgtaggttgaaaaatgatatgtctcacagctaacagtaaccttttaatggatttgtatttaaatatctgttgggaaatctgtccctgaaaaaaaaacaatgcatggcttttcatgaatagaagccatgactgtgattctgctatacttggtgttaagtaaactgcatggattcacaaataattacctgaaaacaaaattgagtacttaaaacaatgtagcacataaattatgtagagacatgcagactaaacaaaaatatttatttgaggcttgcctcaaatcaaattgttgctagttaaatgcgtctgctaacatcacttttaaaagttcaaatgtaaatttaagagtaacttttaaacgtggttatttatatcaaatttggaatgtctactactaaacatgctttgaaaaaatgctgagtcagaaatctttaaatgctttaaagagaagaaattaaattcctttcttatagataatatgataacctttatgtttaactattaaagatttaatcactacaaactggtattatgagtctgttttatataaaagatataacctcttttgtagctatactgctagaaacatttggtatttatccttattatagataagaatggcaaaagagactatgagtcagtatgtcattgtcagctgtcaaggaaaaaaaaaaatccccaaattttaaatgtatatgttctgagtccaagggtataaagatgagagaaaggaggaaagatttataatttactctatggtcgtatagcctatcatcaaataaagaatatataatagcagaaatagaaaacaatatatgaaatagtgcatttaatttcatttttatagatgcaaaaatacatcataaatctgattaaataaatgtagacattttttaatccactacattttccaaataaagtgaaagttccaacaaataaaagcaaagttaaattaaaatgtaacgtcatgccagagacagacaataatttttcacaatatagatcctccataatatgaaaataacctattaagagaaaaaccagtgtagcaggggttgcttcacagaatcagatacaccttaagtacagagcaccatgggaataggaagccacttagtctgtaatagtgctagattagttcaaaggtcaagtgactacatttggattttttttttttttttttttacttgcaatatcccttgaagatccatgtctaaacccatggtaataatatgatctaaatttcagtttgacaaaacaatttgtattttattagttttgagaacttggaagatttataatgatgatctcagagcaacctttccttgaaaatcaactgacagaaatgaatcaacttattggcagaaacaaataaattcagatggataggacgacataatgaatggcacctgatttaactgatttctcgattaacatctcaggacaagaattaaggtcatttctgtggtacctctagaccatgaagaactagaattaagctagtatttttcaactccagatttcattgctccttacattagaaagtagtgtaggattctgatttttttaggttctgacctttttgatcagatcccctatctaaacctaaataaataaataaaatgttttaaaacaatttcagtggatttttgaattttgttggatgtatagtctgagttcacactcctagaatatgtcaaatgagaatctagatttgttgaagaaatgctaggttttagaggtgaagatgcagaattaaaatattcttttttaatcgtgtaaaactatctgaagtaaatatatatgaactaacaaacagtattctataactttggtttctcaaactattattttcatcatcacaggtgacagttacactatctgtaaaaaaaagttaatatttcctaaaattgtaagtttaaagtgcgataatctataagaaaagtcttctgtaaattgtaaaattaatgcagatatttatttttataattttcattttaatagatactttgagtgcttatgatgataatatatatacataaggttatatatatttaggtatataatttagataatgaaaataaacattaattttatagcatcagatgcttcacttcataatttctaaaatgatacatgaatttagaatgaacttttgcattgagtcattgaaagtaagtagatcagaacactgacgaaaatagttttatgactgggcttacttccatgcacagattagattatgaccactggaagctgaaaagtttagtctaattctgtggcatgccatatttctgggaatttggcaagtcacatttttattcatatggcatgtctagagtggccaatagttggttcactgatccagcatctgagtgtctgttttatgttggcactggatgtccaagggctctctcattggcacttgatggcatctgtctttgcttcccaagtgattttcctttccagtctccctcttttactcctccatctgaacacaaacccatgctggcaaacttcggttagtttcagaataggacgaaccagccttggatgatccaatatttataaaaatttataacttgcttaggggttttaaagctaaacaatcagcagtattactcttgttctctgccttccatagtgccctgctttccaaggggaagcgctcatttattaattcaacaaatattagtagagcatctactgtgtgccagccactgaggcttgggattttattatgaataaaacagaaaactgctcttattgtactgttttatttataaagaatatgcaaacatgttatatgtcaggtagtgagactagagattatgaaaagtaaagaagtataattaagaatctaaccacttcctgaataaagagaaaggtcagaggcttcaaaagcaaaaacacattacttactatatcatatagtttctcactgcactatcttcatgtacactatacacaatgaaagagtaatgactgaatcccttctccttaagggcagaacaatttatgaggatgatttttaaaaatagtctttctaaataaaagtatctgggattagtattttattgattaattacagtgattgaatgcatatttctaatcttgttaaaggttaaatgctattaacaatgtaattaaagtgattttctgaaacctttgaattattatgaaagtcttagtacagagggaacctgattattacatatcaataaattgtttgtttatacatatctgacctaaagaaatggcacagttaaccaggggatccttgctagtttgtatatattattctgccaggtgaccttttcaaggtgactctcaatattttagtgaattctgattaaataataatcacttctacataatctgtttttcttcttgctatcacaccagtgtagaaatatctctctctctgtgtgtatatatatatatgtgtgtatatatatgtatgtgtatatatgtacacatatatacatatgtatgtgtatatgtgtgtgtatgtatatatacacacctatctatatatatcttgctatcacacaatatagaaatttctctatgtatatatatgtgtagatacatatacctatctatatctctatccatagatatccatatatagatatagatgtagatatgtatatgtatctacacacacatatatacatgtgtatctacacacacacatatatatacacacacatatatatatagagagagagatatagggattatccatatataaatatatagataggtatatagatatccatatatatatatatatacacacacacacacagagagatatctaggtatatggatatgaacatctaggtacatatagagatagatatctagttatacagagttatatatagatatctaggtatatctaggtatataggtatatagatatccatatatagatatagatagatatatacatagagatttctacactggggtggtagcaagatatatgtatagagagacaaatatacatctatctttatcatccctctatttatctatcatctaacttttcactcatatttttggttgcattgtaacattgaaaaaaaaaactagaagcaaagtacatttatgtatatcagaaatcgttgcttcaactatagatttgaagtgggtagcttgaaagaaggaagaaaataaggatggaaggatataaaagagatagaaagaaaggaggaaagaatgaaaaaggaaacaggaagggaaagataaaattaggaactgtatgggtgtgtataagatggtgttgtattctctcactatgatgaggtgagatgttgcctgccctccagttaggctacatacaacatgatgacaataactttcctcatgatgctctcatctgagatagaaatctttttcatgattacctcctatccagctttatccaccatgcatttctccatgaattcctttccagttttcgaaaattgagtcattactttgcactctgaaaaacggtttttttttgggggggagggggggaagccatgtatttgttaatgaaaatctagtattgataattgttttcaactatgttagcctttaggattctatcagaatttaagcactctggaggcatgtaaaatattaacactgtagatactaacacagtatatgttaattaattgtatcaggctgaaattaattgaaccttaatacatactcagtgtcttgatagagaaattagggcctaaatatggcaaatggcttgtttatggctgtggaggcgtggcctatatttgcacgcttcatttccattcttttttcaggccttcatatgcttattcacttatttgggtttcagttagcctcatctgataagccatatttagctgtcatctgcaactcagcttgctcacaagtctcagatgactttaccatttacagttacttgctaaaatcttttatagctggactactttaaaaataaagaactactcaacccaaaacactgtttataaacaaaaattatgaatacctcctataagtttgtctcattaaaacattgttatgatagctctatgagttgatttttgactattttgaaaactattgatgccatcattgttaatatgcattttacaatggcagtttgtcaaaaatttaaatgctgatactttaaaaatcccaccccatatgtcactcactcaaatcaaatttttgataatttggctgagttttacattttccatctccctggacacttagagatgtcactgatcaagatgattttattctttaattttcaaaattcctttatatagaaatatttggaatacattactattttcattagtataatagaaagtggtatttccttaggcatgctttcatgatgaaaatttatcatttctaatcagagttttgcaggcattttttcctcagtgaatatttaattggcatacctggatttaatgtttgcctactttattaaacacagctctgactttggaaggtatatttagcactatgcactaaagtttaattattaaaaatcttaggctgtgtaaaacatttgaggaatgtaaaaaaggataaatcccaatattaagtctttttaaattctatctcctgatttaattcttcaaagacataaaattctatacaaattgtatacaatgtatacaagttactctatgtgttttgactcctaagccatgctagatgaaaaactgacactcatctgctatgtatctctaggtaatgaaagtccacaattgctcttattaacatatttaagaattataaaacttttccagaaaacctttcaaatgtcctcatccgaaattagatgtaagtaaatgataatgctgtaggtatgtcttactttgtgatttctcggctattattttggtttcttatttgcttagagtgacccagagttgatcatgtctgataatgaatagatcaccttgatggttgggtgttttctacaagtgtgagaatcccatgctttgaaccaactatccatagatagagagacaaacatctaacttggattggaatgagagactgcagtggataacatctgacatttgaaccttcagctcaggtgtgagaatgccagcttgtgtccctgagctttgagattataggctgtgtcattatcgtgcagacttcttgtgggtctgctgcctttgctgctacaggatcctttaatattccaactgctgggtaggtcctaagatgtccacagagatgggatactttccattttaaatacacagaaaggaaagagaacagcaaagatattcaaatcactttgtagatttgttttcctgaacgtatttatgaatcactaaatatgaaaaataagagtttatcctctagagttaggcctatttggatttgaagttctgttctacctcttgtttgtgtgcaagccttggcaattgcttaacctctatgtgcatcagtttatttatctataaaaagagggtaacaccatctaatgcctctgactataccaaaaacccatgtgcctggcatgtaggagacactgaaaaatgagtgtttatcaacatcgtaattatcatttacatcattttactaaaagaaggtgctaaacctagatagagggcaccattggaaattggtgggtgaggaaggaatcatgacataatcttgggcatgatttaatgtaactgcctcagttcaaagatggccaaaggatatcttggagaacttaatcaggaaactcaggtgaggtcatattgttagaccgaggaaggactggacttaggcttccagtacctcaaattctggccatttttttttcttttccttattatctcatcccagtataagtattcatcaaaagtttataaaattatattgttggttgctctggaaattctacatttcatacagatatggaagcaaccataaaccactctgcagggataatatcagcagaattcataggatctactgcctctgggacacaattaaatataacagtgaaggtggaatataaattgcacggaaactggctcctcagttacagaatgcctggggatatgcactgtgaaatttacctagtctttgtgatggtaattccatcctacttttaatttgttgttggtttgtgtgtgtgaatgcagccttaaattatcaaatgcatacttaaatgatgaatataaaaccatttcacaaaatttatttttaaaggccagattaaaattcagtgaagtagaacaataagtgtccattcataaaatgcaataatattaatgtctaattctcatatagtttctcctatatgatcattctgtattagccattaaaggctctccagtttcttattatccttatatggtatcttcataccctgcttagctgatattagtttattttgattttcttctctttaaatttcacacttcactaattattacaatgtgaatagcccagttgcaaatatgagtaaatagctaaatagttttggcaattacttttctatagaaaaatattagggaaataagttaaatgcagttatagattgtatagctatatggctttccataaatatttgtaaacctgtgcatttgcacatacacgcacatatttttatgtagagtctattactgtgaaaagattaaaggaaaatatatttacttgtatttctggttacatgaaaagaaacattaaaagagaaagaaaaagagagagtgtgcaataatgatctcccttgaaaattactttacttctgtggcagacattagccattcatttattcttcagttactatctacctaattaccatatgaatactctgtaattacatattcatcattgtcctttagattacattattgtgtttggtgctactaggtagttcttagtgtaattaccctaacagaggttataaaaatttttatattgtgaatataaagggttgtgtaagttcatggttcactctactttcttagaacagattagttacatttcattattattccttcttaccatatatagactatctcgtctgttatgccattcaggtcagtaaaatgctcaaaacttatgagatggaatgctcaataggaaggaagacattactttgggtagtaataagtttaggcttttgccacagtaaccatttagatcaatgttgggtccttttttcttcttgctttaaccttatgattgacttgtcagttatctcagagctagtgtcccatcatgcatttctgagctctttccagggttcctagtatacaataaggcacatacatgtccacagcaaataatcaattatgaattcatcctttccattttatatttatagccaaattacacatcgttcataagatgattaactgtacagttcataaatcgactgtttctactgaccaatgtacctagactcatcttgtcttcaaccactcttttctatcttgaatcccttctttataccaccccccacaacaacaaaatcttttatctatatttttcttctaaaactgtcattttccatctatcactatttccaactttattttagtgctactaattactaagctgaatttcaaatttgaacaacaaatttcacatacaaatttgtgtgtgaaagtggagtgtgagttgagtggttgtgtatctgtattagaaagtagaaggccatcctttgctgcctactgtctcctttatttttggggaaattactaagtttttcatttagatttgcctacttctccatattcactaacatttcacttagcaaaagtgaaatataaaaaataaatccgaaggctataaaacttcaacaaaggtaagttcatacaaataattgatcctcttagtgataaatgattagtaaaatatcaatacattttacttaagaaaatatgtatctatcttttataaaggctactttcaaaatggttttaaagtatttttggtgcttaaagtagtcacctcgatgggatcattaatatttttagtgctgtggtataaaaaataaaatggtgtttatttagtaactattaagtttctctatttttcttcagagcttatagatcagtaaagtaacctttagaaccaaagtaaacaattacatactgaagaagccttctcatatactattcttcatactttgctaaattagtaagccagtttccactgggctaagtaccaatgaagtattcattttattagataaatagctgaactgatacttggaatttaaatatgagtgtgtagtaattatgtgagagtatatagagaggtgacactgatgaaaatatggcacatatttatacaagtttacatagatgcttgtaattctaagtgcattatagatgtgaagggagtgagagaaaaattaaactggcattcttatgatttattaacattgcagatattactctgagtcaattacagaaaacctgggctttgtttgaatcacccagtttagaaatagacaacaccatcagatgtttcaaactctttcctggacttgcacatagcatgcaccgtgataacacttgaaataacagaggacacttgaagagattattttgctttacaatttacaagtatccaatgattgcatcgtagctaaaatatcagatgctaaagtctattattaagatctgctttctcctgtgttcaggagtcttggagtgggaaatgagtaaatagtaaagcctttaagacaagaaagaaagagagaaagagagagagtggagagggaaggaggcaagagaaagggacaaagacattacataaacgtcgaagaataggccctagaatcctaaccggggtgcagaacacagtccagtcaaacatctaactcagcagcttccacatgcttcaaatattaagccaaataactggagatagaagattttcacagaaaggcaatgggaggcaactctgccagggctggagtgtagtgagcaactctttgcccctgaatttcaactcagcatggagtgttaagaatgagaactgggagaaatgaaatgtcttcccatttgaatatctgtagagaaagggttcagagcataaaatgatttctgccatttttagaggggaaaaaatggcatggcttaaaaacatgcaatttagaattatttattaaagtgtaaattctaatatttgcttatttcccaattttatcataagcaaacctttcttttacagtcttggattccatttttatgccatgaggccaatcaactgcattgaataatgcgcatctgacatgctatgaaaaaaaattggacgcattaaagagtgaaggattttctgtaaagcataaaaagtgaaccatgaattccttttaaaagttgtccctacaaagagaaaaactatttagcctagttagcgaaataaatgagaatttctaaaacattctaaggttgcttatgtgccttttattaaaaagaaaaagcattctctgttgaagtgtaatatacacagaaaagtttaaaaatcacaagtaaacagttcaattaaatattacaaggtgtacacatcagtttaaaccagcattcaagaaaaacattatcagcactgcaaaagttccctcatgttattcatcactctcctttctcctctcctgtaagataaatccttcttgacttctaaaaccatagattcaacttaacttttgaaccttatataaatataaaaatgtagtatacatattttgtgtctatttttctcaatttttgtgagattcatccatatttttgcttacagctgcattttgtgtgtgtgtgtgtgtgtgtttgtatatgtgcattttattgtataaatgaaacatagtttatccattcttgggacagacatttggatttcttaaaatttgggctttttaaaatattgctgtgcatattatgtgtatgtttcttgacatacatgtgcatgcttttcttttgggtatatgttaatagtggaagtgctaggtcataaggtgtgcgtatgctgaaacttaggagatattgccaaccgttttccaaattggttgcaccaacattctctcccacgagtagtagtagatgagagtttccactattattgtattatcagtctggtgggtgtgtatcggtatttcattgaagtgttaatttaattttcatctccttgattgctagtgagttatgtacaggcgctcatcttttcattttattttttattatttatttatttatttagagatagagtttcactcttgttgcccaggctggagtttacactccaatgtcacgtgactccaatgtcacaatcttggctcactgaaacctctgcctcctgggttcaagcgattctcctgcctcagcttcctgaacagctggcattacaggtgcccaccaccacatccagctaattttttgtatttttagtagagagggggtttcaccatatttgctaggctggtctcgaactcctgacctcagatgatccacccacctcagcctcccaaagtgctggaattacaggtgtgagctaccgcacccagcccatctttttaatcttaatctaagatttaatttatgcacaaaattacttataattagcatactgcagataagtttttaactttgacctttagtactttaagttaaatgcaaactactctttgctggagtgtggtcctggacattcatcaacctccagaatattaatccatttttttctagttatttgggtcttttcaggggtatagttataaaaaaaaagcgcttcaaaattttacatgaaaaattacattttaattttggttttcaatgttagttaataaataagctattttggtcaaatcaaatctatttacaagtattagacaatgtagtctctttgccaactagtaaaattctctccagatcatcatttcttacattttctagttcccatgggaactacctgggccccatttcagacctatgaattataatctaggagtgggtggcagggaacggcactggaattttcatctgcaaataagttccctatatgattctataattaattatatccaccatggcaacctttgaataatgacatagtaaaaaaatgttgcaaagaaacatcactagacttctatgtctcatcagacagctaatcagccccagtggatgaaattttaaagcagttggggacaatattaaaagagctttttatgagttagaggtatcttgcaacctgcctaaagaaggttgttcttcagaggtttctgcattgaatgggaggctgtcctggatgatcacatagactgctgttgatatactcttcataaataaaaacagcatttgtgttgtgtatatataccctccaagcctagaacaactacagaaaccataatgtatggctactaacactatgttaaatttcagatctccaactctcttaccttttgaaagtgctatatgtcttaaatatagccaaaacccgtattaataggcttcaaccctaaatctcaatgaaggtacctggcacagtgcaacagcaagcatgggaatgcttgaaataaatttccataaatatgaagcaagtctgtcaataaatttaatttgtctgatttaataaagggctagataaacataaacatgagaattataaattatgttttaatttttcttacccattataattgtcaatatagcaggatgaagtttataaattgtgatttttatctcagctaatctcatttaatattgcttcacaattaaataggtaaaaggaaactgcattttctaaacacaaagtctggaatcaatttaatcaattattttgcataggatcatttatattattaatttcaatatttaagtgtgataaattataatatattcatatataaaaacagacatgattgcttttcaaaagacagaagcagaatgtctaattctattgttagagtggttgttatattattaaatagtctttgtttcattatgcatgttcaaggggtatagaaatatttgggtgaagtgttccttcctagttgagaaaatcgtctgtgacgctcaatgagaaatggccttcaaaacaataggttcagattacagggagtttcgtgactgatgggaagattagtctcttaccttagaaaaggataatagcctagatttctgttattattccccatgaatgatggatcagttagtctcccagtttgctttcctctccgagttccatgagaggcataactcgttgtttgctcacctgctcaggcatgcagaaaatacctgggtttgttctgctacgtgtacagggaagcttctttccacaacactaaagtctggtgcaggggtatgagtcctctgctcaccacatgtggctgactgccactttgactacttgagaccgtcattacagcagttactactgttagtgattgagaccgtcattacaagactgaatgaagggacaaacttagaaatgaaaacttaagacaaaagaaactgctttaaggaaagggccaggggaagaagaagagagctctctgcttctagtgagcaaaggcaactgccgagcttctacagcccttcctatttattgggtaacaagagcaggtagactgcttaattgatcacaggtttgtattgttactgacaggcttcaattatacctaatcataagaaacatttgtgcctggatcattgactgctctcagcagtccttctgggtggcatacacagtttgttggtttgacaatgttctgcattaatgagaaagtttgtggcttactcatatagcctccagtgctataccgatgtaatcacgaccctcattctttcggcgtccaacaaccaaacattactctgttctctagatgaaaagaggtgtgaaggaggcaacaataaatgacatccaaagaaatgttaagcatttctgttcatttcaaactatacttacgttgttcattagaaagaaagctaagggaacttgttaacttaagctttaatattcagaaccaaaagagtttgtcacctagcattatagcaatataagctctcttagccagaggaaaatgatgcctaattcaaagaggagaatcaatagcattattaaagaattctacttcatgtgtaattataagctgcttttgtaaattaatctacctattatttttaagtaataaatgaaagggtcaccttaattatgactgaagaaaaatgtcctgtaatataattttatttttctgttgtgcctttttttcctagacgtgtgccaccactattgtgtgaattctgaatcatgtaccattggggatgatggaagtgttgaatgtgtctgtccaacgcgctatgaaggaccaaaatgtgaggttgacaagtgtgtaaggtgccatggggggcactgcattataaataaagacagtgaagatatattttgcaagtaagtggacacccagcttaatttataaaagcatttggacaccaatggacattgcagttcagtaataaatagtaaaaactttgtagattgtttttattctaaaattccgtattgtgcccattgcagtttttatgattagagagtaagtctagttcactttaatttgacctgaacttattcaacatctattgtgaatatctagaaattatgaaaatccattatgtaataagacggtcatatcattccctataccaaatattcctgagtaagcaagaaatgctggcattcagcatactttcaaaaactacatgtaatattattcaattagattagctcaggctgttaattgtttcatcattgttattgacaataagtaggtttgcttttctgttgcaaattgatttgttgaaggaggagcaaaagacctgtctaatgaaaacacacattaatccttttttcttaatctgactttgaacattatgatcaaagcaaacagaaggaataatgtgttctgggaaataagtaaaacaaaaatcttcgagtttgactttcattgcactgccttttgctctttggctttaagattaagtgaatggaaaacagaacattgcggctaaagggttgtgccattcagtttctatcgtgaaaccagtttatgccactgaggttagagatcaatcctcactccagacctcttttaatagctttttaaaggaagggcttataaagaactggactctatcacttgccttgcttgggagtataataaataagaatatgagacaggaaagcatgccataaagtgtccatgtcacagcttccgctgagagctcaccaagggtgccgaatgagttatgttgctctgccaaacaaggcccaataaaatttgattgcaaagagcatcaacatttttttatttactctcattttagaatttaaatatgatttgtattatcattatgaatgacatttacgcaaacctgcaaaattgggatatttgaaagtacattttttagtaaagtaattgaaaatatgactgatatataactatgtgcctttgataagtacataaaagtgaaacatgcgtccaaatcatgtttcctcataaagctcatttgttctttgtgatgaaactgtagcatgacagaactgtatttcaattagtgagcgtacattgttctctatgtcttgtgcaccatatcaggataagctgtggaatcttctttacaactccattccacttaccccagagatcatgggctgagatctctggggtaatccgagatcacatctgagaaatggtgtgagccaaagtttcctacccattttaccttggaaaagctcatgtggagatgcagaccctcttccctttatgtaaggaagaaagggcagggatcagggtccctcagtatcgcttgctatacagtcaaaagtcccttctccaaaacagaaacaccagattctcacaatgagcaggctattgaggtgcaacataagagtttgtgttttttaaatgatctttttggaaatgtatatataaaaatggataaataacaattgctaacaatgaggagatagtggaacttttaaactaggaatataatacttgatttattaaataggctataacacttgaacatgacaatacaaacataattctttggattttctgaaacatgttagatgattaaagttcatttttatttctatgatacttttcacattagcattaaaatgaagttagtgatgttagaatttctgttttataggtaaagaacagatagtaaaacaaaattgcaataaagttaatcatttttacttaattaggaaaattcaagccatcaagtatatttgttattacaaataggcagttgtgtttctaatacacagcctatgaactgttaagtagaacaggtactctatcaagtacagtgagtataatctttaaaacagagccaattgcatatttttctcttttctggaaatcaaagtgaatactggtgaagaaagacttgatcataatcttgaataacctaaattatgtctttttgatgaccattgtcatgggaactatttgtatggactgaataactagtaattaacttttggaaagtgatacatcacatattctgtgtgtgtgtgtgtgtgtgtgtgtgtgtgtgtgtttgtgtgtgcacatacgctgaatgcctctaaaaaagaaaattatgaaaatttactttaaaatatgagctgcactctttgatgtattgtaatgattttaactatttgtatttcacatttaaaatgtctacaaatttctgtcttcaacttaggattcaaacacaaactttagagggaaaaagaggcaacatcttttgtatccattggaaacacaggtttaaaagcaatcaggtttttttgtcttttagatgatgagatttgataaacagttatcttttttttgtagaaaatcatttaatgtataatgagctaattttcccttttgaggctgttcctttgataaaacaagaaactataattttttgactttattattttcaaagaggctgggcatggaggacaagtaaaagtccctcagatgcacttagtctattagacaccaataccactgattgctaattaattcactgcatccatattagggtgcctctataggttataaaggatgggatagtctctgtacaaacttgagaccacccactccttctctatgtcttgttctgtttacctgtatctttatttcacatcttgtacatagttacactgctcactgctcctgtttaccttgaaaagaaatgtgatttcacaaactaagcttttcagaaacatcttcaaattaaacaccaattaatgttaaaagcagttgagggcatttccagtagctacacaacccacatgaggtcaaataaacatgcacagaataaatgaactacatgtcaaccgattatttttaggcatctcacctatcattaggaatcaccctatgacagatgtactgcaatagatatccatcatggggaggatcaaagtgatcaatcgatattgtagcctgatttttttgtcaaggttatgtccagatgcactgtgataccattgattgtttcatagcagctaatactggtgtgaccacatgatcagaattgccagcatgatctgttgttaattctggttttgacccacagagtaggtcccgggataatttgaaatgttgatgcacatttctgcattcactcaacagttttcactgtccaatctaattatttgtttatttaaaaaaatgtaacatggcaagtaaaaaatgtctgcgtttttcccagtattgttatgtttatttttacagtgtagcagtagctatttattcttgtccctaacctgtgatgcgactttaacttagaaacatttggtaagtttttcaagaaagcctgtctcattactttgttgccatattgcacattgttcctataacataactgtttttttatgaactactccatgatttttttatgttagaataaaaatagtttgacattagttacagtacatactcaaagagaaacagtgggataaaagtggctacaggataaccctccactttcttatgaaatgtggggtctaaaagtcttagcattctttgaaacagattttccactttagaagaaaagctaaagcacgtttttccagagtacttgatcatgtggtttatcattcacacagatgtcaccaaaccctacttacatgaaaaaggaacaagatactgatgctaatgtctcccagaagtgtaaatgatagatattagagtatattttttcacacatatatctagctgtataaaatgtttatattaaatgaactggttgaaaatttgagaattatcagaagaaaaattttatgacatcattctgacataaattaaactgcctctagtgagtcagacttcctgaaaacttccttttaaccagccactccatctctcctatatgatgaatattctcatccacagagagtttatgtcagctttcagcaataatgttgccaataacaatgaaattgttctttttttctttgttgttgcagctgcactaatggaaagattgcctctagctgtcagttatgtgatggctactgttacaatggtggcacatgccagctggaccccgagacaaatgtacctgtgtgtctgtgagtatttaatcaagtcatgggcatcttataataagcctttgtatgtacatgaaatccctgttctattattctccttttctggggtaattttaaatgagtgtttcatggacatctctgatcaagtattgtccctcatcagctcatgtgctgcagaatctcctttcatcaaattgctaatgatttcatgaggaagagctcattctgttctcagcatcgtaccatttcagacatgcatagacctttgaacttgcaaatgccagagaaaattgttataattttattgacctgattctgatatgtgaagcccagagataatcatcttttatgaatactttggtacttatggccattttttttcacaagaacttgtaatattctttcatatgtataatgctagttgatgtttgtatgagacttagactgttttattatgtaaacctattaagcccctggctcctttagaataacttgagtgtctgagtttctcaacacctaggaaacgtattgggtatattcacagtactcctgagaaaatctggaatttagtattttcccccctccatgatctgattgtccagagtggacaatttgaaataaaattattcagattacatggtcactgttgtgagtttcatcactgtttgaccaaaaggatgatgcccacatataacccacatctgcatcctgctcccgaccttgtcagagtagcatgtgatgagtgtgtttgagagagaagtgcgcatatctgggaaccttttcgtttgaatgttactatctctgtatgaaatgaatttaaaacatatttggcaaaacaagtcagacgctttatttagctgtattttactgaaattctgcagatgctctgtggggtttaaaagtcagcgctgtgaccagaaagagaacccttgtgatcactactgtcagaatgaggggatttgcactttaactgcgtttaatgagccgagatgcaagtaggtttaaacttccacttatcgctgcgcttcgtgtgacatcatttcaggccacagttcattggtttaaatcatgaacatccacatgcatttcacagagtatacttaatctcggggctcatctgtgtcatacacacttaacctttgcttcactcaccaacaagtgtgtgcaccacagactgctagagtgtccagaaatataacagagaaaatgaaaaagcttgtggaactgtctaataaaaatacatttgctagaaaatagtagcttttaattagagaagtacagaagcaggtgttttaagagtacttccatatgctatatttggaataatttttatttagtaactgacttttgatttcaagcacagatgaagcgctctattttgtttcccaaaattttaccgagaactgccctaccttcatcagtaagacctctttatagatgaaagatcttagagtaagaccttttttacagtctgaaaaatttccagaaattttatttcttaatagtttaagtcattctttcttgattcagtttgtggtgttttgaacatatatgcaatagtaaactcatatctcctctgagaaatttccaggatcacctttagggtaactgtcaatgttcatgacaatggaaattatttttgcattgtgcatttgagctttagagatcgatcacatctggcatatactccttaataaccagtgtcataatgagtagccctgattggaatctgataacttctggtaatctcaaagtgcctaatagtggttttaaagcacagttgtattaaaattcagatattttattaccaaaatgctactattttattcataatgagttgctgagacttgaggcagaggcttgagctgaaggagttttgttgtgaaggtgatacttgttggcatgtaaaggaaagtcttgcagatcacctacagggactctacatcaaaaggtttgaccacacttcaagtaacaagtgatgagggcttgaacttgggcattgcaaccagagaaaagaatgaagagaacaatagattcattaacatttcagagttagtatacctaaggttctccttgaccaaaaatggattcaggtacctattttatttctattttagaacaccagtaaggcttctcctgaatcccagtcttcatttgtcctgcccctgtctcactaattctgggcaaaatatatccatttcaggcccacctttcccacccataaataggtctcaggaggactccctgtgcagagaatgtacctgtattaccagaataaaaatctctcatgggtgtagcagcccacgttgatttttttttccactttttgctcttaccaagtatcatcaaaatcatacaatttaaaaatgataattggcctatctgataaacacaaccaggaaaaaatatgttaattgtggtagtttagagcaacctctcctacttttgtgtacttatgtctctatctctgtttgtatgtggctctttagaaatgtgtgtaccttggtcttctatgccttaaaatctattttgatagtgggcataatgtgtatacaatcagccctctatatccccacactccacattcgtgggttcaaccaagtgcaaatcagaagtatttggaaataaaaattgtgtctgtgctgaccccgtacagacttttctcaagtttgtacaggctcagcacggacacaatttttctgtacagacttttcccaagtcgttattctctaaacaatacagtaaaacaactatttacatagcatttacattgtgttaggtattataaataatctggagatgatttaaaaatataggggagggtgtgcatagcttatatgcaaacacaatgccatattttttatctgggacttgagcatctaaggattttggtatcctaggaaagtcttggaaccagttccccacagatactgaagatgactatactgcattcctcacccagttaaaccatataagaagcaaggaagaattacgctgttattgtttattcatcaattcctttactaaatatttagtaataatctgagtctctataaatttttgaagacaattaattaatagcagctaaaactgacctaataaatactctgtaccacttactgtgttaaacccttcacatattttatgtgtgaagttagactgttacacataagtagtattattatctaattgttattcccttttcatagattacaacattaaggtcacacactaggaaggggtggatgtctgagactcagaccagtcctgttcaattctaaagtgcgtaccctggttataactcttacactgcattgcagtctttatgctgtaacaacctcaagagtttttactttagaggaacttaaaattcattttaggaagatgaatggcttttagaaaattaaaatatcatttgctaattattataatagaaatacaaccaaagtgctctgggaaaacaattaaatagagatcaatgaatgattcctgtgggagagtgggaggctttatacgtgaagagacatgttcacagtatttttagaaaacatattgtagttttataggaaagaaagggttgaacatcttttttcaaaagagggtacagcacaatcaaaggagaataggtctaaaaataaaaggccaaggtagctgagaatagaaaaaggttatatgcacaacaggagaagagaaggctaaagagatatattggggacagtttattaggtacattttataccatgacacaagagtgggtttatagaaagaggattaggaaatgaaggttggaaccctcagaaataccactatttgggtactatctcaagcaggaatcaacaaaagtaaatgagaagatttagaagttgagggagatttactgaagagtagattcctacaaatcaaaggagtagagtgccaatgagtatcaactccagacagttcaaagaggacaagtgttataagtggtttattggatttctcagttaggtggccattgtgaaagatgttttggaagcactatagagatagaaaccagactacagttaattaatcaaaaggagaagaagtagagaaaaatgtagattcttttctgaaaacttggttatgaattaaacaaaaaaaaacagtaagtaggatctagaggaaaatatttttatgacaagaaagactaatgtatttaagaagactattttgcactattcaaggcctgctattagggcctgggaaggagagagagatggttcaggaggatttcacagtcatgttcctcagatttgaagtttccagaatatgtaagattatgcttgttttacctaggatatttataaatcacatggtactaaaatgtaaatgactataagtaaaattaaaaataaagtgtcaatgatccctggacaataaaaaagtccagctaagggaacatgaaaccctcagaatatctttctagtggtcaattctcctcaccagaggagacttttggaaatagtttttagtcacggatctcaattggcagtggtcatgtattgttaatgaaaagtaagtatgtactatttcatctaaaaacatttacaggaaacagacattgctttcagagatacagtatagtgcttgctttatttttgttggtaatatatttttattttcttcatagagtgaaaaactatttgaactgtgcaaaacttatgcacttttggactatctatatagtatccagatctatgaaggtgacagttttttccacatagaaatgttattactgtagccttcaatttaaggaataaatttgttccttgaaaggattcacttttgtctcttgatggccatttttacttataactatgtgtggaataaacagaaaatgccaacagaagcctaggaaaaagaacaaaaactagatttttttgcatttatttgggggacatttttacatttattaaagtagatacattgaataatattaaaacaatgtttttttaaaaaaatctaatgtgttattttgacagtgtttgtactattaaatacgttttattgtaagctatagaaatcactactactgtgaagaattattgagctcaatagtaagttgaccaagccttcctacctgctaagattttttccctagtgttagactattatttacattgaatttaagggttttttttgtaaacttacatccccagcattacttctcagcaatatccacaatagatttcatgctcaaaataaagaaatgtaattaccctacctgccccactactactattctattaacatgaacacaggcacacacacacatatactcactgcataacacagcaccattccacacctaggtgtctgtgggtcaaatagctcactgaacccaaatgtgtcttcttcctttttttctagttaactcttattatctcattaatctcaactcaggtatccctgtgtgtggcacatagatatagtaaatattgattgaattggacttaacatctcaaactaaataaattaaatttcagtgggaaaattatatacacacacacacacacacacacacacacacacacacacatatatagacaatttttttttttgtcattttatgggctgaattctgcctccctctccctgaattcatatgttgaagacctgatacccagtatcttggaatgggactgtatttggagatagggcctttaaagaggtgattgagtttcaaatggctgggtatggtggctcacgcctgtaatcccagcactttgggatgccgaggtgggcggatcacttgaggttagtagttgaagattagcctggctaacatagttcaagactagcctggccaacgtggtgaaaccccatccccactaaaaatacaaaagttagccaggtgtgatggcacatgcctgtagtcccagctacttgggaggctaaggcaggagaatgacttgaacccgggaggcagaggttgcagtgagctgagactgcgccattgcactccagcctgagtgacacagcaagactgtttcaaaaaaaataaacaaaccaaaaaaacaaaacaaaaaaaggtttcattatggtgatcccgaatccaatctgactggtgtctttgtaagaagggtgataagaacagagagggaagtatcagacacattgtacacacagtgatggccatgtgaatgaacagacaatgtgaaggcagctatctgtaagccaagaagagaggcgtgagaagagaccaaaatgtgctgatgcctcaatccccaatttccagcctttaagaagataaacttgttgtgtaagccacccatttgttgtggattttatggcagccatagcaaactaatgaatatttcgataccagaattgtggtgctgctgtaacaaatacctaaaaaggtgactgtggctttggagttgggtaatgggtagaagatggcagaatgttgagggacacgtgaaaaaaaaaaaaggcctcaattactttgaagagattattggtagaaacatggatgttaacgttatttctggtgaggtctcagatagaaaggaggcacatgtttttggaaactagaggaaaggtgatctttgttataaggtgacaaagagctccactgaactctgttctgtctagtgttttgtggaaggtagaaactgcaagcgattaatcttacatttagcagagactatgcgaaatgttgaagtcatggcctggtttctccttgctgctgatagtaaacagtgagaggggaaagataaattgaaggaattgttaagcgaaattgaagatttggaaaattctcagcctcgccatgttgaaaaataagtagaaaataggttctgaagaagaaatcaagggtatggctgaaaagtcatttgctataaaggattatgggtgtggctcatggattcaaccacctgagtataactgctgccatttgtactaaaggggtcagagacagggcaaaataaaggaagactgctggatttttgatgcatcaccagatgcagtttggctggaagatccacgggtggccagtctattaagaacatattttcagaccaggcgtggtggctcatgcctgtaaccccagcactttgggatacctaggtaggtggatcacttgagctcaggagttcgggcccagcctgaggaaaatggcaaaagttggtccatctctaccaaaattaaccaggcatggtggtgtgcgcctgtggttctagctacttgggagactgacctgggaggatcacctgagccggagaagttgaggctgcagtgagctgtgattgcttcactgcatttcagcctgggcaatgttgtctcaaaaagaaaacaaacaaataaacaaacatatttttatcggttttcgcacatttccatagcccctttttgtttatatatcctccacagcacagcaaccactcctcttgcagactgctaccactgaggactagggagatattgaaatgtactaataaacttctcctggatgtaaatcaccagtgcttgggcattcacaaagggacatagtagaggagagtgaggaggtcagggactccccccctttagaagtattcctcttgttttctggatttcgaatgcatatttacatttattattctgctcacatcagtctcctatcttgacaacactagagggacccatttattgtccagtatcttcactatcaaaggtgagccagacagtaaagaagttctgttgattccacaagaagaaacattaacaggaaagaacacaagttctggattcagacttccctggattcacatacatattcgtccattactgttggtgtagcctattagcctctccaaaccttagtttcttcctctttaagatgatgatactagtatgtacatataaaaacttccatgggaaagaaatgctatgtggggacagataaaattagtcttaaaatctgtgctttgtggcactaggtcttttttatttctgtgtgactttgactattattaaaactagcttttatttttaaattttgaaggtgtaccactgtgatatatggtgttattaaggtaacttgttggagtttccctgggcattccatactctagcttctattttcccaagaagctcctggctaaagtttcggcattgtagtcaagtagcaaatatttgaaagtccatatttttgtacatatttcattttcttctgatctttttttttaatagtaattcttctgagaaattagtaaaggttctctatatacctaaggatacctaactcaattctttctccatttgaacagagaataatataaagtatttcctctcataattaaaaaacaaacttttcaaatccagtattaaattcaccttccttattttattatttatgagaccacagacttttttagaaataaaaaatcagcaattctgagaatttcttacaatatccacatttcctagtattatctactgttattttggtttccgttcagttccttcatgtaaatatacttttgcagattattatatactaaaaaatgagaccctatgatacactcttatgtttatttactatatattacaaacagcattgcatgttaatttgtataattaaatgcttttagttttaatgggtgcccagtgttccattatctgaattttctctactttaaccaacaccgttggttattcaacggtgttaataattaggttattcaacctaattattaataattcaataattaggtgtgtttatttgttcatacttcactattttttctaggatataaacttctgtaaatttacataaatgccttggtcctcatatcattaattttctgaaactaacactaagaattagaaatattatatccaatgttatagattcaagctcactgtctctttgggcaagttacatcccctctgtgtgtcccatttcccttgtctgtaaaataatggatttggactagttgttcactagaatagtataaaactatgaggttcatatatttaaatgtgagttatatttggactttgttgagaaatggtttcagcttgggccagaatcacagtcccagatacaaatttttccaaaatttctctaaaatacttatgtagacactgaaaagacaaagattgttactagcaaccaaaataatgagtaacagaaaacctattgttaacactgttaacatctcctttctttcatcatatatattatatatatatacacacacatatatatatatctcaccaacattctcttatatccactcatcaacagatatttactgaccaactactatataccagacactgtcctattcactagaggccatatcagtgaacaaaacagacaaaaaaaaattggctttgtggaacttcatgtctaagagggtggagacagaaaataaagaaaataaatgtttacgacattattaagtatgttaaaaatgttaaaagctgttaagagaaaaccagagcagaaaagagggatatggaattttgaggggagatttgaaatctgatattagtattgccagtgaaagccttcctgagatgatggtatttgcgtaaagaccttaagtaaatgtgggaatgggccatctggctatatagggaaagggattttcatcccagaaacaaataaaaaaacaataaatacaaaattaggaatagttgccacaaagttgtggctaatgtaatatatataaagcatatgacccaatcttataaaaggtatatatgcacgcatatacatatattaatatatacacatatataatgacaaatgtgtatatatctatatataatacacatgtacatacacagagaaaagtattaaaggcagtacaacaaaatggtaacaatgacatctcttattgctggaatttgggtaatgtttaatttgtacagataatttttaaatactattctcttttaaaaacagaagaaaatacaacattttaaaattatttgaaatgtcagaaaagggaaaactcaaaagacctaactttaatattacattgcttctgaaatcacatcagttcagacactcagtgtttttgaaatggcaggatggcaaaactccaggacactccttataatatatattattgcttcttgcccatagcaagaacaattctccatgtggtcacaaacaagatagcaatgttagtttttatgttttacttcttcattcgaaacaaacactaaaaataacttgctgtgagcattttgcctgcatcttttatttatttatttttgtttagatttatatgggcatctgttttttgtttatctttttggggaaaatggttcttcataaaatcatctcctttccttcatcatctgtgtgtgtgggggcagggcatattggtttttacatttatcacattactctatgatattccatatttcatggctacaattgacctctccctctgtgtatggcctttggacatgaaacatttttatgaaattggcctgggaatgctgcctgttctattcccatggcttctttaaatttatatgtctgtttctctccagcaggttgtaaatttcttcaaataagaggttatgtctgatttatgtattttaccccaatgggtcgcatgtattctccatgtaatatgttcttaatgaatattgttaaatcattactgtgttagttcctgtattgtattatggagtacggcagcttatgatacacttatcattctatcataattataacagcacatcttccttcattaataaattttcaaagaatggagagtcagaaaataatagaaaaatgatttattttactatgattctcaatcggctttctcatctctatgatactttctaaaactgttatatgatgtttcttgagttttctggaactcacactaaatatctgtaagtcaagaactagacaggcttaatacaccgtcttaacttactagaaaaacttgatttatttcattttctcttctctttgccttttgtttgttgtatgtttttactttgtgattgtctctcaaaaatagatggagaataagaggaaagtcaggtatatcccccgtcctttgaagcctctgagtctatttaaggaaaaagatgaggcaaggagaaatacagcctgtgcttcaggcatttgagtggtgtaagataaatggtgctggtgaaatagtatttgacaataacattagaccatgaaataattctcaggaatatggtatgcttagctagagtttgaaattcattctatagcagtaggggaacactgataacatttgaaatatgaagtgtcacagctatatgtatgtcttagaaaagtcttaatgacatagtcatctgatagaaaaagttcccataggtttgaaaaaatagatttcttaatgacttctaatttgcaatgtaaaggaagacaaagatttttcaattaaaaaatggttagtgggtttaatggtaaacaaggcacaaaaaacagtatagaggaccgtctacgctgtcaggactccacattgttttgtttgctcaattgttcttctctgaacctcttttctcatcttaatacggaaattgctaatgacatctgtctctttagattgttttgaggattaaaaatgtaatatatataaagaacacagaatattgtcttcaacatagtaaacccagaaaatgaaaattttaaagccattgcaatagacgagaaacacaataatcagaacttgctataatttgaacttctaggggtccaacaataaaaaagagtatttttaaaaagtgcttgttattgaaaattaggtaaattttggcataaacgaaaggttagtagtgcaatgacagtgacagtaatagcgactgggaagggggctacaatatgtaaagccagctcaagttctatttagggtgtcctccctcaattaccttagaaaacatgggcaggaagtagatcttataaacatttttagggtggattttttttttttaaggcagaaggattcaaggtgaatatgtaagtaccacagggacattcatttagagagtgatctgagttaagcactttgtcatattcttcagttttgtgattgttccaatctaattattttattaagtgttcagcattattttccaagtccttagggtgagtaatacataagaaaatgcacaggtattggagaagcctttgttgcaacacgtttgggaggaagataatgagttctgtttctgtcacaaggtttagaaaggtaggaattattcctctacattgtgatggctaattatggctttggttcctcaaaacattggccttgtagaaaggaggctggctgcacaatttgctcttcactggtcctgctgtcaggctgagcagcactcctccacatggaccagtgaccttgtggtcccttagagaatgcttaagaagagcctaaggaagttgtcatgagtgatttcaaacagaccacaacttttcggcagggatattgagcaattcaacttcagcatccagtgttgtccacatttcaaaagtcaggacattgtatgtccctgatttgctttctcccccttgttatattttcaaagaacaaaatctgaaatgtgcatgtcttttggagcagtaaagtccgagaaaaactgtcacatcaatgtctatcctttatgattctaggtaagaggtcgtaggttactttagctttcaccatgccagtcatgccacggggaacaaaaggaacacatatcatatttttctgtccaagtttaaactctagtttgtgcttcgaggtacaagtggcactgcttaataaagaacaattacgtagttgtgtattgggcagctattatcaagcagctctgatgtaatcatgttattttcccttgattttgggacatattcttggtcttaaatataatcactaggtaagaataaccaaataaaccaaacccaatacattatatattatttgtataactcttaactgtttatccatttattttgtctttattagacctcttttcttagattgtactgctataaaccacctcatatttcagatgtttataacaacaaaggtttattttatgctcatgttctgtgcttaaacaagtcaataaaactagattaattaaacttcaacctagcacttgatcccaaattaactttatacaattcctagacaagaattagactcatatgcttaccagcaaaatttgcttaagaataaaaaatagattaataattgctgatattatcatcatattaggatggtagcagaaaaagccatcatgttaaaggagtagaaaaacttaagcctatttttttctgttgggaataaaatcagacattataattatattgatattggtatgccatatacactttttaaatttaatattcataatattatttatcagccgagttaaactaactcagatgatacaaattttatgtaaattttatctcttaatctctcaaaaaacctgcaaaaaaatttttttgctgagttttattgccttacaaaaagaaaaagaagggttgggcgcggtggctcacacctgtaatcccagcactttgggaagctgaggcaggcggatcacaaggtcaagagattgagaccatcctagccaacatgctgaaaccccatctctactaagaatacaaaaattagccgggcttggtggtgcacgcctgtagtcccagctactcaggagtctgaggcaggagaattgcttgaacctgggaggcagaggttgcagtgagctgagatcgcgccactgcactccagcctgacgacaaagcaagactctgtcttaaaaaaaaaaaaaaaaaaaaaaaaaaaaaaaaaaaaaaggaaggaaaaaagagaaaagaaaaccataaaaccatacaaaatagaaaaattaaaactgtaaaagaagagagatttaagggggagactaaggttaaaacgtaagaggctagatctgagtgcaatgtgtgatgcacacaggaagtattactctcccttgttatgagaaatgagtaatctgaaacgaggtgacttgcttgaagataatctttgtaaggagaggagcctagatttcaacccaggcctggctaattccaaaacttgcatacggtatttgtgtcatccatactagcacttaaatttaaaataatcatttatttaagtgaattgatggaattaaattacatttaattgtatatttgttttttacataaaattgtttttcacattaaagtatccatcaagcaaatacctctgtaattaaatttttgttatcctgggacaagaactgaatgatacacaatttacatacgcccaagtactagaatgtaatcatctcatttagaaatggaagaattaatgaattaaagaataagtgaatgaaagaaagaaggaataaaatttaacaacttattttctctggtcttatatgtaaaaagtttcccatagtggattaatgttcctttcagtgagaaatgactgattgataattaggtgaaagcatgttcttatgaatgatgctatacattctttgcagaatagggaatgcacacatatatgagacctctgtatatgtatgtgcattcctatgtattcaactatgcctcttccatgttttcatgcattcatctattcatttgtcaaacagcaagtacactgatcagcaaaatatatctattgagtatttactggatactgttcaagaaatgagggaagacaaagatgaataatcaataatctctgcctttagttaaatcatagtctagcatagtcataggcaaaggtgcctttagatatttatgaatgcatatataagtagagaaataaaaaatatagtatatttgtgttgtacagtgatcaaatatgtaaagatatttatgactcaccccaaatagtagtattctctgtaatgtaaaatactactgtaatattttatagcattttagatttagtgaagacatttgtctctacctcctgaatcaattttttgggcattgtctgcttaaaccttctcactttgggtctaggaaaagtaatctaacactgggattaggaaagaaatgtgtgtgaatgggtaattttgtcataagctttcagaaatttctgtctgcaacatcttcctataaatgttaaacaaatctggtaagagttttatgactaattaacatttatgtaagatagacaaatttgttaattcatactgaagcttgatttaaacaaatctttctcattttatctcagtttatttcaatttttgattgcattatttttaaacaattacaaattttaaacatattttgagagtgtagtttctagattttgaagaaagctaaatgctagtaaatggttagttgaaatttacactaacacaacgtcccaagaaagctttggtgttgcattttggtcgctatgtagaaatcattaagaaatcttggggccaggcacggtggggtggctcactcctgtaatcccagcactttcagaggccaaggcgggaggatcacgaggtcaggagtttgagaccagcctgaccaacatggtgaaaccccacctctactaaaattacaaacatcagccgggtgtggtggcaagtgcctgtaatccctgatactcagggagctgaggcaggagaattgcttgaacccagaaggtggaggttgcagtgagccgagatcataccactgaactccagcctgggcaacagagcaagactccatctcaaaacaaaacaaaacaaacaaacaaaacaaacaaacaaacaaaaaacaaaaaaagaaatcttggaactagaacaaggactatgctgaagtaccagatatctgatcaccgtttgtatgtcttattcatttcccaatgtttcagactttaaaatattcaagtagctaacatcagtatttcagcacatgagcattggaactgaaagtgaattgaatattttcagagaatcagagttacattttgcactaattaagacattcacatactcaaaaccttgtaataacacctcctgatatgctactattgccctaaatttgtatagaataaatatatgtcgaatagtgcttttattaaagcagttattaaactgctttattttaaagtgcagttattaacctgcagttgaatatgccagacatcgcctttataatttcaagtctcataaccctgtacctctgagaccctaagaaataggaagggcctttgttgggtttttgtagaagaaatctttattgtttactctcactttgagctaaaacataagatatttaggtagcaagctagctaccttatctgtatggcactaagcattgagatttccccccatggctttgtatttttaaaccaattttggaactggccttcatcttgggagctttccactagtattgcagcacacattccacttttcttcccacctttagctctagaattgtaaccagtgtgtctaatgtaatggcctacttttatgtcttcaattacatccaccatattacttaatattaattttatgatagttcgttttccttttcagttgatgcatgtaatgtattcagttaaatagaaattgtcttctcactcagaaaaatacctgtatcttcctcatcagctttcagtaaaattttctctggactatctagatgataaacattttccatctctggacatattttttaaatatatatttagtcatcgtttaacacttcagtgaccacttctactcaagtggactgcacaacattttatgtttaaacatttctaacttaaatcactcaaacttaacaaacttccttttatgaatcatttgttggtaaactaaattttatcttcttttatgtttctcctccattcttaaaaattactttaaataatccattttattaattttatttctttcatggccacctcttcaatagaaacttctcattaatttttaccgtttcctaaattaattagttcaataaacactttattgaatatgtcatttctctttttactttaccacattaacacttctcagaaatcaaaaactctttctgatcaaattttctcagtattacaatttagttttgacttactgatcttatcagtattagttaacaaatgtttactgtcatagtttaaaactaggcattttagtgtattatagagttgaatcaagtaaatttattacaacagacataaatttaagatgctactttaagctatctgaataaagaatgcaaagtaacacctagctattctcatagaaaacattaacagtcaaatttggattgagaacagtattgaataaatagaaattatagtaccaaagtatttattgaaaaataccaaatgaatgaaatatatggtaacttgctgtagacgttcaaaattgtatgaattgagacataagggtatatttgtttatacattttagatgaatttataaatgatagatctttaaagatatattagatacatctacagtattttggaacaccacaaatgtgatgttgatttcaagaagattaatatgtccctcactgtcgcagacagggacagattattgggcacagctgaccacaggtccaaggcagtgtgataattcttacacttttacaacggaaaaaaattgcatttatttgcatttgtttaaataatatttttacatttaaattagagcctggtactctcctgggcatgagaaagaaaggaaaagcatttcttcctacttctgtattgaattaaaaggatcatggcattgtcatctaaaacaatgattaaataatagtgccatattttatttctaccacttattagttccgcttctgtgggcagattatttgaacatgtgcgtcctcgttttatacagtgtataatgcctactcataggattcttatagaagttagatatgagtacatttttatatgaaagtacctatactaggatctagcacaaagtttagtgttaactgaacctcatgtaacatttcatgtaaaagttgagatagaaaatttttgaagcatgttataaaaattaggaatccttatgtacacatgaaataatttcatctaagacttttaaaattacctaattttatctattgttacaaaaaaataacagatggaaaggctttaaagtaaaattaagcagatgaataaatatctaagtatctgtcccaaaatgctaggttttttttctgtttttttttgttttttgggtttttttttttttttttttttttttttgcatcttgtcatgctactatctgcaagggaagtgagtataaaagactcaggggatacatggagtgtagacctttcaagtgagaaatattatataaatgtagttttatatgctcaccaccaaaagagtgtaatttgatgagttaaccagaaaaaaagtattttgcaagtaactttgtgtttttctgattttcttcactatactgattttcttcaccattatgcaaaatccttttgcataaactgatgcataacctgtaatcatatacttttatttttattgaatgagattttaagggcactgagacatgcatgacaccatgcacaatttttccaaggcttctttaatccctttgtgccacttatttttttcctgtgtagagaaagaaaggggtatattaaaagatttttctttctgaatgcctccatcatcatggttaataagggcaaccttgcacatacgtataagaggataaattcaattttaaattgctttaaggttcacctttgaatttcactgtggtcagaagaatcccatgacctttaaatttgatgaaaagaaagagcagatattaatctcattattttattttgaagtcctcccaaagtgggtgactctagaccacatttctgcaaaatgacaagagcagttcatatacattgatcattgttacgggaaggacaatatctgaagattttaatataccttcagttttttatatctcattttaattctctttgtaataattactatttcagagttattattttagacggtttatatgtcttacagttatgctactaaatgtaataactttcattttaaagattatagtttgtccccttataaaagccaaacttattttgatattctaaaagcgcttactgtgcttcctagtaatatttgtacactctagcttttatacgaagttattcccctatgctacagaaaattataattgaaacaaaacattatagctatacaataactgcacaaactgctcagggagacgataaattaactcaccatgtgtttcatgcagtaacattcagatgagaattaattacaaaaaataaataaataaataagcatactccaggtattgtgtagggaacttctacgtagcttattttatcttttgagcgatcatgctgggcttgtatattattattctcatcctcacaataagacattgaatgatatttgttataagaacaaagcctgtaagaatataataataacaatgtatctcgaatatttcttgaagtgtgacttgtgaattatttacatcagattcaccttgttgaaatgaagaatgctgaccacaatcccaagttacttgaattctctgatatatggggccccagaatctgaattttaacatttctcatttttcataatcattattctagtctggaacataaagggaataccataaaatgtgctgtaattaagagcacttatacatacaactgttatggaaatggaagaataagattaaggaaacaatttagcattaaataatgctaggaaaaaaaaaaagaagtcaaagaatgttaaatcaataccctttaccatgcagctattgacagcaggaaactgctaagagcagtaccttcatttgatgatgtaaataaagaaggataaataattatttgaatagtcaataagtatctgtttatctacctacctacctgtctatctgtctatccatccatctgttcctgatccaatgatacttggttaaaattcatggaattgtttaaaacgttaaataatttacagttgtatagtaatcagcacataagataaagctgatttttatggtcctaagactaagggcagtgggaaacgtctgcaattttaacatgaatgatacagagctgtttgctacggtgagacaaaacaaaacaaaaacaagaaaagattgcctagcagggttgtgcagggctaacttgaagataattgtccccggatgaatagcagagaatagtggattgcaatagtacagattaaagatgaccagcacatggaatatggattttgcttgaggaataataaaaaagagatagatgccagagaaattatagtcagcatggttatgcaaataattcagcggggaattggacaggagattttgatgatctgcacaaattttatttcttaaatgctctgccattaatggctttgatcattgtagtctacttaaagtatgaagatttatgcattgctataaagatgacaaaaatacctggtcttaaatcaaccactggaagaacttgtggagcagcaaatgccttaagttataattttgtaaggtaggcaaacaagaataatgatttctatttaataactcaaaagagatgttttaagaccaagacaaatgcagaacagtggaacatattttatctttggccataaaacattattttataaggagtataaggagaatggtaaagtgatcatcagcacattaagatgtataactgttaaaattatttctccagtacagtctttgagttttttccaatatataataagtaaaatagtctgtaaagattatgaatttaaatgggctcccacaatttaaaagaggagaggattatgaccactagcaggtgacttcttttatctatcataaatactggaccctaagccatggataaattaggaaattataccataatattaacaaatacctgtcctacttaaataattctagagtttggaattagaatcccactatccttatcttcttcatttaaaaatctctttctgctaatctggagatctcaaaatataattactttataaattattaaaaatacatgatgttcatgtcagaaccataatatgattaagtagcatttaatcttctaattctcaagcaattccactttctgacttcaaatcttttccgaaagtgtaataatgagtcccagaggttcttttttcagtaacacaataaaatatgccttgggtcacttatctaagatgaacctgatttagttttttttttcttttaaatgagataatgtataaagcaaattttgatattttaatcaataattcaaaataattgcacacatgtagacttgtacacaacagctattaatacataatgaaataactaagcagtcaggattagtttttcagtggagcatatgacatattctcgggggtaaattagaaaaatttggcagatgtaaagctacataacacaaaaagcatttcacaatcattagaattcactccaagaacatgtttgcaaaatgttcccaaatatattattttgaactacccgtggactgtgtcaatgattacaatatgtgaagaattggaacatttttctagatcattcatctgcaaataccacaaattaaaaagaaaaaacaaacacaatgattttatttgttgttcactttattctaatgatttgaaaatatccctatttcattacctaactctattaatacagacaagagtcgtagacttggccttatgcatttatctgtgttaatgatttacttgtattatggtttataataaacatgatgtatagaaaattatataatgtgttagctttttatgatgtaacaaaagttgagctaatgtatgagtgatgccctgaatcataatataatgatattaattttcatttaaatcatgctccatattcatagttttaaatttatcatttattaattaaataactcttatctaatagtgtccttattgccaattgtgttcaagtctatatatgcttctttgaaacatattttcatgtttattatttgactttgtcagtaataatgattttatgagaatttgcccatgttttaggacagccaatactgattttacgactatcacaaataattcgtatagcatcgtagaagcttagctcaggaagcagcctcagatatcaaaattggctatgcccgaattggcagagacactgaaattgcagttatttagtttggcccaccatgcccagagttccacttggaatggctctggaagctgtttttttattgtgtacaactattcttgatatggtggtatttgacagtcattttaactacgaactgaagccaattaaattgtttctctgtggatttcctgtgacagatgcacaaaggcatcttatgttagccaatagaccttgtttaaacacaactaaaactgttccagcatttatttttatgcaaccagctaatttcatagttgcactttatgtttaaataatggcttttaatcagatctattattcttgtcttttacttcttatcatagtgttatagtacttacatgggaaaaacaacttctcccaataaaaacttgggcacattctcttgacttcatagtaatagaagtatgatttaaaatgggaaagctctgtattttgttatctctgcttaggagagtaaaaactccacagcttgaactataagacagatgactatttgctgtttggtagttagttccactctggacttagaacaaccagaaaaagacacagatacttacagaaggatttgcttaatatgcaaactcaatttttgtaagtggccacttgtaattttccataactctcaaatcaatttccaattcttaatcaagatttcaatatcgctataaaatgtgccaattttaacacagaataagtaaaatgtctataaatctacattttaaaaagtattttaacaaaggaagtccaatgaaagttacactcagcatactaacaatatgcaagagatcatcagaaatctctatgtaatatttatgaatttgtgatgactggctcctgtaacctttcatttggttaaagttactacattagctgacttctgggctttgttattcgctgatctgttttgtttgttgtttggatatttttagatgctccaccaactggtcaggcacacagtgtgaaaggccagccccaaagagcagcaagtctgatcatatcagcacaagtaagtttctcagattaatattttgggtaatctacactgtatataaatcattgttatgtcattattgagtgagatgagtcttagaacactttcttcatggaattttataagagatccactgcaattgaggtgtttttgaaagaggaagcactgagctttcatctaattacaggatccagtgtgtacattttcttttaggctgggagagtttatcccaaatttggggagttttcagaatgcacatctgctaacctagcataagcttttctttggaaatattcatcagctgaaaaagtcgcagatatcacaatggatgtgaaaatgctccaggaagaaaaataattccatgttttaattagagcaaagtgtattgtcttggaatgcatttcaatgtgtcttggggggagaaagacagactttattggttagtctgaaagagaagcaagttaacaagcaattcttaataaagatataagttgatttattgcttctttatctttaaagtattggttttgaagtatattaaaatatagatcaacatttttgcaaatttttttttgtgcagccatagtcttagggtcacttgtgtctatatcatcgttgtgggtctatatcatcgttgtgtgtctgtgtacagtttctgacaacctgaaatgatgttataaagtttttcaaaataaaagtctgaaataaagtttgccagttcacacatgttgtcattaatttgaccatgagtgaaaaacctttgaaaaatttgtattgtctattgggtgtaaataaacttgcaaagaaaaaataacatccttgatggaagattgcttaccttagcaatttttccctagtcctttactgctggtgacaaggatttcataaaaacaagcaaaaagcatagtgtttcagagttagtgaaaaaggagagagactattaaagtataaaatataacatttttgtaccctagaagcaggcttcccatctctgctgacattcctgtttgttgtctctgcccccagacagtttcgatatcattgtccaatttttcctaatttagagattaatttgggtttattaataagcctaggcatctttgaaaaatggaaaataggtctagaatagacagtctgggcatgaatatttaaatttggataggtgaggtgagtgatttttggttatggaacattttgagttgatcttagaatttgtgtgctctccttaggtcagggaagggtgaggccatagggaagctatgagcatataattgtaggaataggacactgggatttggggaattggttgataaaaggttaacagtggcaaaatgtgtcttgcctaatttgatatgcaaaagaaaaagaaaaaatactttatctctcttcccaagatttagggctcaaactaatgctaccagtaataactctggaggcatattaatttatatatgattttataaactatttgcaaaactcaacaatcgttaaaagcattaataaaaaaatgcatttgaagttatcaagctgtagaacatgctccatttataaattaggaattaaaaagatattttagcctttttaatggtagtttctcaatgatcgaatataaagaaaacagcctttttagagcatcaaaaacaatttaaaaaattttttaaaactctgacaagaaatagcatagactgtgtatgaaatttggaaattttgtatacgctccatccacaaagggaaagtttggtgtttggaaaatggtttggagctggaatgctccaggtgttcccgttagagagtggggtctccaacgatttgtatgggcaaatgtaagaaactggttttaattacatgcaacagttctaaagtaaagaacatcaaataggggaaagagttgcaaatagttgtaaccctttccaatgattctgaagctctttctcccatcactaatttaaagtcatgaaatttaatagaactatcaatgcattttgaaagggctattagctacatatatgtcaaattatcacaaacttgatcaaagttgaccaaataatgactctattagatgcttattatcagacatttatgcttcgagaaacttgcctcagtagctctgaaagaagggaaaaggtagttaaactgacctttcccatgaaagaggattacttttattattttgggtaaaatctagtggttttgaatgattgtcaaaccttccccaaacttgagcagaagtcgtctgcccaataagaacgatgaaactttaggaatgtgttttcaaatctgcatttctatcatcagtggacctctgttggcatagtccagaatacactgcctctgtctgcctaattactatcaatttatacagagatttacttttctgatttgtacatggccttcataatcatctctgaatagtggtagtgatgttcaccggcttttgatgtttaaagtatctaaaagcagcttgtggaattaggcagatctattatctagggctttgtgctcaggttccattttaaaaatctagtctgactcttctgaagatattttgaagagttttaaactcagcataataaaatattcattgcatacttctattttaaatttacataaaattttaaaatttacataaaattgagcattgaatgatcagtgtttcaattatgttatttgttgtatccgctgaaattatgaaagacaaaaatatactcagcattggtggtgcagtaatgtagagatgctgtattttactatagtgacaataggggcaagatatctgttagggggtcattgtatctcttttgctactttgtctttatcattttgtatcatccattatgttttaatacagaaaaaaactggttatattataccaggaattataaatctgcaaatatagagatgtaactgaaaaacacaacaaaataatgttttatttccatttctcccaaagcaaaggtttatcaagtctctgctaagtgtcaagtactgcactagatcccagaggcaggtcagtgaggaaggcagacagtgcttcttctcatgaagctgaggttctaatggagtaaacagcaataaaacaaggaagtaaataaaaaaggaaatattcaaatgtataaagtaattgtgagttttgattggtccgtgaaggaagcaaaaacaaaaaagataaaaagggcaaagatagagaatgtcacaggaaaagtgaggccaggagtgttttctctgaggtggtgatacttcagctgagacttgaggctcaaggtacaagaataaagaacagcaggtacaacaaccgtggagcaagaaagagttagacatgtccagcagactgaaagaagaccagtgtgctggtatcaagagaacaagggggagagtggtacaaagtgaagttagagatacaggaccaaggtgataggcagcctcttgaagaccactggaaggatcacctttactaagttgggaacatattttctttacaatttttaacattacaatgtaccaaaatgcttaagagaaaggatgctaatttcaacaaatatatatactctacatttatacatatctataaacaaacttaagaacagggtatagagcaacatgtcaaaggcagtcattttaattatataacttatgctaatattgttctattgaaaatttgatcagtaaataaaatgttctcttcctctgaacttcatgatagtgaacacttctggtttctcttctacctcttttgaagcaactctgtcttccttttgacattattttctttctattctgcttgattaatttacctgtttatcactagatacactctccttgccaggacataatccttgacatgagttatcaactctgttgattccccaaaattcctatgctcaatattgatttatctcctaagtttgagacatgtatttcactgcttgcttgatatatctgtatctgtgtcatctatattccacagggatctcaagctcagttcccaaatgatctcatcactgccccctatccacagtcattttcatataccttattttgcctttctgtccatccatatggatggctgaaaagtggtgatacttccgctgagacttgagccaatccacctggctatggaaacaacacttaagttccatccttaaacttctctctctttcctaagttgaatcaaacaataaattcagtagatgttccttcctaaattttcttcaacatcatccttttaaaaagaaaaaaatagtacaattgcccatctgatttatatggcttacacactccttcataatctcacctctgctttccactgcagtcacatctccttccagcccaactgtttttccttaatcgtaatcctcttggcctttaaagtctcttcactgacaacagaggatttgctccttaagcctcagagacaaactagtctccttccaccccagatctagttggaggcacctcctttatattcccagaacaatgcaaactttcctaatacagcattcatgctactatagtgaatgaacccatttatttgttattctgttatacatcaagcaatataagagaagggtcattttatcctcagtgcaaaatagagtatattttcagggtctggagcacagcaagcacttaagatatatttgctaaataagaattgaatttatagaccctatgacatcctaaggactgcactatttgcagaacaaggagaaacagattgtgccctcaaatatctcaaaaacaaactgatgcattatattgtgaaaagtgcagaatagaagcttgtacagagtgctatgagaacatgtgttttgttcattaagcatgtatgtagtattttctgattggcataatcctatctataatactgtatgataactattaatgatgatacccatattatagatgagtaaattgagacaaatataattaatgtgcctgagcatatgttggtaatgaatagtaaaacagatttgaatagaggtagcctggctccattatctcaactgctatgctgtactagctctcctatggaaaggggctcttcaacacagcacttatagttctttcttctaatggaaaaatgttgcatgatgaggtttcagaaccatgttgcaaaaaaagacttgctctattttttttatgagaaacttgttgagatatcccctccacccttaataagtacagagtctatgtttttcagtttctaatactctattaacaatgtactgttaaaacatgacctgcaatagggattgatcattgtatttacagtatgaaatttactgtcatatataatactagggaaaaagtacttatttttataatatctgttaattttaaaaatacctgtgtttccagcaataaaaactattttataaaattttaaaaaaacttgctaatcttctaccctgcattatttatcagtgacactaggttttatagtagttactttgattggttacataaacatatcagaagtctaggctcttaaacacaaaatgctgtaatatatgggattgcaactgccatctatgaagggaaaaaaagaaaccttttattttctagcatacttaattaacagcttcctacctcataggaatgtcaaactgtagaacaagtaaaatctatttttaaaaaatgatttataattgcattgagagaaaataaattttatataccctaaaactatattgataggtattttacacccaccaattttatacaaattttagaggaaaatgaagtagatatatttgtaaaatcatgatcaagcagttgaagtcatagtttttgaagaaaccaagctgttctctggtatttaaaacttgtgaacaagtgttaattaccatccaagctgccagattctctttcattaattgctaataaattacagctgctaataaattacagatgcatataaagttcactttcccaaaacaaaggaggtaatatagtaatatcaaacaccataagttctcataactacatgaaaaaacaaaatgacttttacattttagaaagtgtctgaagaagtggatagaagagatggttggttattttacacgagttatttctcgaagttctaaattagagatttatcttatacatgaaattttcttaatgaagcctttttggtatttggcaagtggtccagtatggattatctcacccagatatcctctggctataaagcccttaaaacatatctatatatttataatacagttctaagtggctggttattgtgcatatcaccattaatttctaccttgatactttcacatgcacatgtatttgcctgaaaaattcatagactttcagaatttttaatgttctattcttaatccattcaagatctccatgttcaattttaactagttgttgggctgcttggtttcttaggttaaccagtgattaagttgacttgtcaaccagaggtttattcaaagtagataaaagcctttgtttcatgtgtactagatatttttcagtaagaaaagttaatattagctatgtcatactttcctgttatcaggcaaccctgtattcagttttcttcttataataagtgatatttgggtgtattctcctgtgggtcacattattagcaatgggctattattgtctgcctactcactgactaaaaatatcgattaccctattgctaatctagtatatacatagaaaaccaagtctcctccattttgcctcctccctgtgctcagatgcataaaaacaaagaccaaatttcactgatcatttttgaagatctattctgttagtgctagtacccaagacctttctcatatatggaagaaaggaaaataattgacatttgccacataagccaaactcctaaaatatgtcttgctaaaactgttcagaaactagaacatgagaaagagaacctcttcaccccctaattctgtggaatcaagctaactgccctttgtggtaagtcttcttctctgtgttttacagttgaagagcatgagcctcaaagcatttaaataacctacataaggtctcacttcaagtaagttgtgaaaccaatatttacaccaagattccatccaaatcaaacactgataccccttttgtttcaccaggctgccacctaacttgtcacatggacccctgaccagaaagtatggatgactaaaggaacaaaactaagggtgggaatgtggtcagtgaaactgtgtaaatgtttattcagtcttagttgatttaaaaagaggtactagcaggtacttgcatcattgctagtaaatgtgtgtgatgggaatcactaaacacagatcaacaaaaaagtcagatctctaatctcaaggtatttaaatgcaacacataaatgaaagatatctaaggaaacatttccatcagatcaagtgtttaagagaagaatgattttccaataacataattatgaacccgaaatataaacatttgggctaagcttttattatatcaatggtcaagtgatttggtataataaagtacttagttttatcaatttttacttcattttatttatttcttcatctattcactcatttattttccaggaagcattgccatcattgtgcctctcgtcctcttggtgactttgataaccaccttagtaattggtttagtgctttgtaaaagaaaaagaaggtaagatgcaatgttctagattagcagtcagtgaataaatcacacaactaggtgcagaaacataatgtttgttgttaatttttttaaacatgatttagttatgccaactgtaaaatacaatgtttttcaaatcattttatacctctcttttaagtgattataatttagacaagtcttctcccatgttatgttaagggaatggtccatgtatatattctagcaaaactgacaagagatcatattattcaaaagttaagtaggattttacatttgcagttatctttccttgaaacagcaagggtctctgaggagcatctttttatattaatgtgtatgattagtaatgtcaatacagtgatactgatatgcatatatacatctccaatttgtacatttctttcacaaatagtgcattgattcacttatacctcattagaagtatcatttcaatttatatgaaaatgaacttatagatctagaagactaggttgtctacagaaagacaagagccatgtgtgctcacttacaaatggacgtgaaataatgtccattattactgacatagagtgtagggtgataactattggagatttagaagggcgggaaatgaaagtggggtggttgatgagaaattacctaatgggtacagcgtacattatttgggtgatggacatactaaaagcccaggcttcaacactatgcaatataaccacgtaacaaacttgcacttgtacaaaataagcttaaaaaccaagagcttttgagtcagtatttgacttatgtaaaacaggattctaaccatgtaacttggggattgaaaacaatcttagagtttatcactattttgttgtgatagttttcagaaaggagaaaaaatagaatttaaaaagattggtaaatattcaatttcaaatgatgtcatttcggctatttaggaggtatttatttccagtgtgtttttattaagtcaaaacaactgggaaaacagcctatcaatgtactactttttgttcctctgttacttgacaaatgtcatttattcaatttatttcaaaataagtcagtaaatctataaatataatttcatatgccttgattgtgatatttatacaaaactcacacatattaatgtttatatattctaggacaaaaacaattagaagacaacctattatcaatggaggaataaatgtagaaattggcaatccatcttataacatgtatgaggtagatcatgatcacaacgatggaggtcttttagatcctggctttatgatagacccaacaaaggtagtatgtcttaagataatgggcagtgagcactaacattcttgagtcgcatctctgttttatggttctgaatttcaccaagtttttctgttatctgaagttagaataagggactttaggatgtattgaatgatatagcctcttctaaagagaaagtacaattatggactgcattcacctgaagctgagtgtaacacatcttagaaaacacatatttatttgctcagttcttttataaacatgtttttatatgttttttattgaaaaatgattcattatctaattttgtttacataaagcaaacgaaaaactcatttaaaaattgttttagtattgatatcacacagcaaattgtttaggtcttcttcaggggatagatagatatatagatagataaaggtctattataaagtaaagctactgactttcaatgttgaaatatatgcaaggagaagaccaatacatgcacagcttctagaaatatggctgaaaagtagtttggtgagacattttcttttctacccacttcctcccagtattccttacagtgtggttctatggggttttggtttggtaggaactggatacttacaagatagttttgttttcatcacttcagacatggaatccttcttttaatgttttttgttttaattgatacataataagtaggaaatcagtacattgaagagatatctgtacttccatgatttttacagcattattcacaatagccaagatatagaatcaacctaagtgtgcatcaacaatgaataaagaaaatgctattcagccataaaaaagaaggaaatcctgtcatttgaggcaacatggataaagctggatgatattgtcatatatgaaataatccaggcacagaatgacaaataccacatgatctcactcacatgtgaatctatagaagttaatattgaagtagagagtagaatagtggttactagagggtggagaggggaggaggaaggaaaataggtgttgttcaatgggtacaaagtcacagtcagataagaggaatgggttttggtgttctgttgcacagttaggtgatggtggttaacaatattgtattgtatatttaaaaatagctagaaaaggatttttaatgttctcgccacaaaaaaataactatgtatgaggtgatagatatgctaaatactttgattttttctgcaatgtatacatgtataaaaacataacaaaacacagtatctcataaatatgtataattcatgtaaaataatgctctaatcaaatgtgttgaggtattagcaaatctagatacacagcttagtgtaaaaatcttggtcagtgtattttttaaatataaaagagtacagtactttattatcaaaataagtatgttgtttccaataatgtttaaatgatgagccagataagctgtgtccttggacttctttgtaattaaatcacttttgagaaatatttttctatctgtcataatatccttactagtttaaaacatttcattgatacatatagcctgacaatccacagccttttaaatttaaaaatatttgttagtttttattactataagctgaggttggcaacttttaagggaaatagctaaatgatacaattatccagttaaagttgtgaagatttacttcagtgaattatctgaatattctttctgataattttagaatattttttctctaaattaagagtatcaatttagtattatgaaacaatttttcttggtttattcacttatttattgaatagttatttatttttctgacttacaaaagttacttcatcaaaatgcacttttacattgtaaatatccaatgtggccaatctacattcaaattattttgcaatcacagtcattggtgttcctgaagaatctgaataggatcccacatattcagtctagttctgaacccatgattaggctttctaagcctaaaattgatgctcaactattcacttctatgaaaatcaatcttttcacatggatacattgtgtactatcagagaatattatatttttctaattagacataattttatagttattaaaattcactcctacatctgaaatttttcaaggaaaaagtcttggtaaccttacatttgatattttctgctttaaaatatcacagaagtggagacatgatacatattttacacattgctattgataatctattatatctatgaaggagaaagacaaataatagagttctgaaattctttgcatttttcttaggaataaaaatatagtattcatacatataacagactaatgacgatatactttacacatttttcatatgaaggagggttattttttcctcatcatttttatttctagtgatagaattaatccaattttgtacacttaaagagaatagctttttacacattcaaaaattttcacatttactctaggaagataaaactatgtttcagtgcccccaaatatattttaatgtacttagaacataatactcaaatatttaccaattggatgactgaataaccaaaattgcatcaaatatgacttagatgactgattctatctggatcctgatatttgaatataaatgtgaattgttgtcaaatgagtaactacagaaaaaaacagctagttctaataggtttagacagtagtgagaaacaaagggccatattgaagcaaccttaataatcatatgaattttatagagcattcactttgttacaagcgtttgatatatgcatggtgcaatcagtataaattacattacatgtgaagaaaaattttgtagaacactcatttctgttattctcaaagagggtaaaatttctagttcaatggtatcttataatcaaaaggattgaaagtacttaatgcagttaataaaattgatttgactatgggggtaaccacagaacagtttgaagagtttaaaagagataaatatgtactagttttatcttcaaattcatgccaattcttacttggactattctttatattttctgaataagacttttgtgagagaaatgtctacctatgaagcaaagatccaatattaatattggatctttaataatattaatattggatattttaagttgttttaagttgttaaagctaacatgaacacactgtaaatggtgtaaggctaaagggtatttttatgttatttttatgaattaacatgatatgtatcgatgaaaagtgattctataatattagatcagaaactaaaattttctgtttatatacaggccaggtacatagggggaggacccagtgctttcaagcttccacacacagcgccgcccatctacctaaactctgatttgaaaggaccactaactgctggggtgagagaagaatattcgttatttcatgtccgtttcatcacagaaccctcacaatcaaagactaattactagacttagaggcttgtttttaattaagtttttaattaacaagagatttcaaaatagcatttaaattgggggcttatgttatgtgtcctgtctatgcaagattacatctaaaacattattttaggcaagccattaagtagaaatatctcttctactggatttggaaatgttattgtccctttacagtgaacatgagtatttgttattcttagcaaagaagctctagccagaaattaaaactgaataaacttttgattttattcatttcctctcatagtggtttatttaatatatacaaatttgacgtgcagttaaatagactatactttaaaatgtgtcatcatattgagaaattacagacggtctaacaaaaccactctcaaaaacatgtttcaattaagtaactggtgtttagagaaagctgttctgtctaaagttacatagttcattttaagcagaagaggaataaaaatatgcattatcaagattcctagggatgagaattctctcccttatcgtctttcccatcaactgttttcatcctcattttctatcatgtttgtctcaattgcatggctcaaagattataatgtttccttgttgtaactaagatttaatgtactgtttttggaaagacgaaacaaaaaataaggaaaacaaacactaggcaaaattttcttgggataaactgcaatttgttaaatagtgaacattgtatgtatatgttttccaactcaaagaggtcagctgctgcatgcctctaattctacttcaaaatgctatgtttgtgaaacttaagatgactgtgtacatcacaattctttgaaaaagtccaaaaatatttctaataagtacacacaggttgtttgaggcaaaaatattgctttaaaaatctgatacactaatgcatttctttacatttttgtttacttgtttttaagttcatgttgaaaaattataagcaccaaacaaatgtttttctgaaaacacatcttacttgccacggataggcttgtaatagcaataagggggacaacacaaaaactgaaaacatgacaatttagtttcacattttatgcttttataataaagtctcagtgaacatagcttttacaaagatttttttctggctttttgtatatggcaaagctcctcttaggttcacaagttacttgcaaaatgtaaaattatgtttcatttaataccatgcttgagttgagtaaagtctgtaaatgtaacatgtaaataacctttaaatcattactatttaataaattaaatgtattgcatataaatattgttacgattaggagatggacattctaggaagtaaataattaatgtggccaagaccagtaataaaattatatttattttttttctccttcagccaacaaattactccaatccggtatatgcaaaattatatatggatgggcaaaactgtcgaaactccttaggaagtgttgatgaaaggaaagaactgcttccaaagaaaatagaaattggtataagagagacagtggcataatcagtgatatcttttatatgctgtataaatgtataaaatataaggattacttttgtatgttccaacagtattatacttgttttggcatcagcattacctctttctttatctttttcctggttaattgttttctgagttttttgggttttattttttgctgatgactattgattgaccatttgtatggtatttttatgaaaaagaactgcactacagtacaatttacaacaatgctgctgatatgacacacctttgaatttgttaaaattaaaaacaacgtattcctttgtagtgtgaatatgagcaatctattttatatgaacttttttggttgtacttaatcaacgaggagaatctctgcacttttccattatacggtttgaaggctgtaatacagtgtcatattatttttctgtttaaattgatggaaaaatgattgaatggtcaactctcttctttgtgcccataaagatcgattcagactctgctgaaaatatatagctctcacaagttcagcatcacctgctttgaaattagccttagattgccaaccaatagatgagaattttgaggaaaaaaattaaaaatatgtaaaattaataatttgcatgaacacagatgactacattttccaaaacttagtggactctatgtgatgtactaaatgtatacaccttgtaagcaatagttatatttaggtggtagaacatagcaaaaatataaccgaaagttggccgactgcacttgctatggaataagaccttttattctccctcagtctcgagataaatagccagcctagagcacaacagggcattgggtacttgcatcttaggtatttcttcccagtcacatccattttgtggaagattaacccaaccccttacactacactgaacactaaagaataatatataagcacacaaattggtgacagaatttcaattacgtgaacgcatcctctttgctaggtcaaaaaacaaagggcaaagcagacattttagtatacagagtgattggcaaatattttcaagatttaatatgagcaacccattatttgccctatccaaaatatattcaagggccttccaagttgtagaagaacaatgatcttcccataatcaaaagtggagagtcgaaatgctgtgccagttgctctggtattcaggtttctctgggttttacagaacgcatggaccccattcacgtttggtttgtttatcttcaaatttgagttgaaacgagtgcgatttatttaagttgtatataaaaataaaaggatagcatttttatacaaatatctttaaaggcacaaaagatttattcacaagttttggagggctttttgttcctctgatagacatgactgacttttagctgtcataatgtattaacctaacagatgaaatatgttaaatatgtggttgctctttatccctttgtacaagcattaaaaaaactgctgttttataagaagactttttgttgtactatgtgcatgcatactacctatttctaaactttgccatattgaggcctttataaactattgatttatgtaatactagtgcaattttgcttgaacaatgttatgcatatcataaactttttcaggttcttgtttaagtacattttttaaattgaacagtatttttcattttggttataatatagtcattttgcctatgtttctacaatgaagtgttaaatactttataaaaaattgttgactgacttatttaaatgaaattctacatatttaa

SEQ ID NO: 250 - DNA, 50097 bp, Homo sapiens
  source 1..50097: mol_type = genomic DNA; note = NC_000022.11:c20016823-19966727 ARVCF [organism=Homo sapiens] [GeneID=421] [chromosome=22]
gcgcacgggccgcgtgagggcgggagggctggcccggggtctcgggttgcgcgctgggcctggagggagggggcggcccccgcaccggtccgagttgcggccgcgtggactgcgacccgcgccgcgccgcaccgcgccgcgccctgggaacgccgctccccgcgcgccaacggacccggggaagcccttctggggtccgaggccgcgctgcggggccgcccacgctgcgctccaggtaagcctgagccagtgggcggggtgtgggacccggggctggggcctcgggtcggagccgggactgggggcggggctgcagatatgggacgcattccgggcagcggtccggacagggtcctatccctggagtcgagatccgggcgagggtctgggccggacgtcggagccaatctccgccccacccgcgtcttgtccgcgcgctctgcggcgtccgagaccccgggccggcgggggcgggtctctttgtgcgtggccttggggccctaccctacccgtccgggcgtcttgcactgagcactccagccgagcgcggcccgaccccgcagccgtgcccgccccgcgcgacgcttggcgcctagctgccagggccctgcagccgccgaaactttccaacagcccgaggggcggcaggccgggaactttcctggggcagcgcgccgccgggaagctcaggggcaccgacggcccggaggtgtcctcgcgccgcgctgctcctgccgcctcgggggtgagagagggcgcgccacccggacccccggcctgggtccccctccccacgccgccctgcgccccctcggtgccggtgcggagacatgtcatctccactctgagggagactgctcggtttgctggggagtcgccctgggcaggtggcctgagagctccagcctattttaatttttaaataattaaatattggctgcttacaatatttcaccgtttcttagctatgtgtaatgtaacatacttaaaatggaactaaaggacttcagctccctttccctacatccaggcatatttagaaataaggaaaagaaaggtgccccgtgggtattttttagagtaggctcttaatgctgctgtctaataacctcaggtgagtacccaggctgctgtgggggaaacctcccctatggtatgggccaggggggtgcagtgggagcctccacctctcccgaccttagcttctctggggtagctgcctttacttcttcctacttcttaactactgccttatctgcctttactctgggatctgggcggtgtttagaggtctggtccaaacaaggcaggtgttacctatcttgtactcactctattggagctgggatggtgctgaatgcaggggggcagtcagcgctctcttgcccggtgtgccatgccagtggccggtcagctcctaagcaggtgatccaggccttagatcaggcgacagtgtgagccgcagcgtgtctgggaaggcatttcccccagtcttgccccatcctatccgcaatgtctgctcccagctgtcccctgtccccaccctacccccattctggggtccaccagcgcccagcagaggactgggcacagaacattcgctaagggactcaagtcccagctgagagggtagttgagcacagccaagccagcccctgcccagctcttggctgagctgccctgtcaggcttttcagcataaacacaaggaccttctgaccaaggttcctcctgggagaacaagttctgaccctcaatcctgctaaatttgagtctccccacccaccacatctgggctgcttggctcccatgtttgctctggcactccctccagaggtggccctgtagtctccccccagtcccggggccctctgcatctctgtggctctgtgagggtagggtagcacccctccttctgtttgtgctacacagggattcagggtgagttccctgtgctccttcaccccaggagtctggcctgggggagcatgaggctgtcctgagtaaggacagaaggtgcaggagcagcaggatccccggtctctgggtggagcagggagctctgcacacggatgccaggcaccaccctctgtccagcccatctgtcgtgctccccgcctggccctggcagagggagtgacagggtagagctgggatagggagtcagggcccattctgtagacagggccaggaatggagggtgggggtccagggacagcactgcagagcaccagctgggccttgggggtcctggggacttccctgatggtggcttagtcatggggaggtgtctgttcttttgtcagcagcttcaattaagaccagaatgaggccgggcgcagtggctcatgcctgtaatcccaacactttgggaggccaaggcaggtggatcacctgaggtcaggagtttgacactagcctggccaacatggtgaaaccctgtctctactaaaaatacaaaaattagtcgggcatggtggcatgcgcctgtagtcccagctactcaagaggctgaggcaggagaatcgcttgaaccggggaggtgagggttgcagtgagccaagatcacaccactgcactccagcctgggtgatagagcgagactctatctccaaaaaacaaaaacaaacaaaacaaccaggatgggctggtcacggtggctcgtacctgtaatcccagcactttgggaggccgaggcaggcagacagatcacctgaggtcaggagtttgagaccagcctggccaacatggtgaaaccctgtttctactaaaaatacaaaacaaattagctggacctggtggcatatgcctgtaatcccagctgctggggagactgaggcaggagggttgcctgaacctgggaggcagaggttgcagtgagccaagattgtgccatcgcactccagcctgggtgacagggtgagactccgtctcaaaaaaagaaaaaaaaatacccacaaaaaaacaaacagaaaaacccaagatgaagtcttgggtcactctgaggggacttgggatcagggatcccttagtaggttttcctggctcagggccttcatatcttggcctgtttcaggtcgggaagatgacccagagctggtgggtgcctggggccacagagttccccccactccataaccagttatgcacaggcccttcccactgcccctgctgattgaggggctgccgcctctggcagagcaacggggagctgagcatggccaccagagggcagctgggaccgccacagcaggcaagaccggctccacccagcttcctgcggcagaccaggacccttccccagacacctggcttggatgaccggagctcggcctccaagccgcctattgagggcgtggagttggaaaggagccaagcaaggcccctcggtacccccaacatgcttggtgcaggcagaaggaagcctgaaggccagctggtgggtgaccacacacaggctcagcagggacagtgaaggactagccctgtgcctgcgtagccccaaaagtgcagtgtccttcaagtgtgtgcccaggggcctcccaagccttcccaggtgtggtctgtgcctcaatgtccacagcagaagtgggcgtgttctcactatgtgcccagggtggcagcaggcctaggagaacactcggttttgctgtagtggacagcattgtcattgagcagcatggaccttccctgtccactggccacggggcactccattcacctgcctgcattggctgttgccagggcatgttctcagctacctacagtcagtgtcacctcgcgctcatagagcaggaagcgaggagacttggggagggggtggcctgctgaggccacactgcagggagtgcagagcgagctcacctgggcccctcattgcctacccagcccaggctgcatcctccatcccagttctgggcccagtgtgtacccatgggagctgccctgtgccgtcagctatccaaaggactgtagcttgccaatctggctgtgtggcctgggccaggcttatgccccagtgtgagacctctcagccctctggttggaccatggataccgtgccagaaccacagggcttactagggcatcagtggggtgtagccaggggctgacagagccccatggccagccatcgggtctggacagtttggtggggagacccagtgtgggggtcccatggcatgggtaggcccaggccatcctcactgggaaaagggcccaataaagggcgtggtcattcccccgctttgaggcggctggtactgggtccttggccaggcaggtgaccccagagcttgcagagcactcaggggggctccccaaggtgagcacctccccaccttcccatatgatcctatcactagttctgccttcacatcactgtcctgtctgtcgtccctctgtccgtccactgcccagagctcccttaggttgtccacagatgctctgctctgcccctgcctgtacgatgctgatgtgcctagtgcacccttaggaaggatacccacagctctggctgctcctaccactcagcctcctgtggtgctgctatcctctgctcccacccatctcctgggggaagccctctccaatgcctcacttggaccccttcccagggtctgctattggctctaccatatggttgcaggttcttggcctggctggaccccatgaggtaggaggcccatgaggaaggacccatgttctcctttggtcacacttccccaactgggtgggggggggggactttgggaggcctggaggcaggaagacctgagttaaatcctggcccagcccttgtctggctgggacccagtttctccatgtgtaaaatggggtatatagccaacctgagacacctggtagagtcagtgagatgacggctcacagccagtgtgtctcggttctgtggcacatggtgactccgggggagaggctggtgcttatcagggataaaaaaaaaaagtcacatggttctctgtggtacaaaacctatgtgaacacttaagctaaaaccagaggtttcctagaaatgtcacactcagagcaaaagctggttcctaagcctcagaccttggagtaggagcagcatctcctcttcctcggggcgcagtgctggtggatgggctcccaaccgggcctgcccatctcaggtgcacacacacactcatattcacatgcacgcacatgcatatgcacatgtgcctggcttggtccccagttcttccctgcctcaggccctgcatcccaccccccatgatcccaccctgaggcgtagccagtcgcccaccctcacttggaccccttcccatgatgaagaggctgtcgtgagacggggaaacacaccgttggggcaccagaatggaccatgaccacaaaggactattgggcggggcctcagaacaatctagaaaacaccgtagaggcgggggagagagctctcattaccgatgtcccccagagacagcctcccatccgaggcccagcccttccctgtctgtctgcagtgtcctgtttttcatttttatgacatgaacactctggcaatatccccgggcctagatataaggagagggaatgtgtccccggggccattagctgagacaggaagccgcagggtcctcccctgaggaaggctgaaagctgtgtgagtacaggcacccccttgtctcctgctccagcccataagcctcagctccccaggcttgagtgccaggtcccccatcccagacaaatggttattcacacctggccacagctccagggccaggaacctgcctgcttccccgccctccctgtactggagactgttgggggcagctgcctgcctgggagggcccaggatctatgttggcctcagggaacctcaggagaggcacgtggcctcgcccacaaggcgggagcggactctagggaggtggagcagatgtcttatggggctgtgagcacctgcgtggggcaacaggaccctgagcctggctaccctggggtgggaatactgctgtgctgtgtgtgatggggaagacgtcattatcagtccacatctctgaaggatcacgtttctgaaggatggtcaacagcattagacatgctgacaaggaaccgtggcagcccagtgtcacctacagtcctggacatgtgggggcaagaaggtacacatgagtgtgtggttatgagtcaggagcaccacgggatgaccttcagatcaggcatgacaaggtcctgcttagaggacggtctgggcttgtgtacctttatccggcagggacctacccagctggattgacctcactcatgccctctggtttccctgcaggagccagagcctgcagggtgggtgtcgggacatgctgatcttccctcaagacaggtgagtggcctgggtttagcttggggacatcctctcccacataggacagcagagtgttctggtgggcctggcgggtgggggtgacagggatggactggccctggacactgtgtgctcctggtccttctcaccctgggtaggcacagcccctgggctggacagggtggatgtgagggcctcctgccaccagcttgggtttgttactggcctgaatatgggcagcagccactggtttgatgtctggctttagggacaagcctgtttggggctggctgacgaggttgctggtcagtgttggtttggacattcactgggtctgctcttcacctgcctgagctaggatgccagccgcagtggcatccagtattggcacagcctgctgggccaggccattcgcttgccccccagagactggagccacagggacagaggatagtcctggaggccaggcacacaaaactttgtttgaaaaggtctgatagtaagtaattcaattttgcaggccttatggtctctgtcacagctgcagttctctgccattgtaggatgaaaatggctgcagacagcccataactgaatagtctgaatgtactctgatcacagccgtaggccatgtgtactggcccgtggcctcaggtgttatctgtgtttggggttcctctgcttatcatggctgctagctccagtgggactgaggcatagcgcctgggaagcatggcagggttggaggctgagtggtccatgtcccccaggaccctctgaaggatggtaaggcataccctgctcacatccacgctgccagagttttgccacgatgggtgctgttcagcagagtgggtgatggcttaagagaatggctcctggccattcttgttcctccagtccccaccctggccatctgcctgtccccccaaaaagcagtctctgtgggaggcatggctgacagccctgtggtttctcagtgacaattagtgcccattgtggaggcatggcccagccagtgctgtgcctaagtggtagggagaaggccatggcctccggatgcctgagtgacctaggctgagggatctagggcagatgggagggacaggatgactgactccttgcctgttcccaagtccttgggcatggaaagctgccggccgggccagcctagtgggagctgggtctgctgccgcctggctgtgtgggaggaccagcgtctggccgagaatgtcactgctcaggccatttggccatgcagggtcttctgggttgggacaaagaagctcaggcagggtacttggcttgcttgtggcacaggtgacagggcatctcagggtggcaggaggggctgtcccactgcccttaactcctcgtaggtcaccacacttcagggaggccaggtcagccagacaccaaacgacagccctggtaacagggtccgcaggagggtggttggctgggcaggtccgaggctgcccaggcacacttgctcactctccctcctgttgcttgctcctttcttgtcccttcttttccctcccccctccagttcttggtcttctctatgtttctctgtggccctctctgtgcctctttctctgcctttccccatctcctatcctgcccatctggaatgtggtgattgcttattcctgtctgctgtggtgattggtttttcatgtctgccctgggcactggtgcgatgggtgatggcatttgtgccatctctgctctggcttgggcaacctgggctctggcttgcggctgcctgctctgctgggccctggggtgtggtcctgtccacagcgggaggcagctggggagggagcctcagggctcagctgggacaggggctgatgtaaacacccatgtgtcaccacactcagcacccactcacccagcctcatgctgggtcctgggcatcacaggcacatcaggcccagccctgcccctgaggagctcccagcctggttgaggagatccacaacacacagaggaaccagtggccaactgtggggttacaagatggtgatgagtagcatggctcccttaggagggggagctgggagggtgtgatggggtggtgcgtgctgagaccaggcctgagtgagaagggctggcggggacacagatgccctgccgtttcccatagctggccagcagtggtgtcctctcagagaccagcaccagcctggcctcctccatcagccgccgtgtgcctgcagggggttgcggcttcgtctcctgcggccgcctggcccctatgacaggccttctcttgggttttgatgtgtttctcagccattgtatgagtctttgtatattaaagatattaattcttcactcctctttctgcctactgcacatttttctcacccttttagtttttgtttatgatcattttgatgtcaaaaatgtttcatattttgtggtgaagtgtgttggatttttccccatttttagatattccgtctctctgtgtagtcaactctccctagcatgcagccagataaagatgcacctgtcttttcttctagaaggtatttttactttagttttgtacacagcatttaatctgtctgtcttagtccattttgggctgctgtatcagaatacctgagactggctaattcctgaaaaacaaagacttatttctaacaattttggagatggggaagtccaggattgaggggccacatctggcgagggccttctttgtcgctacatcccccaggaggtggcagaagggcaggagcacacgtgagagagcgctgaaggaggcggaacccatccttttatcagtaacctgctcccgagataacaaatccactcccactgtaacggaattaatccattcatgtagcagagcccttgtgacctaaacacctcttagaggtcctaccttcaacactgttgcgttgggaattaagtttccaacacgtgaactttgggggacacgttcagcccatagcacaaactagtatttattctgatgtaaatggacggcaaggatttaactttgtttttacagctgcatctgaactgtttcctttttgtttgtttgttttgagacggagtctcgctctgtcacccagactggggtgcagtggcgcattcttggctcactgcaaccttcacctcccacgttcaagcaattctcctgcctcaacctcccgagtagctgggattacaggtgcctgccaccatcaccagctaatttttaaatttttttttttaatagagatgggatttcaccatgtccaggctggtgtcgaactcctgacctcaggtgatcctcccgcctcggcctcccaaagtgctgggattacaggtgtgagccaccgctcccggccatgcctggctaatttttgtattttttgtacagacagggttgtgccatgttgcccaggttggtctcgaacttctgggccccagcaatccacttgccttggcctcccaaagtgctgggattacaggtgtgagccactgcacccagccttaaatttttacctttgatatactatttatttcaaaagggtaggccaggcgcggtggctcatgcttgtaatcccagcactttgggaggctgaggcaggcagatcacgaggtcaagagatcaagaccatcctggtcaacatggtgaaaccccgtctctactaaaaatacaaaaattagctaggcatggtggcacgcgcctgtagtcccagctactcgggaggctgaggcaggagaatcacttgaacccaggaggcggaagttgcagtgagccgagatcgcgccactgcactctagcctggcgacagggcaagactccgtctcaaaaaataaataaataaaagggtattatgcaatttcttacttattatgtgagggagcctcttttttttttttgagacagagtcacgctctaccgcccaggctggagtgcagtggcgcgatctcggctcactgcaagctccgcctcctgggttcacaccattctcctgcctcagcctcccaagtagctggaactacaggcgctcaccgccacacccggctaattttttttgtacttttagtagagacggggtttcaccatgttagccaggatggtctcgatctcctgacctcgtgatccgcccgccttggcctcccaaagtgctgagattacaggcgtgagccaccacgcctggccagggagcctcttttttaattttaatttttaattatggtagaatacacataacaaaatttactatcttaaccattttcaagtgtacaattcagtagtgttgtttgttcacattgctgtgcaaccaatttcagaacttttttttattcttgcaaaatagaaactctgtacccattagaaaactccccgtttgcccctttcttgaagtgcttctacttttcctattgtttgactactttagatgccttacataaatagaatctcacagtatctgtctttttgtgactggcttatttcacttagtatcatgagaatatcatatgtcagaatttgatgcctgatattccattgtatatctataccacattttgtttatccatttttccactggtggacacttgggttgcttcccctttttggctattgtgaataatgctgctgtgaatatgattgtgcacatatctcttggagactctgctttcaattctttttttttttttttttagacggagtctcgctctgccgcccaggctggagtgcagtggcacgatcttggctcactgcaagctccgcctcccaagttcacaagtagctgggactacaggcgcctgtcaccacgcccggctaatttttttgtgtttttagtagagacggggtttcaccgtgctagccaggatggtctcgatctcctgaccttgtgatccacccgcctcggcctcccaaagtgttgggattacaggcgtgagccaccacgcctggcctcaattcttttagatacataatgcagaattttctgattgctggaccatatggtaattctatttttaattttttgaggaattgccatactgatcttacattcccaccagcagtgcacaagggtcttaatttgtctgtatctctgccaaaactttttttttttttttagactagccatcctaataggtgtaaggtgatatttcattgcagccttgatttgctcttccctaatgatagaaatgttgagcaaattttttaacgtgcttgttggccgtttatatatcttctttggagaaatgtcagttcaactccactcatttttaaattgggttatttgtgtttttttgctgttgttaagttttgggagttctttacatattctggatatgaattccttttcagatatatgatttacaaatcttttctcccattctgttggttgctttttcactatattgattgtgtcctttgatgaacatacattttaaatttggatgtagtacaatttatttttccttctgttgcctgtgtttttggtatcttatctaagatatcattgccaaatccagtgtcatgaagactttcccctatattttcttctaagagttttatagtttgaggtcttatgtttagatctttcatctattttgagttaatttttgtgtatgtaataaggtaagggtgtgagttcattcatttacgtgtgtgtatccagttccatcatttgttgaaaataccatcatttccctaatgaatggtcttggcacctttattgaaggtcatttgaccgtattcatgagggtttgtttctgggctctgtattctattccattggtctttgtgtctgtccttatgctaataccacactgttttgattactgtagctttgtagtaagttttgaaatcaggaagtgtgagtccttaaatgttgttctttttccagattgttttggctctttgggctccttaaagatcgatataaatcttatgatagatttctctgtttctgcaaacaatgtcattgggattttttttttcttttcttttttttttttgacaggtcttgttctgtcatctaggctggaatgcaatggtgtgatcctagcttactgcggccttgaacccctgggttcaagcagttctttagcctcagcctctgactagctaggattacagatacatgctactatgcctggctgtcattgggattttaataggaattgcactgaatctgtagatccctttcagtagtatcgtcattgtgacagtggtaaatcttcccagccatgaacatgggatatctttccactgatttaggtctttttaaatttttcttggtaatgttttatagttttcagtgtacagatcttaagtttcttaagtttagtattatgtattctattctttttaatggtattgtaaatggaatagtttttttaaatttccctttcaggttgttcattgttcatatatagaaatgcaactgatttctgggtattcattttttatcctgcacctttgctgatttcattttttacatctaatagagtttttaaaaaatgcatgtagaatctttacggttttatataaggttatgtcgtctatgaacagagatggtttttctttctttctaatttggatgtcttttatttctttttcttgcctaattactctgtctaaaacttctagtactatgttgaatggaagtggtcaaaacagccatctttgtcttgtttatgatcttaggagaaaagctttcagtctttcaccattgagtatgatgttatgggcttttcacatatagctttcatcatgttgagaaagtttccttcttttcctagtttgagtgtttttatcatgacagactattgaattttgttaaatgtttttcctgcatcatttgacatgattgtgatttttgtcctttattctattactgtggcgtattacattgattgatttttgtacatggaaccatccttgcattccaggagtaaaatcccacttggttaggtttataattcttgtaaaatgcagctgaatttggtttgctagtgtttttttgtttgtttgtttgttttgagaatttttgtttcagtattcataagggttattggcctgtggttttcttttcttgtagtgtcttttcctggctttggtattagggtaaggctgacctcataaaatgaattaggaagtgttccttcctctttatttttgggaaaagtttgaggacgattggtgttaaaattacttgaatgtttggtagaatacaccagtgaaaccatctttgctggaggtttttgattactgattcagttttgttgctagttgtaaatctaatcaatgttttctatttcttcatgattcagtcttggtaggttgtgtgtttctaggaaatttttccatttcatctgggttatctaatttgttggtgtataattctttatggtagtctgttaccatctttttattttaatgttatacaaagaaaaggaaaacaaattgaggtttttttttgttctgttttattgtttgattgttgtttggcttggttagattttgttttgtggttcttggatttgtacctaatctgttggagtcatcagtccacaaacccatgaatttcctgagccagtaaaaatgcttccaatgggcagctgacagaggactgctacagacaactggagctgccttaatgcattcagaatcgcaggcccttgctgaaaaaatcaattccacacatcagcagctgctattcccttgacacaatcttcatgcgcaggctgtgggcttctcacaaacttgtggtggtggcagcccccaaatttgaatcccagcagtgcaagcacaggatcccttgggttatccaggcctcatttactcctgaattcttctcttcttttggttcttaaaactacttctctgggtagtccagggctctaggtaagatgagtttgctgcctctgaaaatccagaaacctcaccataatttttccttatggggtttcagagcgatgttaactttgtaaaagatctcaagtagagaggagaggcgtttgtttgttttaacaaagctgtcagctcttttttatcataaaacagcttctgagctgtgagagacgggagccaggcagcaggcagcagcgtgttgaggctgacatttacagagggacagtatgcagcccctgcaggcctgcagacggcctggtatagagagaggcccaggcttcagcacagcccgcaggtcagagctgggcaccctcctccctacacctcgaagtggacacagcgcatttaggagccagaggaaatgagactgaattgtaaaagccagaggtagacacatccgtgacttcctgggcttcttttctggacagaaggctcacaccctaactcagattccagccctgacgctgatagccccgttggacgtactcctgttgaggtggtttctggccgtttttctgtggttggaagagcactgtctgtcgttctcgctctggaaactcctatcatgtggaagtttggccctgggctctgtcttctgtggctcctaccatcctcttgtcatctctcctgtttgctgttggggttgggaggaccgtcttagtgtactttctccagcctcacactgcgtgttttctacagtctgctgtttactgcctctgctgggatttcctttaaatctccatgggatcctcattatttatagcggctccttttctttctttcttttctttttttgagatgaagttttgcttttgttgcccaggctggagtacagtgaggtgatcctggctcaccacaacctctgcctcctgcctcagcctcagtcctgagtagctgggattacaggcatgcaccaccacacccagctaattttgtttgtatctttagtagagatggggtttctccatgttggtcaggcaggtctcgaactcccaacctcaggtgatcctcccaccttggccttccaaagtgctgggattataggtatgagccatcgtgcccagccagcagctccttttcattgtggtctgtggccagcggagttgaacaccgtctttaaccttctagggcacataccagctgtttcctaagaaatgcgctaaatgtgactcagcgggaagcggcttcctgagtcctcccatggtggaagggtcttccctgggcactaggctgctgtaagttgtgcttgtccctgcaggtgggtctgtgcaagctcggggtctgcaggcccagccactcccacctgtctcagaggaacctcatgtgggatcagaggcagggggtcctgcagatcttggtgtcaggggcaggcttgacccggcctcaggggtctcagagggggtctgccttgcccggtgtccaagacaggaatggagtctgcctagcatgctgatcttcaccaggagccaagatgtcccccaccccccaaagggcctgtcgggacttctaggtgggataagcagcagccatatgggtgtggacgagtgtgcctgctggtgcgtgtgcctgtggggcagctgtgggtccctgtgcctgggtgtgcttgtgtgtgtgtctgtgtgtgtcttagttcattcacgctctgccaccaaataccttagatggagtcctttataaacaacagaaacatactgttcacagtgctggaggctgggaagtccaagatcgaggcgccagcagattccgtgtctggtgagggctattgatagatggcgctgtgtgtcctctcatggtggaaggggtaaaccagccctcaagagccgctttgataaggacactgatcatataagggcactaatcacctcctaaaggccctacctcttaatactgtcacattggagattaggttttaatgtgaatttggggaacactagcattcacaccgtagcagtgtgggtggctgcacacatgtgccagtaggtgcctttgaggagggccccaaactgtcagcacttctcccacctctttgtagtggggactggacacacagtcaagtcccgaggctctcctggtatgtggcggtgggagccagatgggaggctgcagggcctggaatctgccctggatggggtggtgcagccccctgcctggccctctgtgttgcttgcatatgaaaggcaggactttgtgcacttgctggaggttggtgtctaggcctgttgccatgggcactccggagtggagctggctcccagcagaggagggggttgggagcggcaaggccagcatccagctcaggctctggaagggatgagcggtgccccaggcaccctgggagcagccagctctggccagaggccacacaggaccctggggcaagggcagaccaaaggggacatggaacctccctgcatatgacagggtgggctctacttcatgctgggtcaagatctcacaccactggctcctctgatgtgctgggtgggagaagggtacagtgaggagcacctttcccaagggttttgggactttcaggggacaggctgttgtccccaagggctggcagcactgcctccttcctgaggctcacctctcagtgctgggtcctcgttctgccccttccagtgcagggaagatgatggctgggaaagtgactttgtccccttgttctagaaggtcaggggagggtcctttggaggaggcagtggggcttgcacctgtcttatctctcggcttcacaggctgaaggtgccggtggttctgtctccagcctgaacccctttcttccagaacttcatgcatctagtggtccctcagcctctccagcctcagagactccctttgcaccctcccactcagggtcccggcccctccctccagccacccaggcctgatcccttgcggtcagcccagacttaattctcccacccacaccatcctctgatccattctgaaccatatggcctacgtccaccacagcaaccaccctatggccactccctgccacggcagctggagggtcccaacccccacccctgtgcctgcaggtgtcagcagagagtggggtgccagtggggaaggcaggttgggaggggtgtggtgagggcctccattgggggtgcagcaagtgcttgctgacccaggcactgccctgtgggggcagcccttggccccactccctagtagtcaggtagatttgcctacaaaaggatggatctctccctgggccagtgcctcctcgtgctgccgcagggggccagtgatccccaccccaaccccaccccaggggcttagttagcaaagctgctgtgggtcagagtgaggtcaactcgggagggcctctaggcagggcgcccacatgcagggagctgccaggtgcctggtcagcagcagtcagtgggtgggggcagggactctcaggccagtacaggaggggctccagggctgggagtctggggaaatgtggcctggcctcctctgcctccctggctgtggggctgtagcatggatgggacagccatgctgtcactgtgccagggacccacatcatcctcagggttccatttccccagccctggaataagccaagccatggtgaggttccgttttatccaactctggcctgtcccagagttgtggctgcagcaaggccagtgacatttccccctgggcggataggtgaagacggaggctgaggcttgagaagtgagaggacagtaaactgagtggggcccagatgccagggccagtcctctcggcacacctggtgccagacctcccactgtctgacctgccgtctcacggcccctgcctgccctcccacggaggacttcctgtccccatctcccaccaggcactgttcctgcagccatcctgggcatttcctgactggcgggagctcccctgccagtgctgttttccacttatctaagcagagtgtgttctttgtcaaaacaacagaggggaaagcaggaaccccccagctcctgcagagaggcttctcggtgctgtctctgcccagcctcagcctggcctcctgggctgtccggctcatccatccggagacccttctgggtgggcagctggggcgggctggcctaacctgaaggctctcctacctcagcttccttggctccgaaacctgggaggggggctgggccggcgggccctgctttaccccccaggggccctttggccacaggctcccaggggctgcaccccacctcccctcaaaggggctttgtgtcaccacaaagaggctctgtccctcaggagaagcctgggtgtttccatggtgatagaggggctgggaagaaggggtctaaccccgtcttccaatgaggggggaaagggcgttgcaggcggacggccctgtgcactcaggctggtggccagcgtggtgactgctgcacctgcccgctgaggcccctcagcctggtggacagctgtctcctacagtgcctcagtggggccgtagggcatggtagggcagggctcccaggccctgtggctgtctgcctctgatcccagcctagctgtgaaccctgtcagttcgctcctcagggatgctttggtccctgtgcccaccccagagtacagaggacggggctcagctccatgtctgggccttttacaccccgcctccgcctccactgcgcctgccctccctaaggcagggcatgggccacacggcaccttgcggggtgggtgcccgtcccggtaagccgtggaggcaatgggccagccaccgccaccaatgtccggcccacttagtagggcactacacctctccacactcctacaaacttcatgctcatcattgggggcggagtgggtgggctgagtgtgcaggggagaagacactgcactggcagcctctgcagccctctccctggagctccccagcctttgagcccttggtggtgccctgggcaggatgcagcagggagcccagagaatgtggcccctcactgccactactccacggcttggagtctgcaggaccacccactgctgcagctgtagctagagtctgggtcaggcacaggaagggcattgggggctgttttgaatcgggacctggaggactcctttccaccccatctcatgtctcctcatggagaggcaggtctcaggagaccaaggagacttaaaggatgctgctgttggcacagggagcaggtgtctgtgacctgctggattgagaatcttaagcccagaccctttagggacctccagcagtggctccctgtggctcatgcctcccacagaggagggacagttgctgggacactcgcctgccctgcctgctcacctgtcacgtcctgcctgcagtcactgggctcgttcggccactagagccagcccttgccctaaccttaggcttcccagctccctggcccccagcagtgaccctgccttgaccggaccccagcttccgtatcagccccacacagcccctagtccccctggacctcccatccagcatgccccctggggctggccagtgtagctttggtcttggccacctttggccttgggcactgcattagtgcagggcaggagcagcgtgggaagaggccctttctgagtattctccctggacatgggagtggtccctcacatgatcagcgggtgccactgagtgagcatgtggacagcctggggagctatctctgtccctctacccaacccccgatggcgtctcatccagcctggctcattgcctctgctggggaaatcaaatttccaggctgaatctgattatggctctctgacagtgggcaccgccctggcccctggggagattggtccctggcctctgctttcactcgcctgcctggtggggagggtatctggtttgtctatttcctactgaggttctgattatgccagcggcgcgtgcttcgaggagtggtagactggcaggggcaggactgtggggctctggagcagcctatgagagcacctaatgggctgaggatgccactttgttgttgtatgttacaaatacttgatcccaacatgtcgattgtcttttcattttctttgtggctgcttcttccattatggaaaattacaaaagcacagaagtggagagcctagtgtgatgggtcctgcacaccccacaccagcctcaccatgctggagtcatggtctgcgagtaacgccagcacccgtcatttcatcaaaacgctcactgcatgtgttgctctaaatggtgtcagttctttaaaaaacatgaccacactgtgtggcccttttttttttttttggatatacagaaagtttcattctcacaaagtcacgcttgtgcgtctttcctcgggggttctttctgctgcttggaggctgagaacagtcatccccagcccaggcaccccggatccaacacagtctgcaagggactgtggtcctggccttggcacagatggatgtggactccgccctgtgaaccccaggcccccggctctggccctgtcccagcttgagtacagtgcccggccagtgggcttggccagaagctacccacaaggctttgggcaccatctgaccacagtaggggcaacagggtaaacatggggcccccacaaggcctggccagctagggggacgaggaagtctctgtgctggcagctcccaggatgtcctcccaggcagaaggtgggtgctgggcctgggtccaactcctgccagggcacttctggcatcatttcctccttgtagggaagggtggaggggaaagggggtatgggaggaggctcgatggtcatccgtcccgtctctcccctcgaggggggggccagcgcagccctggctgtgttctggtagacagctggcaaggggtcaggatgggagccaggccccgcctgccacccttcactggcctgacccttcggaaattcctctaattcctcaacccacactggactcgggccccataatttcattttccggacaaggctctggccgcactcccgaggaggaatgtctgggttggcaagatgtcgtcaaatgtcagctttggtttcagggaaaggatttagcttctaccctcaggttcctcaccatgccttcgtgttcctgacagtgtgtgctgaccatggtttgccccagagggtttgcgggccggggctttccccacttagtgaggttccagcatttccttcctgcccaccggcccttacacagcccacccccccttccattcatgcatcgcactctgttttctccttcatccactcctccatccacccagccttcagcatcccatctgcccaccctcctacacattcttccatcatcattttatccctctaccaccacccgtatccatccagccaccttcccatccaactagccaccattcacccatcctctcatctcccctcattttcttatataaccacctattagtctcctgtccacacacttgttcactcactcagttacacccccttctatctggcctcctcttctcccatccctccagccacccacccacaaatctattactcatccatccattcatctgtaaacccatccaatcatccatctagctgtctacccttctatgacttcatccacctccctatccattcacccgtctgtctgtccatacccctcattccccaatctgtccatccgtctgtccatcctccaccatccccccccatccatccatacgttcatccatccatcccccaccatcccatctatgcgtctgtttttctctctgtccatcgcctaccatcctcctacccacccatccatccattcatctatatcttcatctcccaccatcccccgacccacccatccatccattcatctatatgtccatctcccatcattcccccccacctacccacccatccatccattcatccatatgttcatcctccaccatcccccacccacccatccatccattcatccatatgttcatcctccaccatccccccacccacccatccatccattcatccatatgttcatcctccaccatccccccacccacccatccatccattcatctgtttgttcatcctccaccatccccccacccacccatccatccattcatctatatgttcatcctccaccatccccccacccacccatccatccattcatctatatgttcttcctccactatcccccgacccacccatccatccattcatttatttgttcatcctccaccatccccccacccacccatccatccattcatctgtatgtctatctcccaccatccctccacccacccatccattcattcatctataagttcatccttcagcatccccccgacccattcattcatccatctgtccattccccaccatcccccatccatccattcatctctgtccatctcccacgatcctccgacctgtccatcaatctgtccgtccctctgtccatcctccaccactgccccagccaccctccattcattcatccatcccccatccacccctgtatccatctgtctgtccatccttcgctgtctctcctttgcttgccctccctctagtcttccatgggctgtgtgcctggggccaccctcttctcctgccatgcttctctcctcgggccacctgcttgcccagcagtttgtcctgtgagagcacctggaggctcacgtcctggtcctggattcccttgggtacgtggccaatgtccattgtggctggggctgggtgggggctgggtcgtcacttttgttttgcagtttatttttcagagtttcagtttagccccgacctttccagccccccttcagttcctgatgttttctggttggaacatggtgttgtccacatggtcctgaagtctggtcactcgtgggctgtgcaatgtcattcctgccttgcggctaagtaaacttctggggccagcatgtttggcaagaagtggcctcctcagagttgggcatgaagctggttgctgtgttttgggtggggggtcatgaggggtccacccgacaaggcaatgctgggcccttaccaggttaggggaggccaaggtggcattggctggacagccaaggtccctgcagtgtcccccttcctagccttcccccagggccctcctgggctctagcaaaagcaaatccggtgcccactctgcccagcatccactcaggccccatcgatcttaagaatccatgcacattttgctttccttgacatcatatatttattacttgaatataaaaacagcattttgagttaccatctgaaaagcagccctctttggttctgggccaggatcccttgtatccagactggctcctgtcataggccagagtccaccatgtcaggggagtgggcctgggccttctgtgctctgcctggagcatatcccgggttgctcttgagacacctgagatgccgaggccatgacctgcgggcctagggcacttccccccagggcaaatgcagggtgcaccctgcggctggggcagatggcacaggcccagcaccaaggtctctgctctcctgagcatggctgccagactctccccacaacactggccagtgtttctggatgtttccagggagatacatgattgttttgcaccaatcaagccaagttcggcaatgagaaggtcatcgtggggtttggtcaccttcccactgtggccttggagtactgagccctcagccagagccagtgggccccctttagggtgggcatctttagtccccagagccagggtgtgctggaggggcttaggtcagggaagctgtccgcagggtctgcagcccaagcctggtcctgctagatgggggatggggtgtgtggtgtagacgagggtccatgtctctgcacagggagggaagtaagccaccccaggtccatgaggccagtggctatcctgtggtcctgattgttgccatccaaggcagcgtcccatttccttctgtcccttgcttctgaggttcggctgagatgggctggtgctgcagccaggactgggctgagggctggagtgatatgggccctgccatccgccctggccgtcccagggggaataccctaccattcccacctcgggcctagcactaggttcagtccattagtgcacaaggctcccctgtgttgggtctggggcctgtgggtagacagcatcaggtgtgtagagaagagctgtgtgaccatgcttggggagtgcagtgctgtttatccctttgctggagcgcccagtctgcacctcagtctcgggcggcggcccccagctctccctgcattcttccattctgtggctggcttaaaacagctcctccactcatgctggcttccccgaaaggttgtgttgacagtttcatttgtgggacaggtgctggggaaatggagagcagctttgggggcctgcactggtctctcgctcttgctgggcctgttttcccagctgtcggtggggctgggctccacagtgtctcttcacctatgaggtgcacccatgtccccgcaccgtgttgctggcgcagctgagcccagcgctgcttttcctcttgggggctctctgtccttgcagctggctccatccagaccagtgagcagcagtgctgacgctctggggatgtcacccgcagtgcgtgtcctccccgtggagggccctatattggtgcaagggcaagggatccagcggagttggcctcagtgggctggcgggactgggcaggaggatgcctgagcagccctgggcacccggccatgctcactgtgctccgggcagtgtggcctcgtggctatgccctgcccactgtggtgagcctggattggagctccgcatacttgtcctgcttctttttacccatgaaaaacaaacattctgggcagccagggggcaagctgggagggaaagtgctggtttgtctctgcggctgccaagccctcatggcccccgcctgctcccctggggctctggggccctgaggggcaacactgggctgggcccagcaggcccaatcccaccctgtgcttggcctcagatgcctggcccctgcccttttctggatgaggcatcacacacaccagccacttcaggcttatggtctcttaacttcatgcagtcccagccagaacctcaaccaggcttgtcctcagtttttactctgtcatgtgtagcagcaccactcttgtttctggccaatgtggatatgagtggaggctggactgctggtctgcagaccagtgttgccaggagctctcaggctatggtcacctgcgcctgcctcggggtcttgggcacccatcagtggagcagcttctcactccctgcttgctggccacactggccatgccacaccagctgtgtggctacaaatggtcccccaccctttcttggccctggcatctgcctctgtgagatgggagtggggtggccctgtgaaatggagggtgggctggcatgtggtatgagtggcagagggcctgggaggtaagaagctctaatgagctcttcctgcccttcccagcgggctccaagccgcccacggcccatgtttctgctaggtctagcaggaagcagaggagccaggttagagtcccaaaacccatggggagtgagccggctgcttccggccagcctcggattaatggcttttaatttagaatttaatcagtgtgcttccctctagagggctggatgctctggtctgggagtgagttgtatggtctgtgagtggggcgggcaggggcccatgatggccttgccaggctgtgccccaccccactgagcttactctgctttgcctgcagctggcgggcgctctggtcatggaggactgcaatgtgcactcggccgccagcatcctggcctcggtgaaggagcaggaggcccgcttcgagaggctgacacgggcactggagcaggagcggcgccatgttgccctacagctggagcgtgcccagcagcctggcatggtcagtggtggcatgggcagtgggcagcccctgccaatggcctggcaacagctggtcctccaggtaacagcctagtgacttgggaagggtgaaaattgccaagtgggaaaacaatcagtgggtcctggtggaccacaagccagcatgcgctcgcttattgcaagatttgctggggctcctggggaggaaaggaaaatgggatcccaggttgggctggaagtcccacttgggtgtactaggcaccatgtgaagagtgggcaggacacagcccaacactcagaacagcaccctccactgagccctcagggcccaggcagctggatggggtctgttctgggcagctctttggtctgcctagagacactttaggggtttgcctgcaccatgcctaaccctgccacagtgttcattgcatgcactggtgggtcagccccaggaggaggcccagagctctgcctgcagcttagaggctgacctgggagcctcattttctctgctggccattatcctcagactgggctccggcccctactcagcctcaggaggtatagagccttctgtgttccatggccaggccctaagaactctaaagttggggtatgcagtgagcagttagaccactgggacaccccattcccagcaccccagtgctctaacctgtagatgaaacagcaagagcccctggcttggggttaggaggccggaacaagtacatgcagggagacttgggatgtggtgtgattatcatggttcctgttactgactgagggctagcacagtggggagtcagggtggagctgtcccagcagccacggggaagggggctctcctcaccacccagcttagaggctgggggggttgcctcctgctgcggcctctgggttcttcacagagtgaccctagagggctctccctgcagagtcctgtctccctggctcagctccctgccccgctaaacccagcagccagacctccccccagcatactcccagcacctgcacctccacccgcccttctttggtcctgctgggccctgactctggggacctgcgcctggcacacacatgccaggagcttggggcagcctggcccttctcatctagagagaaagggagcaaacgctggtctctgttgaggcagccccatgggctctcctcacctggctggggcatgtggggctcagaaccagcagcctgtgtcaggccgagggacctggggttggtgactactccttgagtcttggtgtccagacttggtgtcggccagcaggcgtcatgcttcctacgtctgctcatgagacccacatagaaggcccagcccagcaccagtgcatggtgagagtcaaattaatgtccccagagggtccgagactcactagggggccctttttcatggcccctggtgctcagaggcctctggtgggtctcggtgctggggccactctcacagccctcagacttgagatactccaaaatgtgaggcctctaccctcaaacttgaggcggggaagcagaacgctgggcccagctgggccatatagggacagtggaagccagtgaccccgaggccgcctctcaggcgccagtgtgctcagtccaaccctcccagaccggaactgtcctcggacaggcagtgtgggaggacccaaggcaccccggagggttgatgccctggtgggaagatgttcccacagcctggagctaccctgacctcctcaggcaaaagacttcaagacctcaggctactgcccctccacctaccacccctgcccctgaactctccccccgaccccctacccttgattttctcaggctgggattgaagagagcatgtgttgccagggctgcagctcaactggctgggctgatgaggatactaggggaggcagggcctccttgggctggccaggtttcccagattggtttcagtaggaagtgcctagcgatctacctgctgagccacagggtcagagcccgggctttgggaagccagggcaatggcaaggcaggtagctgggggctgaggctggggaaccaggctagggggagtgctgctgcactcactgggctgctccagggtcctggctacctgcccttcatcttccagcaggaaggggcccctcctctagacagccagctgaaacagggctgacgcccacccagtggggaggggtgccatcagggaacttgccttgggctcgtcttaggtggataggtggctggggcactagctgctggtgcagttgagaagatggagccagcttaaagataagatgcgggcgcgtttttggcgcagtgtctggtcttctgcgctctgctccaggggttccaggcaggttggccctagatgcaagatacaggggtccagccagtggtagggtagctcacccctctgcaggtgggggaactgaggctcagaggggcacatggtgggtacctagaatcttgagcatgctagccgagtggcctctgtatatggcgctcagggcagcagggagtggtccctgcggaggctgttttctgaggggtctgcggagaagccagtgggaggcctgggcccgagccctttctcttgccagacccactgagtctccctgggttggtctcagctcatttaatctcagaacctgtttccctgttcgtgatgctggagccattggcttggcctttgtggggtttgacataagaaggtggctccagcctggcccttcccctcccatttttcactgcagcagaactagattccctagggtgtggcccacattgaggctggcctgggggagcagtgggggtgcattcggggcttctgtgcctcgatggggagaacccaagatacaaagtgggggtcccctgcagggcccttttccaggtccccatcgaactctgtggggacagttcttcgcaggcccattcagagtggcggctgggcaggagggtgaggggggatctgggagactggagagatctcacagagccgtgactactgtctcatcggcccccatttcatggcaggtgaaactgagtcgcagccaggtttgtgccagtgagggaggccttgtgctctgtgcatcgcagcacgggcacctgccctgccggaactgtttccccctttgcaggcggactgaagtgtggtcataaaccgaggccaaaccgaggcctgggaaggacttggccaaagtctttcggcgggaaagtgacacccctgccgcagggagggggagggagcagaagtccaggccggcagtgggtggggggaggtggtgggaagtggggggacagggggcgacccggggctgcagggccccgccccctgtctctggggggcgggacctcacattgcccgccccccgcccgccacgcccaccccggcccccgccacgccccacctgggcgcggccccgcccgattggctgctcgccgtgaccgccgccagatccgcccccgcggggagcgagtccgccgagcctgagcccgagcggccgaggcgccggagccgagcctggtccagccaccgcctcccccgctgctggccagcgccccccgagtcccggcccgatgccggccgaactcagacaggttggagggaagttggcttggggggaccctggcccggggtcggaggcagagggcggggcgtcggcctgcccgggaggacccgcttttgttccgcggagccgctggcccgaggcagctattgtcttgcgcccctggctgggctgcgtcaggctggggccagggccgggcgggtggcggtgtgagcgcggtgcccccgggtatgcagggcgggccgcagggtctctggagcccatccgcggggcctgggggggtcgggacccctggcagtttgaccctcctcttggcaccggcccggaccggatggacgcttcttggccagcgcccaggacaggtgcctggggacacgggtggagagccagggccttcctgagcggcttctgtctgtgcaggaaggaggctgaagtctgaagagggaagcccgggtaggccttctgctccctgagagggttcctcctctcccctccacaccccctacgccggctctgactcccgggacctgcaaaggagcttccggagctttaatggaagtcttctctgcctccgaggcgcacgtgatgggagggatagagacaggccctgcccactaatggatgctggaggagatctctaaggaaaacgggatcctccccctctcagcattgaggtggggggaggcataggcagtttgtcctctgctcagagcagtgctgggttcagtaacaggcagggaaactgagcagaggagagaccagccaagaccctctgtggtgggaggcaggtctcccacacacctgctacctgggcaactaggcccctgcctgtcctacggccctggtgtggcccccagggtctggccctcagaggtggagggaccagtttttgggaaatccatggtcacagtgtgtctgatgaccccaagctgagcttggggaagctgaggtggatgacagtcagccctgctctcccaccccaagtttgctcccccagcttggctttttggcatctctgcctggggccacgccctggcaggtgcactgctgtgtggagaagtaagctccaggtcttggagactggtcagaggctgtggcaccaagggaaagggcattttgtggtggccaagggcttgctgcctggtgagagatgccagcctggcttgtcctggactctacctgggagggccataatggggatggagaagattcattcattcatccatcggacagcagccacctcctgccctctgggagcctggcctgcaggtgtgggatccaggtgtgcaatctcaccttaactcattctctgtgtgtgctagccaggccttggacaggggaggggcctgcccctgcagtctgttcttcaggacacagaccgtggtgcatctgtgaagtccggtggtttgggtagataagtaatatgggaccagggcccagccacctgtgccccagcatccctctgtgtgttggtccaatcttgcttttctgctccctgtgttccttgcattttgccacaaaagtgagactgatgctacccagcacgtcccacgaccccagccccctctgtccttctcacctccttgtgaagaagctgagccgaaggtgcgtgatggggcccagagcccctatgctgggctcagccctgtgttcccgggaccctcttgtgagcaggggtaggtggtctacctccctggtcactctggcccctcccacaagcccaagggagctcatgggaaaccccaggcctgggcagcagcctgtttctgggccagtcctgggggccccagacctggtgcaccagagattgaagagccaagggagggatgagtgctgggaggccgggcggggtgcaagaggagcaaggatggggccccagctggggagggggtgatgagagacgactgacaggatgcagcatgtgggattgggctggaggtggggtgttcagggtagagcccatgtctagggtacagaggggagcagcccagagttgggtctgaggcagaggctgtgtggggctgcagggccagggtccctgagagtgggccagcctgggcaggtgcacgtcagacatggacactggggccagacagggatccagggactgcagccaactcctgttgagagtcagcccaccattccacagccccaccctaaagatgttgcagagagctgagccaccagctggctatgggcctctcactactctacacctcagtttctccatctgccagccagctctgagactcccagagtggatgctgggcagatgattggcagagttggtggcccctgtccctgtgtgttgagactctgtgaggccctgcatggataagggtctccgatacacggtggaggacgggaggatgtgtgctcacgagtgtgcctctgggaacagtgggcgccgtgcccttggggtgctgttagagcacacgggttgatgtgctcggcctgtgccgggctgggtacttgcacacgtgtatgtacatgcatgtgtccctgtctgaggggtcatgtatatgcatgtgtgtgtgcctgggcatgtgtagcaggggccgggctttcctgtgatcactggctgactcatgcacctgccacccgggtgaagtcatccctcgtttttagctccctgaggtcatttgccagcagggactcttggggcctctggatcctactgcggggctgctaggccggggctgatgggtggtgccgcagggttgccaggtcttgctgcgggggcgtggctctcctggaccaccccagctctgcctgtcagaccctcaccacagccttggtgggagggataagctgggccacagagtggcatcggggtcctgagatgtcctccccttttcctctcccgcttacccccactgcctagctagggaagagggggtttttctctgagtttttaatagatgtaaatatatacatatatgaggggctacatcccactggcagagtcctgggtaacgtttcctcagtcttgctttataccctcctcactctgtcgccagaactgcagcccctcagtgcctgggcccctgcttgaactcagatgagccccgcccagggcccagcagagagagctcagggcctgacacacatttgccagatacagatggggcagcccagccccagcagtgatgggccacacaagccttctcctgcttcagagcagtcccagctccccagtgcctttggagaagagcccagcctgccctgcctggcagcgtgccagttgtccccactctaggcctcagtctatttctttttcccagggaacaggtccccttttcctagccaggtccacagcaggcattccacctacatctcaagactgagggcgagatgaggcccaaagccttccttgccagattgccttctctgggggtgcttgaaatcccacttggactgtgaagttctaggtaaatcctcttccccctgccaggcctcagtttccccatctataaagttatctgtcatcctccaagaccctgcctgtgggagagggggaggtgccttctgtggccacttctttcctctgtcagcctgagggatacacctgtcctaacatgttggtgcaggccccttcctggacacctgcactgcatgcatttgggggtcaagtattcccccaggataggaccctgacctggggaggcttcccagcccacgagccttggcaggcaggtcctgagggcagcgctgagcatctaacctggctcacctcccaggcccaagaatgggcagagtctgcctctggagcctggcagagcttagtgtctgtgcaggccccagggggcccaggcaagggacccattgtgcagggaccaggggcctgggccacaaagcaggacctgtcctcctgctgaccctgccctggctgcctgggaatgtgctccgcctgacccacccaccagggcttgggtttcagctcctgcccatcctggctagatgccgatccccggatgttggtgccatgtggccctggggccaggcacctgtgcagtcagaggcccggggcaggctgtgagtcttaggtcctcaagccactcagcgcggcaggggttgggcctggctctgatgtgggccagcctatcctctttgagcctcagtttccccactggcaagtccagtcagtaggcatgtggatagaaaagtctcagtccagagttgtcttgcctagaattccagtgtcgtcaccccatgcagaatggtggcaagggcacccataggctcaaatctactgtgtctggtctctgatatgatgcccagagtctcagtcactgggggcgccagccactggcccgaggtagggcaaacctgtgcctacacaacactcaagaatgtctgggctggaaggaataaggacatactggtgctgcaggtgcatggggtgttctgggaactgcgtatttctgtcccttgagggcgtctggctggcgttggtggcgggaaccttagtgtggccacaggagtcagtaggcagtgctgaaacagcccccacaaggcttctatactcaaggtgtctggggcaggtgagggaggaggccccaggacaccatgatgtcccagctaggggtggtggttgacatcaggaaggcatgctgcaggtctcactggcacctcctggggcctggaggagcctgtggcagccaggccatgcagcttggggagggccctgaagacttcaccccccagggtctatgtccttatctgccaactcagcctgaggagacctgagatgggggtccagccccagggtccccccaggatggggtgccggggcagggttagcacctcgatgttcagagggcaagaacttattgctgtccttgtcagcttgggccgaaacaggccttggggtgggtgggttcaggaccaggaggaaggcaccctggtgtgctggccagcatgagctgaggcagagctgctgtgtgtggagacctgcactccaggggtgactgagcagcaggcctgcccaccaatgtccctccttgccccaggagcagagcccaggcagccaggcctcactggccacgatgccggaggcacctgatgtgctggaggagaccgtgacggtggaggaggaccccggcacacccacttcccatgtgtctattgtcacatccgaagatggcacaacccggcgcaccgagaccaaggtatggccaggcccaggcagtgggtgggtgagcagggccaggctgctgcagctgtcccacctgcagagtggacatggaagcttgccacgtggggcctctcattgctcgagtgggaaattaaggccagccagaccccagcaaagcagtttctaggcctctcgtgctaccccacctacctgcctatccatccaccaggtcaccaagactgtcaagacggtgaccactcggacagtacgccaggtgcccgtgggcccagatggactccccctgctggatggcggccccccactaggcccttttgcagatggtgccctggaccggcatttcctgctgcgtggtggtggcccagtggccacactctctcgagcctacctcagcagtgggggtggctttcccgaaggccccgagccccgggacagccccagctatggcagcctgtcccgagggctgggcatgcggcccccacgtgctggcccccttggcccaggccctggtgatggctgcttcacactgcctggccaccgggaagccttcccggtgggtcctgagcctgggccaccaggtggccgctccctgcccgagcgcttccaggcagagccgtatggcttggaggatgacacgcgcagcctggccgctgatgacgagggtggccctgagctggagcctgactatggcacggccacaaggaggaggcctgagtgtgggcggggccttcataccaggtgagctgcaccccgtcccctgtggctacctcctctgggaagtctgccctccaccccccaactacagagtgccccacttgtcaagtggcgcagttgagttagtcatgcatgttagtttgaattggccttggctctcgtcagggacagaagaaaggtggaccctggggtggtaggagttcggctgggcactgtcctgcaggcccagggcccaggaaagctgggaagagtgccggccactggccttgctccagccacactctgggtaaccagaacccagagccctggcccttgtcacagcccctggttctgtccccattgccctcagtttctgcatctctggagtggggatgtgaccacagcccgggtcaggattttgttgtgtgaccctggccaagtcacctgaccgtcactcctagcctcagggcaggcggtttgatgacagcaacccacagggctactgagagctaaggagatcttgtgccccaaggggctggtggcctgaatactcctcaggtggtcctactgggatggcttcatgcggagagggccatttactccccctacatcctggcacagccagagatgggcctcatggaagatggggtggttttgtggaagggaggtgagacggtctctccagcagccatagcagatgtctcacagaaacttgttttgctcgggattgggaaactgcccggtgacagcagtgagtgagtttgctgtcctgggagggttgcctgggtcctggtagccgctggctggggtttggcatttggctctgaattggttctcactgggctggtgcatgactctctgtgtccccaccatgctccgggccaagatacaggtgctctcagcccagcgctgctgggtgagtttgcagtcctgaagaaggtgtgatggggcagctcagaggcagggctggcggctgctgtgacgatgtccacgcgccccacttgcctgtgcagggcctacgaggacacagcagatgatggcggcgagctggcggacgagcggcctgcgttcccaatggtgacggcgcccctggcccagcctgaacggggcagcatgggcagcctggaccggctggtgcggcgctcgccctcagtggatagcgcccgcaaggagccgcgctggcgggaccctgagctgcctgaggtgctggccatgctgcggcaccccgtggaccccgtgaaggccaatgcggccgcctacctgcagcatctgtgctttgagaacgagggtgtcaagcggcgtgtacggcagttgcgggggctgccgctgcttgtggcactgctggaccacccgcgggctgaggtgcggcgccgggcctgtggggcactgcgcaacctctcctatggccgcgacactgacaacaaggccgccatccgggactgcggtggtgtgcctgccctggtgcgcctgctgagggctgcccgggacaacgaggtccgtgagcttgtcactggtgagtgggacctggccatgctcacatcccctgggaagagaagagtgtgaggctcaacccgggaggaacgaggccactcggcctgcgaccgcctgggaaagcacccggtaggcaggagtgcagctgctgagacgcttgccccaggagccaggcatcaggcccagacactgtgacaggttccccagtctctaccatagcagggaggctgacgctgcgcccctcgggcatgtcccctcacctcctgccttcacacctcctgcccccacagaaactctcctgggacccacctccttggttcccaccccaaccgtgcagtggtggggcttgtgccttgtgagagctgagggacaggtagggtcaccgtgtctctgtgaggccctgtggcctcaggagtgttagtgccacctgccacatggcagggaatgggtgggacgggacagcactgccacaccctcctctgcacctcctcccctttggggctccttcctagctggaaaccagtactgggtgtcccccggaaccactcacggcttttgttacttcctactgttctgcatgagctgggacatgaggagagtgggacaggtcctgagcgtggccacctggggaggtaggcaggcggtgcatatggtcagcacagattggccaatcgcaccccacaggcaccctgtggaacctgtcatcctatgagcccctgaagatggtcatcattgaccatggcctgcagacgctgacccacgaggtgatcgtgccccactcaggatgggagcgtgagcccaacgaggactccaagccacgggacgccgagtggacaactgtcttcaagaacacgtcgggctgcctgaggtgtggaccagacctggtgctaaagcccacatgcacaccaggccccgtcctcgtggtcccagatagtgtggaagatggcggcgagcttaggagcgccagagcttaggagcttcagagctgtggcacaagtcctgtggatgagaagtggggcctgatggagctgtcctcacccccaagtggtgtcccagtcttcccaggggcaccctctggaggggtctctgtggtaccgtagccctgcccagctctcacctaccttcccatcacttgacagccagagggggagctgggaccttcctgttcatctgcctgggaggctcatcccagccacctgtgacctctgcccttcccctcctacccctgggaggccctgctgaccccacagagtcctgggtccccacagtcctgcttgtccatcagggtgttcccgcgcagccctgcaggctcttgaccttggggtaaggtggggcccagagctgccattggggtggcgagggacccagaattgcccttgcacaggttcaggtctctctgagagtgcacctgtccctttccaggtcagctgggaggcagggaaaccctgtctttccctgcccagctatccccagccaagatagttgtctgccagggctcccctcctgaggcctgggggcagttagcttctcccccttcactgagctccagactgtggggtcctttcccattagtgctaggagggcagcagcagggcctattttgcagatgaagacaagcccacaaggccagggtggagccagggagtttctggtagccaggggtcacctggcctgctcttggccacacaggaatgtgagctccgatggtgctgaggcccggcggcgactccgggagtgtgaagggctggtggacgcgctcctgcatgccctgcagtcggctgtgggccggaaggacactgacaacaaggtgggcagggacggtcacagcctcataccaagggctggagagacgatcatgcaggtcccaggaggctggaactgtgggagcagcacaggggaatgggcttgtgggtctggggtggcgttctgggtgtggcccgcctcgcagtgaccacactgaagtgggcaccgtcctgcaggcagaaggtgtgccgtgagggcagaggcttcctcccatggacccttcctggcggttaccgcccttttgctcccctccactgaggactccctgttcctttgctcccggtgccctcatgcacaccagctgtggccagtctttcctgagggccagccctgtgcctagggtgccctgccccacccactcacctctccctgcagtcggtggagaactgcgtgtgcatcatgcggaacctgtcctaccacgtgcacaaggaggtgcccggggccgacaggtaccaggaggccgagcccgggcccctgggcagtgctgtaggctcccagcgccggaggcgggatgatgccagctgctttggaggcaagaaggccaaaggtgggtggggcggactggggtatcatctctaccatctcaactcctgccccagcggaaggctctctgtacacccacagcagcccatcatggaggctagaggacacctggtcagcccccaacaggcaggcagggaagccaggagtcaaggaggctggactgccctgggtcacatggttgatgggacccaggtccaaccttccccatctacactgtgggacccccagggagtacacaagggaaaccaaccaatgcccagacccagtctttctactccggggagagttccacttgcccatgagttgggaaggagccatggctgctgcctgctcactgttcacagaatagctgtagactgccaccaacctgtggggcagccccccatctgcctgggcaagatgccctgcacaccttctctactgcactagcagggtgtaggttcccaggacctccccagcagctgtgggggacctgtacgccacctgcccctgccccactgaccccaggcctccctcttcttgtacccctggtgggtgctcagtgcccagaagtgatgggatgaggttccacatgctgcctgcttgatccagggtgtgcagtgggaacctgaggcttccgggagggcatgggggggtgatgagtgctgcctgttcaggctcctctcctctctcctctgcttcctccggcctcccagaggagtggttccaccaaggtgagtccctttttatcctgctctccaggcctggcgtgtgcagtgggtacctgggaagaggcgagcacgttccagccccagggccctgccccacccctggcttcatcactcgggctgccatctttatgacagtggcaggtgggaaggccacggggctcattctgtaacctcagacttgcctacctgggcagagttgggcagagccaagagtgggcagggcccgggggtacttatctctaggggcaccaaggagcagtctgtttctctgatagaatggggcatcatgtggctcggagggatacaagggtcccatgagggtgagcagggcagggaccccaggtcatctggctccactctgctgccttctgaaggggtagaagcatcatctgacatggggagagtggttgacagtgggctcactgtcacagacgtgtgcaagccagggctacacaaatgttaggtgggctgctgtggggtttctcctggctagtagatcctgggacaatgtcctgaccccagctgggggagtttccccctagttctgccttactgtgtgacccaagtgagtcttgtcctggtcagccttcagtttcttggcttgtatccacctaccatccagccagggctcctggcttccctcagtctacatacctggcagttgcaagggagccaccgggagggtctgtggtacagctcccagcacctggtgggagatgagtcctaggggcagggctgggacatccccaggccccactgccaccaactcctacccctaggctaaactgtctgcccaaactctgacaacggtgctccactcccacaggtgcccaggcctggacatgggggtgccttttggggcctgggtaggagagaactgtgcccaactctcctgatacacccattccccatatggggtctgcctcacctcccaccacctttcccttccaggaaagaaggatggtgagatggaccggaactttgacacgctagacctgcccaagcgaactgaggccgccaaaggtgagtgggctgagatgaagccagctccactgggggatgtctgggctcaggattgccctggtagtgaagctttgagccatcaagcaggcctggagggcctcagggaacagatggggaaacaggcccctaggtgcaggatttcctggagggtgattcagcaccaggacacctgctgagggtttagaatgggaggaagtgccatgggtcatgtcaggcaaggttgggggagacaggcacagagaggccgagggcttgctcggcctcacggtgcgtaagaggtgggaaggtttggagggacgcctccagtggaggcagggcctcctgtgttagccacaaagctgagttatctgagggggctgggagccaggcgggcatgctcacatccaggttcagaggctgggccagacgaacacctgcagggacagggcagtgcctattgggctgtatgctgggatctggcttgagagagaggtctgtcctggtggggcctagccagttggaagagcctgcatgtcaccagggtggagggctccagccgcaggagggctgtgggggagtattacaggcagagcagggctgatgcagataccccagcggggagtgtgcttggagtgtgttggagcagaaagcccagcagggcaggagtagagggagcatggggcatgaggactggcgagggtgtgatgaaatgtcactgggtgggtacaggggagatcgaggtagtacccaagccaggctgaagccccagtttggagacaggcaagcttggaaggctgttttgacccctcatttctggagcactgggcagagcagcaggacggcgcctcagttgcccgggaacttggagtggttgccaggaagagtgcctcctgttgctagggcagctgccctggttgcactgcatcagttgacttacagagggtgggctctattgtcagtgggggagggtgggccctgttgctagggggcgtagctctctgcacagcttcagttactggtgaaagcaggtcctcttgctaggggtgtggccttggttatacaactctcagttactggccaatgctggtcttgttgccagggagggtgggccctattaccaggggcgtggccaggatgcatagcttcagggacctaccgggaaatgcgggtcttgttgctaggagagcgttcctggttgacacctccctccccaccccaggcctcctggatgctcctgctgccaggcaggtccaactgatttgagcctcagtttgttcctctgtgaaatgggaacgcttttccccttgggtgactatatgttgatagtaaatattacgtgactcatccacacccatccctggccccagctcacccacgccctgggagctctgaagcgggaagcgggaggggtatgatggatgagagcagattctgggtgaccgtgggtggcggttgccctgcacctaggctttgagctgctgtaccagcccgaggtggtacgtctctacctctccctcctcacggagagccggaacttcaacaccctggaggctgccgccggcgctctgcagaacctcagtgccggcaactggatggtgagggaccaggtcgggcagggtgggcaagtcctgagagagggaatcccaggcacctcactggtgcagctcctgcctcggctggcggggaaaggaggggccacaccaccaccccaggatccaagaggtgtatgggctgcgggcaatgcgtgcaccctggacggtgggaaaacctcggtggaggtgccgttgagcttttggggtagggctttgtcgggcacgggagcaggaaggtccagctggagagagcggtcagcgtctggaggtgggagagtgcctggcatgtatgtctgagcaaccctctccccgcctccgcagtgggccacgtacatccgcgccacagtgcgcaaagagcgcgggctgccggtgcttgtggaactgctgcagtctgagaccgacaaggtggtgcgcgccgtcgccatcgctctgcgcaacctctcgctggaccggcgcaacaaagacctcatcggtgaggacgcctgcaaagcccacgcctgggcaccgaactgtgcctgcagctttggggtcccatcggaggggcttggaggatgagtggtttgggagtccaggccccggccctctcgcttgggcgctgtcccaactggaggtagctccagtccccccggccctgtctctgaagctcagcgccctgctcacaggggctcctgtgaccgcctgcacacaggcggtctccaggggctctcctggcagtgcccctcgccctcgcgggatccctgctccttcctggagaggtggggcagaggtgtgttctgacacctagtcctgcccctcagggagctacgccatggctgagcttgtgcggaatgtgcgcaatgcacaggctccgccgcgaccgggggcctgcctggaggaagacaccgtggtggcggtgctcaacaccatccacgaaatcgtgtccgacagcctggataacgcgcgctcgctcctgcaggcacgcggggtgccagcgttggtggctctcgtggcctccaggtgtggaggggcggggtcggtggcttggggagccgcggaggtgggggaggggccaccactgaccccgcccccggccccacagccaatcggtacgcgaagcgaaggcggcgtcacacgtgctgcagacagtgtggagctacaaggagctgcgtggtaccttgcagaaagatggttggaccaaggcgcgcttccaggtgcggcttccctggccttccttccattccctgctcactttgccttattcccactccatgtgcttcacccaccctgtgtctgtgttttatgtctcagtcagctgctgctactgccaaggggcctaagggagcactgagtcctgggggcttcgatgacagcacgctgccactggtggacaagagccttggtgagtggtggagcttagggagcctagagggtggcgaccccagctgccccagttgcctgacccttgggtgaaggtgaaggaggagtcaggcctcccactgagacggcttccataggccactttccctgccctctgcctcttggctactcccttcccacagcatccgcgctgttgtcaagctggggtgaggctgccagctggcagaggttgggcaccttagtgacagagagcctctagggctacctgggccagccctgtgtgggcttctctgccccgatcccccctggctgccacatgcagcccgtctcctcctcctgccttgcagagggcgagaaaactggcagccgggatgtgatccccatggatgcgctgggcccaggtgagtgcagatgcagtgtggttggttttctgtgccgggaggggaccaaggcctgaagtgggcctgctggttttatggggtgtagatggtgctgggtggaggagagatatttggtttaggggtgcttagagggtgaggtacagggcagctagagagggattagtgctcagccaggggctctgacccacaagtggaggggagtctggagagttggcagggtgttggtgagagctggcaccagcctggatctccaggacagggtgggtgggggctgtctcccaaagcccctgtcccacgagtcccctgtgtctgggctgagagggagatctgctcctacagggcctccctcagagcgcccctcatgccccaccttaccccatctacagacggatactccacggtggaccggagggagcggaggccacggggcgccagctctgcaggagaggcctctgagaaggaacccttgaaagtaagtggtcatgtggctgtgggcaggtccccggtgaggccccgtgtctaggggttgctggagagcagcctaggccatgctgggtctggtctgggccctggggtacagctgggttgtggggccaagcccaggaagcagccccttcacgccagtcagtctgtgggtactgacaagtttgcagctcccacccactggggacaacactgcccggccacaccctgcatgggccagagcctgtgagctagtgtgtgtgcacccttctgtgcatgtgcgtgtgagagcccaccagggtccaccagcgatggcaggacctgctgcctgctgtgtgccaatcccctggcttcctgtgcaggcctgtgtgtgtgcacgtgcccgccctgggcccgtgtgagccacacgtttccggctccctgcgcccttggtgctacctgtgctgtcctggcaggccaacccttacatcgccagcctcggccctgcccctgccctgtccccccaggagctctaactaacctgctctattgtgcctctaatgcccacccgtgcgctgcagctcgaccccagcaggaaggcccctccccccgggcccagcaggcccgcggtcaggctggtggacgccgtaggggacgctaagcctcagcccgttgattcctgggtctagcttgcatgcctggtacgttctctcatctggttgttcgtccacctgttcctgccctctgggccagggcttcttgttagtctccgctgcctgcacgctctgctcttcccgcacgttccccgcaggactttggcctccagtccagcagcccagtggcccattcccggaaagaccaggcagaggtcagagagggagggtgctccctgggcccacagccctgtcccaggcactgtgggatcaggggcctgaggaaatgggaccagagtagggatgggcaccataccctccaacgcccttcggggaccagcaagtcaggatcagccctggtgccaagacccttggggtcagcccacaccacccagggcagatgcttctatccacatctccatccatgtagcctgtggagttggctgccctgccctgaggttacacgtggtcctgtgccactcagtggctgcagcgtccaccatcccctttccctctgcagggcccaggcccagcctcttgttcttagggcttggatcgtggaagaagggccaccctgagcagatcgtgccgtggagcttggagccccctggcggcaggggttggcagcgcctcgccccagccaagcctgactttggggacaccctcctgcccccccaccccactccccccatcctacctaactccctaggcctgagttagctgtttactgacatggtgctgtgtgtgagcgagtgacagaaggcccgaggaggccgactgggctgctggggcagggcccagggaggtggcagggaagggtgcctggctgggctttggggctggtgggataggagggtgcccctgggaacacagtgccccagtggtgcgggccaggtctggcgccaggggcaggcagctaggcagggagggggctgggaaagaacttggacttctaaaggcggagggtctccctgggcaccctgcaggcaggcagaccacggtgtggggggtgccccacaaggcccagccctgggcaaggaagctttggaagcagcaaggtgggggtcaggctacaggtgccccacctccccagagccctgcagtcacgtgaggcccctgtgcagtagagagcctttctccagcccatgctggctggggccggggctgccgcatctgcctggagcctgggcagcacctccgggactgaccttcggcagtggctgggggactgctttcagtgcctgctgttcgtgactcagaaacagaagaaaaacactgagaaaaagcattaaaaataagccaaaataagactattggtaaacacctaaatttttgtaagaaaatttaaaaattaaagcagcaaaggaactttttgctttctgccactcaggtctggcacaagtggctggcttctcccttgtgtcgggcctctgcgcgtctggggcagggccctgggtggaggtggtcccaggtgcccatctgctgtgtcctgcagaggctctgtttctggtccctgggtggccccaaacttgtccacttgggctcactggtctgtctatccataggagtgggctggctgggggctagccaggccttgagcccaggagtagaatcttggctaggggctggtctcggtgcaggtgaactcagctagcacagggttgattcctgtcctgggcctgggaactgggcccttggagcctctgaggtggctagcagtctgaccccttggaggagatggggacagctctaggtgtaggtgggcagaaaccagcactgcatcctcactcatgggccagggaggcaactacagggatgcgggagctggtctgagccattgcctcttctgtaagcaaggcccagtggggagtagggaaggagatgcttccactctgtgccacatggggcccagaggggctggtgctgctgcggggtccacctgtccccagcgcctgcttggtcagaaaggtgtgaatgctggctgactcctcttcgtttcccaggccggcagtcgtccccatggggctaacaggtgcccctggcctagctgcaggagggctgacctctgcaccactgtggctgggaggccagtgggccaggcgtgccacccagaacccagccagctaggggccccgcccttagcgttagcgtccgtcaaggggagctttgaatgtttggtgcccaagtcaagggcagcaggggaatggcagttgagaaggatgtactaagtcgagttatatctaaatatttagattcttaatttctattttatatttttaaaacatgatattagtatataagataatatagctagccagtgttagtaaagaagtcatgattgagtcttaaaaaagaacaatccagtgttgcagttcagagaggttagcatgtcagggcgcaggcctcggccgaggtgtgctttgcatttaggacacagcccggagccgcagaaggtcagcaggagcacgtctggcaccttcagtaccaggctgggtgagagagcccgagaggggggccgggggggcagtcagggccctgcttcgctgcctgggcccttgtagatggccttctccaggccgtccaccacctccctgtattccaggaacgattggtagtgtgtgcactcaaagcagctgctcccgcgcacgtgtgctaggaagtctggcgcacctgggcagatcacgttgtcagccagtagcactgtccccttccgcagcaggccacattcctgcaaacagaccggggggtgggggaggtgagggtcagaggtgcccagagaacctgccccaaaccaggatgggtgctcctcactaggccacggcaccacgcctgtgcctagcccctggggccaggtttccactttctgcccagcgtgactcctgcaggaaaggactgtacaagacttgggtgccaccttcagaacatgggccccgtgaggacagggacctttctctcatcaactcctgtatccatctcaggagtatccatcccttagaacagcatgtggcacacagtaggtgctcaataaatgctagctgggtgagtggaaacaatggggccctcaacacccagtgccaggaactcaggcctatgagggagaggcacccaaggagaggggttgctggtatggtccctggagacaatattggcctgaccagggtgaccctgcagggctgaggtggggcagacctcccatcaacaagcctgccccttggggtcagttctggacatccccaagctcctgcatttgcagaccccccatcttcaccagtgcctgggccctgggaggacacagagttcctctgcctgggttctgtgcagaaggaaggagttgttactggacacgcagccatagggcatggcccgtggggtccactatcgggagaaacctcataggatgcttgcctatctatgctatcagaaaagggtttgcttacatcacataaacaagaaaccttgagaggaagtgtttgcctatggggaggaaggacctaccagggcaagggacaccccagtcaccttgtcttggaaatttgacttagtcaccaaacaaaagttaacaagcaatctcaaacatctaaagtataataaaatcaatttgcaggcaggtgccttgaaacactggtatccgaccccacatgcctctgggatgggcctggagagtcccacagggcttgcagctgtcctggtggtgggtggcggtcgtttccagcctgtatgctgcagagaaagcagggggctttcatgtgacagtatggacaccacacggctgcaaggtcagtgaggtcaggggacagccccaaggtccggagttgagcaggaagtaccaccatgaatcatgatgtgttttcatttagaaaaaaaaaaaaatgtcctagcaatgtcagctgaaaagacgtagaacaaagcgccacccgggaggaggacaatggcctaggccttgagcagggcggctgccttccagtctgggccagggaatgcatgagtgaggggcctgggctcctggacttctcgggttgcgccaggggactcaggagcccaatctggtcatcagggatacagaagacgtcagcggactgaaagacaccagaccactgcacctgcacgagttaaacaggaaagaaggagggaagggcagaaaggagcatgggtcacctttggaggctgccaggggcccactcctttacgaaactggtcaagaggggaaagaaggcagcacctgtcctgcctgtcgcccgacactgcaagcctcctaccagctactcagaccacctggagaactggctaaacatgcatcagcgtctgagcaggactgaaaatctaatgccgtggagaagcgacagtgtcagaggagcaggtgacactatgctgaggtggttttcatctggcccaccctccttagactctcctcccttcaagagttggagcctcacagaggttgcagggagccaagatcgcgccactgcactccagcctgggcgacagagcgagagactgtctcgagaaacaacaacaaaaagttggagcctcagaccaa

SEQ ID NO: 251 - DNA, 284331 bp, Homo sapiens
  source 1..284331: mol_type = genomic DNA; note = NC_000004.12:101790482-102074812 BANK1 [organism=Homo sapiens] [GeneID=55024] [chromosome=4]
gaagtgggggcagtatggcagtatggaagacctagaaagggacaaggagagctacaataacagcggtctaaatatatcctaggatgaaaaggtgaggaaggaaacaggcgcagaagtgttataagaaaccaaagcggccttttgagaagggatgtaagagcaggcccctgagcagtttcacttcctctgggcgcccagcagagcggagccctggccttgcgggcatgagccccggggctgcgtttcctgagacctggccgcagcctccgcgggtggcaagcgggctggggagagccgagggccaaaggaagagaaaatcgcggggagtctctggccgggagagtccaggtagcgctcggcgggcagcagtgcgcaggcccctcggcttcaaccgccacaatgctgccagcagcgccaggcaaggggcttgggagcccggaccccgccccctgcggcccagcgcccccaggtgggtagtcgcgcattcggaggggcttgacgccgaggccgggctacggggctctgcggagaccacgggccatcgttagacaactgcactcgggcactgaggccagggcgtccctgagacagggcttctcctttttatcctgccgccaggcagcccagagggttcttctgtccctgacttctctgaggggcatctggacgccacgaggagggagcgcgctgggagttctggccagcgggctaccctcagtgtctgcaacttctgaggagctggaactttccccagcacccgggtcagggtcctgtagtttctaaaatcactttgcaacctgttttaaagcaatgcgcgtttaaaattatacgtaattattttcaacagtcggtaagcacagaaaaaccgctcatgtgtagcgtcacgcatttacctgcccggcctgacaaatcccagcctggtgaattggtagccctgcttcttggcaggtggctttgcagagaaactctaccaacaccacctccctactccactggctttactaacttggtcaaaggaaaacggtcaacttggttgaatgcagaagtagatttatattttcaaatggacgttaaggcagttttatttagttctttttgaagcatttcaaatgcatttgcaaattactcagtgatataaaaatgttttttaaattaaaaaacttcacttaggtattaatattactggagtgttcgtggtgagaaatgcaacaagaaagtatattctgagtgaaagtttcttaatttgctgaatagaaataaatttctcatacctttctagaattttttaggtaatgtaattttggttgtagctatttctgttggctagtgcatttttacataaataagctttagggattgctttcagttaaataagaagtatatttgtgtcaatgaaaagtgacaagaaaggacttagagcccataacttaatattattaatattttaactattgcatattgacattcttgaaaactgtggctctgatggtcttcagcagagcagactttgctagcatctataaataaaccaaccatgtctttcaaactttgagcaggttacctcttttgtaatttcagtttaacaattttgttagagaatggggtacagtttgtttcaaacttctagattaaacagtttaggcagaaaatgccttttatttcacttgatactaagcaatactttgaggcacttgctattgtgaataatgcaagagtaatgtgaatcaatatttatagcattccaattattcttgttcctcccatgcattccgctccccccccgccccgcccctcccaactccttgggtccttctccatgcagtatttatcacttgcttcagttacttccttttctggccaacataatgaaacttttctaaaaacgaattgtcttttgacattatcccatgcccatattcttgatatgagtaatcttctagcttttataaatccagtggtttgtgtgtgtgtgtgtgtgtgtgtgtgtgtttttttttttttaatgaagagctccctctctctccaacaactatcttaatatggcacattgggggtcaattggtccaactgcctcatttagagaagagagcactgagatccagagtgtgagttgctcatggtttcataactagtaattatttgaaggtcacccattcattaacttaacaaacttttattccctgccaagagtcatgtagtagtaataagaatgtaaaatggtaaacacagtttcatgcccaggaaggtatatttctagcaggagatagaatgtactgctagacaacattagtgtatactgccatcagagatttattaactgttgagtatcgacttgttctttaatggaagcaagaaaaatagaatacccagttctctaaaacaaggtaaaaatgatgcacaatgggtgaaagttctagttagaatgtattttctggtttgtatttaactatatattactatcaatgtccaaaagagagattcttcctgttgtattccaaaactaatgattttaaaaatttaattttaactgctgttttaattagggagtgattatttattaaatcacagatttttctccacaccatagttttttttaaatttttattgatattattggatgcatctgatgaaactttaataaatgatttgcttaagaacagaaagcatgaaagggtggaattagcatttagactgtttcaccttacgctggatgcttatacttgtaaggaacatggtttgtctaggtctctgctctctagcttgaagttcttaaagatttgaagctttttgctttgactgcaatcttccaacatagccaacgtcctacacttgttccactaaggaaataacctggttccatgctggtggctggaaaaacttgctttcttcagaccaatctggaaatgttctgataaggtcacttttgctaggattttaaagacaaggagtgctttcaggatatcttcaccataataaggaataattctgaaaaatgcaattgctgaagatttcaaggttaaatatcagcatattcaaagttacacttgggacagtagaggaaccttttctgcaatatctatctgaggatgtattgtaggtggttatgccctacttatgatggtcttttgactcatactgcctcagatctagtcccagcttcattgcctgtctcatctgtgaccttgaataaataatgaaatctgtcactgtcttagttttttattttgtttattaaaaagcaaaatccaagagaagaaatcctgtatatgaaagttgtttaggggattaaatgggtaaatgcaggtgaagtccttttcagggtcttataacaaatagtaactgctttatacatgctagttgttatattaattcttaggtcattgatcagtagtgtcatattagcttatataagagtgggagttcttagtgaaaaactgcctcatactgattgcctcatactgacttgaaggacaacttgatgggtgaaggaatcaagctctcgtatcaaaaaaaataggagatatggcctcttgtataaagatactgcaatatccttggggatatattgtggttaatagttctgaaaggagaaaagaattcataatgagaagaactaaggataggttgattaaaagggaattaaactatagcagttgcaggaaagaataaagaaggaatttaataggacaaaatgagagcgtgctctgttttctcatatctcagagtaccagttgtgactcagtttacataatatataaatatatttgaaaaaaataagcatcaaacagaaaaactgtggagtatttcaacttacaagaagatgagaatctattttaccaaaatatttactactgggttaaaacaaaattacaatataaaatgaggaacatcattcctgacaaaaataaatgacatgttttaagagtttaaatggttgttgcttaatcacctaagttacacttattaatttactgctttcttcatagaatatagagtatcttgcagtaattttggagatagctatgaaataagaatagaaaaggcaaacatttcataagtcatcatttaaaaagtaagttattatttggccttgtaatcctttcctttcctgttttaaatataaagaatggtatctaagttttagtgcagacattgaaatagtcccagtggtggaaatatcagatatcatatggaattatacccctgcagtaattagtttttagtcagagaaaaacaatgagccttttaggcatttacccctgaattgaaatctctttgttgtttctaagtgttctgcactgaaataatccagaaagatgacttccctctttaatcatgaagagtaattaatcaatgcttttgatcttttacaagatttcctttatatctggttcattaaaatatgtttttatgtttcatcatactatgtgtcatatctttgtttcttctaagtgtctctgccattttcccatattattaattcccattgccttgttttcacatgtgttctacattatagagacacactgaaaagtataagaacagtctctgacttggaattccatttactatatgcctcattttttttttcatctgatacatgctgagaataaagcctcctttggtcgggaacaatattctcattccttttttgttacaggatcatgtctaattttcagaggaataatatagtgtcaagaccacttgaaattttagccttcttgtaatagcttccgtttattgtgtttctactttgaattcatatgaaatgggaatcatactagttgataagtaagggtgtcagaagagtagtgtctactctggacaacaagtcatattgttcagtatagtcatatgaaaatatttaataattcactgtgttcttttatctatggaggcttttctaaactgttaaaggtgaaacttttaagtcaccatgtttttttttctaggatggggagtggagaaacacaaaagggcatgattctataaaatcattgaaatggcaattgtagaatatttattgttactgtctgaagaatctctaaggttacacattttctattgattgcattttatttagatttaatatattgatacagtttaaaatattgggagaggagtgtgtttttagtacagttagtaaattattaggtcactattgtaaaaaagtgagtgacataaaattgaggcaaaatctactctggtttcaattaatgggataatttctttaattctctcatgatttctcagtaaaaatgtagaactttcactactttaagtacttatttgtaggtcagagacctttcctttatcacttcctatagatccacagccatgtaaatcaagtagaatgaggacaattattcagattcccagaaacagtcacctgggccaagaataggcacatgatgcaagccagccaactggttgcttaatggccagtgccctgtgttgtcaggcttatacagagttgttgaatctgtgtaagtataagccacatatatcatctgtataagccacaaagtccttttgtcttattaaatgaaagaataaagattcttatcagtagaagattgatgaaagatgagattattgtcagtggaagatccagtatacagtttaagatgacagttagttgcctcatgtttaagatgcataagtagaaagaaactgtgatgaaaaaactgaggagaccgaaagacaaagagagtagtctcaatttctgatttctagtgacggagcagctgcacttgtttttctgatcttatttgcccatgaaattgtttatagtatccttacatgaatttctccttacatgaactactttgagtgaatttctctttttgggaggaaaaaaaaagtttgggctagcatacctttatttatcaaaaactgccagctatcagcttctcttttcaaaagttgttattgttaaaatgatgtcttctacgtatcttccattgaaaattaaacaatctgagaatgaaatctgttcctttcatgcactaggaatagagtatgagtaagtctggtggtcctgcagatgagcatatttcgagagtcctgcctttattagtgaaatttgaagaaagtccatgcatttatttttaggttttcaaacttaaatccttagagctggagagaaaataattcacccaaaggttagtattataagaattaagcactgttaaaaggtttagagctttgaattatgtagctatagatttataacaacaacgttttcccatgttttgttaacaggatatttttacttatctgaaaattttatagcatactgtttctggcaagtttttaatatacatttcaattgaggcatacattagtgagagaatggttggggcatttatcttagtaaatgtcacaaaacatatttacttagtaaaacaggaagtaaaagagtaagatgagatataaaactagggattatcttcaactcctctggtatatgaagaaatatggcaccattaacaggccattaataaaactttatatacaatctcagtggattaatatcagtatgaagcaatacaatactgtgttttagagattagtcttttaccagcctatttttctgcaatggagtagaaagtatagtatctccattaagttatacatagtgtgttattaatgttcaccttagaaaacaagaattcaatgtgttcttgctaaacttcagtgacaggaacaaattaataaagttcagatgtgatcaattaagtccaatgatgtcagtgaagaaatgagacacagaaagacaaaattttttcaagatgtgacaaggttacactcacaatgttattataatgagtgaggagaagaatctgaaaagtaaaccaaaacctaattgcataaatttgtgtaaaaaattccccaagtataatgaggagctcttgaagagtttttaatgagggatggcacatgattagattttgtgttagaagatcacatgagctgctcttgatacaattaattggaaaagggcagcaatggaagttagtgaacaattaggggtttgcaatgagtaaaaatacagggagaagtggacagatttattaagaactattacttacataccttttgtgatatagtagatttggagtctgaaggggacaaaaatgtgaagaatgacaccaagggttgtggtctgtaaacctaagagaatcaagaatgtgtcatttactccattggaaaggagtgaaggaacaagaggacaccgggagggcatgagagaatgtcatttcaatttcagatctgttacatttgaggagcatgagaaatagtcacattaagatgtcaagtaagcagttcgattttaggatctggatatcagaaaggcagttcagactggagatataaaattaagaaaaacattgtatttaaaactacaacaatgaataggataacatagataaggtgactcaggatagagacctgtggaaaacaaacatttcagtgttggtagagaaggaggagttgctcaatatgactgaggagaggctaaaaagaaggaaaacgaagatacagtgagaagaattcaaaaatagaatgtttcaggaaggtaagaatggtgaactggcccaaattcttttgataggtcaggcaaattgaagcctgaaatttagccaatggatttggcatcatgaaacttacagatgaccttagagaagtaagtagctttagtaaagaggatgagagctgaatgggaatgagtggaagaaggtaaggtgatggaggccatggagacgccctttagaaatatggctgtctgataagcagctgaagatgtggcatcaaggaaaggattttactttcattgttgctttaagatcagtgtcacggcagcaatttaattgttctcaaaagccgatggcgtcacaccaaaggggggttttctgctatgaaaacttatagagaacagctccatgaattccattagtaatacattttaatgtgtagattttcttatgtgtttaagaatttctgtctcttcaaatggtatttctagttctagatccttgaggaatcgccatactatcttccacaatggttggactagtttacagtcccaccaacagtgtaaaagtgttcctatttctccatatcctctccagcatctgttgtttcctgactttttagtgattgctattctaactggtgtgagatggtatctcactgtggttttgatttgtatttctctgatggccaatgatgatgagcattttttcatgtgtctgttggctgcataaatgtattcttttgagaagtgtgtgttcatatcctttgcccactttttgatggggttgtttgattttttcttgtaaatttgtgtaagttctttgtagattctggatattagccctttgtcagatgggtagattgtaaaacttttctcccattctgtaggttgcctgttcactctgatggtagtttcttttgctgtgcagaagctctttagtttaattagatcccatttgtcaattttggcttttgttgccattgcttttggtgttttagtcatgaagtccttgcccatgcctatgtcctgaatggtattgcctaggttttcttctcaggtttttacggttttaggtctaacatttaagtctttaatccatcttgaattaatttttgtgtaaggtgtaaggaagggatccagtttcagctctctatatatggctagccagttttcccagcaccatttattaaatagggaatcctttccccatttcttgtttttgtcaggtttgtcaaagatgagatggttatagatgtgtggtattatttctgagggctctgttctgttccattggtctatatctctgttttggtaccagtaccatactgttttggttactgtagccttgtagtatagtttgaagtcaggtagcatgatgcctccaattttgttcttttggcttaggattgtcttggcaatgcaggctctgggtatatacccaaaggattataaatcatgctgctataaagacacatgcacacgtatgtttattgtggcactattcacaatagcaaagacttggaaccaacccaaatgtccattaatgacagaccggattaagaaaatttggtggccgggcctggtggctcatgcctgtaatcccagcactttgggaggccaaggtgggcggatcacgaggtcaggagatcgaggccatcctggctaacacggtgaaaccccatctctactaaaaacacaaaaaattagccgggcgtgctggtgggtgcctgtagtcccagctacttgggaggctgaggcaggagaatggcatgaacctgggaggcggagcttgcagtgagctgagatcgcaccactgcactccagcctgggtgacagagtgagattccatctcaaaaataagtaaataaataaataaaataaaataaggaaaatgttgcacgtatacaccatggaataatactatgcagccatgaaaaggatgagttcatgtcctttgtagggacatggatgaagctggaaacaatcattctgagcaaactatcacaaggacagaaaactaaacactgcatgtcctcactcataggtgggaattgagcaatgagaatacttggacgcaggatgcggaacatcacacaccagggtttgttgttgggtggggggaggggggagggatagcattaggagatatatctaatgtaaatgacaagttaatgggtgcagcacaccaacatggcacatgtatacatatgtaacaaacctgcatgttgtgcacatgtaccctagaacttgaagtataatttaaaaaaaaaaagaaaagaaaaagaatttctgtctcgtatttttcattccttcttctatgtttctggagctcctccttctcttcttcccattcctctcctctttccttttttctttttttgtttttttggtattgatcttaatggagaataaatagttgacacttctttctgtgaaagccttggtacagtgttgaattattccttagctttactttctatatatcatcccttcctttttatccatattggaatccattcattctcgttaaaatcctgtttttgcatttgcttagtagttactgtcacaactacttgataaagctctactcctgaataaatctttctggctctattcttcctgtgtgaatctaagagactgactattgctagataaaaacacattcaaacaggttggtaatataaatttaggcaattcttgttacacgttacttgtttcagacaagatttgtttttaaatttttcaaattttttgagatggtttctcgctcttgtcacccagcctggagtgcaatggtacaatctcagctcactgcaaactccacctcctgggttcaagcgattctcctgcttcagcctctcagatagctgggattacaggcggctgccaacacacctggctaacttttgtatttttagtagagacggggtttcaccattttggccaggctggtcttgaactcctgaccttagatgatccacctgccttggcctcccaaggtgcggatgtttctgtcatgtcagattgctataatcttacatgttttctatattctgatgggcaaaaaactgtatgctttgctacctaacactgtaccctctagacatgtggctgttgaggacttaaaatatgtctggttcaaattgtgatgtgctgtaaatgtaaaatgcacaccagttttcaaagactgagcacaaaaaatagaatgtaaaatctctcaagaatgtttatattaattgcatgttaagatgatactattttgaatttatttgatgaaataaaattagtattattgtaattaacttactttttatttgttgcaatatggttgctaaaaacattaaaatgacatatgtgccgtgcatttgtgatttgaattaaattttctgttagatagcaatgcactcagctttcagaaaaaaaattccaatgaaataaattagaaattttatttctctctcatgacatattgttgaatatgtattatgagattactctcataaaaatgtgagcaaaattcacagttcctccagcagttgagagagaacctctgtctattcatgctcaccacacaaggcattttcatagtgatattttgctactattttaattagcatttgtctcttgaaattgagtgtttttcatatatttctttggcattttgatttcatctgtgtgttatatattcacatgatttattcatatttctcttgtgctttttgtcttaaaaacttataagaccacattacatatttaaaatgtaaactttgtcttatgcatcacaaatatttttcttttatcacttatttgttaaataattttgattgtaatatttgctgctgttgaacactttttaacactcattgtgtcaaatatacttttctttcatagcttctgtttcttgtcttggctgaagacaccagtgcgttcctcttgaagtccagccacctgcctgctagggtctaagggtcttttataggcacaggatgggggcgtggcaagccagggtggtcttggaaaatgcaatatttgggcaggaaaacaaaaatgcctgtccttacttaggtctgtgggcataggcccggggatagagccctagccagggaccacaccctcctctacccagtacttcccttcccactttcagtatcatttaaaggaccacgcccttcccagtacttcccttctgtatcagtgtcttaatgatttttgtgatgaaggcatttctaacatcatcatacaggtaaaagagtaatagttgatatagttctatgaataaagctttagtgacataatcagaattgcctaattgatgcctgaagtaatttattccctacaggttataaatatatacaatgtctcacctagatctgtgaaggtcaacagaatagtagaaagcttccattaagcaaatttctatttctgagcaacatatgggtaattaggaagcatttataattatggaaagaaaacgggctgcttttttatatatcttttatgaggactagtctgctaagaagttagcaattagcacacattacatttctgctttcactaaggatgtattttgtgtttgtatgtagtaatgacctcttagagtcatattctgatctgttgcagaaatgatctaatggctgctttacttagtggttgtaggaccgtatgtaacttcattataagacctctctatacctcacgtttttttcttttggaaaagatgaaaaaacaaatagtatacttggaataaaattggtgctctgtaattgacagttatggctgttgctgggtgagtaggtgagttaccatgtgggacattacgaaagttgacttgtacttttgttacctgatagtcaattcctgaaatatgtggacacagacttccatggctttattcctttagtactctgttgcccaaaccgtgttctgtagcatatactgtgtgttctttggaaaaaaaatttctgtggtgaaatgttctgaatatgcatattaggatatttaaatgtgtgagagattctgcaacaatgtctcttcaatttcctctaagacattgtttcacaaatatttatttaactatgggatgcattgttgtctcaacattgatagagaaataagttcttttgaacaaatttgtcatctctattaaatggcaactagttcttgagagaatgattgtttcaggcagaaattggtagtactgctttcagttatattttctttagtgttatgcatgccatagtgtaaataaagttatgatccagtcttggtggccatattttcattgagtgagagggagggaattaacaggaacagaaaattaaggggctatagtatagggaaattggcattggtaggctgagtagtggggcacacacaatttttctatttcttaaattcctttagattaattccagctatttagttggggtaagttagggttgtgctagcgaaaatgagaggaaaatgagaaagtggttatctattagggaaagtaaagtgtgtgtgaatgaaatagaagtaggaaagcacacagagaattgtaaatacagttgactcttgaaaacacagatttgaacttcatgggtctacttatatgtggatttttttcaataaatatattggaaattttttggatatttgcaacaatttgaaaaaacttgctgatgaactgggtagcctagaaatatataaaaaggccgggcgcggtggctcacgcctgtaatcccagcactttgggaggccgaggcgggcggatcacgaggtcaggagatcgagaccatcccggctaaaacggtgaaaccccgtctctactaaaaatacaaaaaaattagccgggcgtagtggcgggcgcctgtagtcccagctacttgggaggctgaggcaggagaatggcgtgaacccgggaagcggagcttgcagtgagccgagatcccgccactgcactccagcctgggcgacagagcgagactccgtctcaaaaaaaaaaaaaaaaaaaaaaaaaaaagaaatatataaaaaaaagaaaaaattagacatgtcatgaatgcataaaattatgtcgatactagtctgttttattatttactaccttaaaatacatacaaatctgaaaaagctaacatttatcaaaacatagtcacaaaaatacagaccatacatgttgttattcacatttaagaagaatgtagacaactataaagatgcagtattaaatcataactgcataaaattaactgtagtaaatactgtcctgctgtaataattttgtggccacctcctgttgctactgcagtgagatcaagtgttgggagtatctgctaaaatggtgtatgatgacagtcatctctgagtgagtagtttgtctgtctaggaaattacatattacagtacaaagagatgtctcatggttcttgtatgttcttcatcttgtaaaccttgaataatgccatgggactcatgggaagtaccactagtgatgctggtagtactcccaagaagaagagaaaagtcatgacattacaagcaaaaggtgatttgcttgatacatactgtagattgaggtctgcagctgcagttgcccaccatttcaaatggtgggcaattcatcctgtaaacagatgatgtaaacttacagtattgataaatacagtacagtattgtaaatgtgttttatcttccttatgattttcttaataacactttcttttctctagcttactttattgtaagaatatagtatatcagacatataagatacaaagtatgtgttgataaatcgtttatgttattggtaaagcttctagtcagcagtagttgagtttttgaggaatcaaagttatatggggattttcaactgctcaggggtcattgtcccaacccctgcatcgttcaagcatcaattgtgtaagaatattttgaatgtgtgtgtttatgcagttaaatagcatgtgtgcatctcaactaatcaaattattttgaaggtatttcacatgttagactatataaatctgccactatgtcaataatcatgtgaactatgtaagtgacatctcatttaaatattgggatttcatacatcaaaatgttctaaaattaagaactatttgactgcagtggctataaacagatttttttcatgttagaaatgtttgtcaatgaaacatatttaaagcaaacatatgggctgttaagagtcatctaagcaaattattgttgaaatatttttctatctaaaatgacattaacttacataaatgcaagtaatttagacaagaatgaattttatgtctttgaggttaactaacttaacaggacatatagaaaacaacattaatatgacagtagctttagtactcaggtgggatgctctttaaagaaaagggtaacctctggcatcagttcagtagacataagcatgttaatagatgctggctgactagttagtaccaagagtgacattagagtagctaattaagtatctgaaaaaggacaaataaagctgtagccgtttctgaatgccacatgaacagcctcagataaataaataataaatatacaaatatttattatttgtataataatacattatatacattatgtattatatacatataaataatatacaaataagtttgtatattatttatatgtacagcctcagataaatatacaaataaagtcgtagccatttctgaatgccacatgaacagcctcagagttcttatgtccaatcttaaactaacaccctggttttggcaatctttttcaaactctttggtttgtggaagagcttcatttgattatgaaaaaaaatctttaaaattcatgaagccttttacacaaagataatcttaaggtattttccaatatgaaattaacttttaatctgataacaagtagtatattttggctaagattcctacagccttttaatataactttgaatatttagtgaactataatatcttctagggcaagtagagagaaaaagtgtgattagggtctaaaagcaaataaaacttaatatcctctatgtgtgcctagaatattaatatattttcttttatttttctttttctaaaataatacatgaacataattgaaaatatgtaataaaaacaaaaaactggaaaaaactgtcatatatgtacttctaggttttttatacattacttttattagttttacttgttcagttttgtagctttaatatatttaatatttgtacatgctttaatgttacattttcatggctatttggtgaggtgtcatttttcaatattttagttttgctctcgctccatataaatctattatacaatgtttaaaaaaaaataaaaaattaagatccttgatgacttattgaataataggatagatcatcctccatataagacgactattaattaatctacagaaagactgagtagttcttaataacatagaaatacgttgcactggatttgaagttgaataagtacaggatgaagccttggctctgtcactaacagaacttcactttttgccagctatgcaacctctctgatgcctaggagaggcaatattatgtatattgatactcacattaattatccatgagaatacttggttcataatacatggtgcataatagtaatgcaattaatatctctgatctgaacaaaaacactgcagagatgaaaatagcttttgctcagcacttggaatttagtatattcattgagaaagagtagactaaaggccccataatcttatgcagggataattatccatcattcatttattcttcaaccatttattcttgtactcctgtgctcaattcaggggatacacaaaaggtggctactcccatcagggactgtatttaagtgaaataggaatagaacaagttgaacagctctatttcattttatctttaccctaacccaatatcagatgactcaaataccctaagttcacaaaagtctgaataattcagccatgagaactagttagcaaggagaagcaacagctaagagtgttttctttagcaaccgggggtgactactgatgcataactgctgttccagaaaatcaccagtcatttcagaaggcagtcatgagtacagtcccctgggacagtgctttgcaaatttcagttattctcataagaccttcctcaatttttgttattctacctgtcctcttgtacaagaaaaatttttcttagactgactttcttttttagcttaaatgtcagatattttaaaggagcactttatatcactgccgtagataagaaaatcactactgccataagtagaaggtaaacatacaaacatacagattgaaaataaaatggttgaaaaaattatagctaaggacaggctctgggcataaagttcactctctttgatagtgttggaattcatgaggaaccagagctccaaaccgagacattgtcctggaagtcatcaggattggataagtattctaaaaagaaactgactttctccctctgtgactgcctgccactatgtctcctggagattggatcccttccactgttctccaaaaggaggtttcactttccagaaagttgaaacaaagttttgttagcagcaggtgtcaggcactatgataaatgctctacatgctttatcttccttaattctcacactgattccataggtggtgttatccacgtgttacaagcaggaaatctaggcacaacaaggttcattatttgcttcaggccatatagttagtcagtgatagacctggatttttaaaattcagggccgggcgtggtggctcacgcctgtaatcccagcagtttgggagactgaggtgggtggatcacctgaggtcaggagttcaagaccagcctggccaacatggtgaaaccccgtctctactaaaaataaaaaaaaaaattagctggctgtggtggcgcacacctgtagtcccagctactcgggagagtgaggcaggagaatcgcttgaacccgggatgtggaggttgcagtgagtggagatcacacgccactgcactccagccggggtgacagagcaagactctcaaaaaaaaaaaaaagaaatgaaatttaaaaaaataaaaaataaaatccaagacagcctgacttgaaagcctggcctcttaaccactatatgtttatctgaaataaacttatttaattctcttgcaaatatatatttgtgctcataccagaaaggttttcctcccgtgtagacatttctgttttttagataaataaggttctagttttttaatagaaaaatatgtaatataaaatattgatattgtcacctactaatagatcaacatagagacattctttccaagggatagaacagagaagcacaatttccagttgataaaagtaaaaatttatagagttttgctactttcaaggtccttggaggtgaacaggaagcaaaatatctacaatgtaagctagaaaaattgtgtctttaatgatcaccattaggttatttaaaaatcatcaaagctgtaatacagttgtgattaatcactagagtaaacaaacaatccacagcgtgggagaaaatatttgcaaactatgcgtctgacaaaggactaatatccagaatgcacaaggaactcaaatcagcaagaaaaaaaaaaatcccatcaaaaagggggcaaaggacatgaatagacagttaccaaaagaagatatataaatagccaacaaacatatgaaaaatgctcaacatcactaattatcagggaaatgcaaattaaaaccacaatgagataccaccttattccttcaagaatggccataattaaaaagttaaaaaaatagatgttggagtccatgtgaaaagtgaacacttttacactggtagtgggaatgtaaactagtataaccactatggaaaacagtatggagagtccttaaagaactaaaagtagatctaccatttgatccagcaatcccactactgggtatctacccaaaggaaaagaagtcattatatgaaaaagacacatggacacatctgtttatagcagcacaatttgcaattgcaaaaataggtaaccaacataaatgcccatcaatcaatgagtgggtaaagaaaactggtatatatacaccatggaatactgcttgctcataaaacagaatgaaataatggcctttccagcaaactcgatggagctggaggccattattctaagtgaagtaactcgggaatggaaaaacaaatattgtttgttctcagttataaatgggggctaagctatgaggatgcaaaggcataagaatgatatgatggactttggcaactcgggcagaagggttggagggggatgagggataaaagactacatattaggtacagtgtacactgcttaggtgatggatgcaccaaaaccactaaagaacttctccatgtaaccaaaaactacctgttccccccaaaactactgaaataaatatatataaaaaataaaaaatagtggatactgttacaaatacatattataaaatgccagtaataaagagtactttaaaaatggaaagataataatttgcatttccctaatgcttcgcattctcaaaggaactttcaagctcccactaattgactcctagaaaatttttctaatgtgttatttgctttgactcatggagaaatctaaacaatgatcatataagccacttaatcagggctatgctacaaatactgtgtgaagtgaagcagaaagtatactgcacatatatccattttacttcaaaaggctttaggaaaggaagagaaggaactatagctgaaagcagtgttcggatggtgtggtagacagaacaatggtacctcaaaagtgtctgtgtcctaagccccagacctgtgaatatgttatgttttatggcagagaagaattaaggttgcagatagaattaagattgctaatcagctgactttgagatagggagattatcatggattgtccagttgggcccaatataatcacaatgatcctaagagtgaaaagggaggcagaagagtgagcaccagagaaatggcagcatgagaaggacttggcccagtatcactggcttgaagctggaggaatgggaccattggtcaagaactgtgggtagccttcagaagctgaaaaatgcaagtaaatatattgattcctaaggcctatagaaataatgtagccctgcaaatatctggattattgtcaagttgagacccatttcaaactcctaactttcagaactgtaagataatagcttgtgttgctttaaacccactaaatttgtgattaatttttttacaggagcattaggaaacatacagatatctaaacacatgtgggctatgcaaaagcaagagtaccataaatactgcagataggaccttccgcatcaggcatttatacaccatcagtctagttaaaaagaaaaatagatgtaaccatgaagaaataagcttttataaagtgtgaagaacatatcaatgttacccttaggtagtcatctttggcaagatatatatttatacattattggaacatctttcaggaattcactgttatattttattgaccaaacaaaataaataagaatgtcccattattgtttatttacaatcagtggttttatcaatttaattattctcatcaataatactgttggctactgctgctgttataattcttactagtacaaatatgtatttattttatcagtggttcattttccacaagtgccaaaggggatacaaagagcacaggattgctatgaagttaaagtaaattaatgcttataaagcatcagaacattcattagcatatattaggcatttactgcattttggtagcctttattataggtatcatgatcattatcatcattattactgctgtacgtatcaatgattgctggtcaccaggtcttaaaccaggcatgcgggcttcatattttatctctacgaatgagggatcagtatctccatttcttcagctcaagcaactgaagctcagagtataggaagtcacctaactaaaattaaagagcttttaaatgacagggtcaggactgttcctgaaatgttttgtgaaacttctatgagtctttgtgctagctgctgtgtgcttccattaaataaggccccattccaacccaagcccccaaacaaaatttctaagacagacaacttgttagatgtacaagtattattctaatctttttaaaaggtcagcaatattattttatggtctcactttattttaatatcttagaacatgaaccatttttaaccctggtagggaatttttttgagaccattttctcctagtggtaaaatttcagttgggataggatcatatggaaccataaggcataatttaaaagctactctcttataaaaataatgtttacacattctagaatatttgaggaataaaaaatgtaagaataatattataatatactgcagccctccactcagaaatattgataatatttgtcttgaattgtattagtttttgtgtatatacataaagaagctcatattgtgtttatggttttgtaattctcaatattgtgtacccattcattcatgatacattttaaaaatgccaaaccgtgaaaaatcagggccatttgtcaaacagggacattttataaaattcagatctttttgatttgtaaatttttcagttctgcactttgtgatacttaaagatttattgacactttccttccaagacaatacttttacatgaaccctgggataaataagataagaagattccttcaccacaggtcttaatgagatattagaataaactactttgtgttaaagtaatttatagaagtccatttcctttttataatatgcaagtttttttaagggcaggaattgggctttataatcttttatctcttaaagtctgaaaaattgttctttataataatcattaaataactattacataaacatataaacaaaagtttaagtgattagagaattaatattgaggttttttatcaacattataatacttatgaatgattatggtaagttatcttgttgaattttaaaatacctggtctgaaaattccagtgatgtgtgagaactaaaaaatgttaaggtaatgaagattagagtcatagatgggtaaagaagattattctgtgaaatataactggaattagtaagaagttccaaagaataaactgtatctttaattatatatatttttaagtgtctgttgctgattttcaactttgattacaattataaagtacattaacataaaggaatatcttcaagttcaagtggtgaaatgttaaaataatagtatcttatttttacaaactcagattaaaaaatctagggaaacatttaatatttggattgctatttctctacactatatttaaaggtaaataattaagcagtgagattcattaaataaaatgaattactaaaatttaagaataaatgtaaaacgtttatttttatatattcttgacatagctctatctttaagacatttatatgatgtagagcttcggtttttgatgatactattctatgcattttaataggagagaagaaaatataaatgattggaatatttctccctggttcttcatattctaaaatcattttttagaggttcacattttttattaaaattatgcctagatattattatattgcatacttctaagtgtcaaatattaatcaaagcaaccccaccaggaatttccaatgcttcattatttcagttcagaaaagagtttggtattcaatcttgtacaaaatgttacccagggacaaaaataattgaacattaatttttttaactttggcttttgtaaacaggttagtgcctaaattctgaactgtgaattttcctaatatgacacctggaatgtgggaattaataatagtaaaaaagtaatctttgttaaagttagtatgaatttaaatactctttaaaaattgcttttatttaatcacatactgtattataaacacccccctgaatcaccattgatattattttttatagttttggataaacatcatatttgtatttatatacaatattcacttcagaattgcaatctaagttttagatacataatgttaaatattgtgttctttgtccgtaaatagatgatttggccctcatctaacaaaaatcactttggtgaattaaggtagattttgggcaagttaatgattttagtgaatttaataagtcacatgtatttggttccttaataaataacatttgagctatttcaatttattttcctcaaagaaaaaatcctaaaatatttattttcttttttcacattagcaaaacttgagaaataaaaaaaattgtgactgtaatcatctactatgatactggaaatactgtcagtataaaaaagccactatggtgattctcaaacttgagtggacttaagaattaccaaagtgcttagttacttgataatcctttcctgaaccccaattctggaaattctgatttgatcaagtgcccaaaagtggttctgatgggtgtgcgtccttgaccgcattatgtaaagacaatgtcactctaggagaaatgtagtcgtgaccaagtgctgcagcagaactgaggattgttttagagttacctagaatttttagcccttgctatcttgtaaactccatgcagaagttatgtttactgtgaacataggccgcaggaggccttggggagcttctgcgggtggtaggagacacactttgctaggtctgcaatttcccttctggccaacaagggctgcagaggatgcacacatcaggaagagggtgggggactacttgcttgctggttttgcttgcatctgatgagtagaaattcagcctattctttgttttggtatgtatatatcttctagtatatagctatttctaagatattttaccattgatacgtatgatataaattttgagatgatatttctttagaggggtttgctaaagttatgttttaatcagttatgtttccaaagtgtgacatcccatgtaactctgtacataaaaaagcccttgaaagatattagtgtcactgtacacaaatacttgccaatgtaattaattgcaagatctcattgcagttagttaggagtgtatttattacatccctaacttacatgctttagtaatacaggctaaaaagcattcattttacagttaaatctgcctaaagcccatgaaaagtattcaggcaggtaaaacaaattttagatcttttaagtactctgtttgggtcattgctctcaagtcatgattatgcttactgtcttttttccaccactgccaccatcttgtgttctggaaagaagctgttgaattaagtagagagaaagaacaaggaaacaagggaaatgccaacagagttttctttttctcggaactaggaaagcaaaattagatttgctggtgaaactaaagttattctctttttaatctgatcagctggtcatatgctttatccgttgagaacctcaagaaacggactggagttttatttcattttgtcaataatactgcctgtggtatggtttgatacttgaagtagagttggcaatagatgatgtgaatttaagtccagcttaatgacttactattggtgtgaccttgggcaagtctcttaaactttctagctgtggctttaacgtttttgtttaacatttttgttttttcattaacttgagttaaaattctttccttaaaactgtaatactaagaatggtataaaaacacaccataatattcatgtgaatgtactttgtatattattactattgaatggaattcagtgtactttgaaatgtggcacatttattatataatagaatgtaaagacacttttcagcataagagttcagggacatgtattgggtataggggtgaggattgagcaataaataaccctcttcaatgtttgagttgttaagcagtattaagaaatatgacaaagaataagggaagggggaaatcaaatattgcctttgttactgatgaagttgataattggctcaaatggcttatatctgtgagaaagtggagtttataatgtgaaatcctagaattagagagatatacccacccagccacaggagaccccggaccataggtcaggaactgtcagaacatatgccctcatgctacaggagcttaacaaaacaattacaggtaaaattgggggactgactacaagcatattctgaatcctgcccctccagggtatttgccatcttttatatggatgtaataaaactggaaatataaaaattgaggagtaagtagaaactactactaatttatcacaaaataaaattgtaagtattgcacctgggatttttaaacatatgtcattttgaggtctgagtactataatctacatttattattggttaaaatgtcaattatttcttcaagaaataattttcacttttaaattacaccaacatccactaagtaatttaaagaagattctattttcaaatcagagatgtactgaaattattattgatagatataatagatttggatcaagttctgactttatacatttttaggtttacaaaagatatttaaaaattaataggttttaaaatgtattttaaatactttaagtactctgttaaggagttgccaccagagctctagacatgtttttttaaatccaattttatgatttttactaatttttgtcacactcttgttttttatagtcaagaatattaaggtataatctacataaataaacttcacttttaaaagtgtacttctaaaggatttttagaaatttatacactttacaaactattacaagtatttaaaattagtccattagcataataatgtctctgttccatgtattcaaaatatctaccctaactaccctaacttttatgtaattatatgttttttccttgaaatgaacttttatgtgtttgtggaaagtgctttgccagaggacaaggaatttccaagatgagttttcttacaaccatataaaacctatgaaactttgatcctattgcagcctcatctgtagctctaaaagttttcagtgggcatttgttgatcaccgatgtggtcaaaggcttgttatgcaggtataattgctcgcaaaggaaaactgagaaacatgagttcaagtctaattttcctttgtatgtcacaaaaggcataggctcatgtttcctagctatcttttcttgtttagtaatttagtttgtatatttaattctgaaatgaaatgaacatgtcctttcctatttcttcttagtttgttcaatgtagttccatccatagctcaagccatcttttctctaaatcaaagtggtctctcaaatatattacatgaacttccatcaactggaagaatttcctttcaccatgagtggggctgtgatgtagcaaccattcactttggactggtgctggcatatttttcagaatgatctggaaactaatgccatgcttctttttttttttttttctgttaacaggtttagtaattcctcatgaggttacagatgtatgttgagggaggagtggtaaagcggtaagatttggtgtcacagaagcttaagctacaggctcatggcacttacttgtcccatccagaattgcctgagtctggttttgtatatatcatacttttttctaatggaatattatttcttacaaccaaattataatttgctagatcacataacacccagtttattaatggccagttagactacataaacacttggtataatataagcagacattaatctcagtctggatccaataataactcacaagttaattttcaaatagaaaggagtcaacggaagaataaggaatggtattcctccaaaatctcaggggtatgtgttgtggatctcctattgagagttgccagaaatttaataaagctttgttataaagctcaaaggacagtgtagtgtgcattgcagcctgactgtgtagtagagcccttttttgctcctactcaaaactggtattgttactggctacccggtaaatgggcccaaatatgtttgtttccttcaaaatgcaaagaggcccatctaatggtgagattcaataatttatatacccaaaggagtgtaaattgttctattataaagacacatgcatattttatgttcatcgcagcattattcacaatagtaaatttatgaaatcaacccaaatgcccatcaatgatagactggataaagaaagtgtggtacatgtacaccatggaattctatgcagccataaaaaggaatgcgattatgtcctttgcagagaaatggatggtgctgaaggccatcatccttagcaaactaatgcatgagcagaaaaccaaataccgaatgttcttacttataagtgggagctaaatgatgagaaaacatggacacatagaggtgagcaacacacaccgggcctgttggagggtgaggggtgggaggagggagaggatcaggaagaataactaatggatgctgggtgattaatgcctgggtgattggatgatctatgcagcaaaccatcatggcacacgtttacctatgtaacaaacctgcacatctcgcacacgtgcccctgaacttaaaagttggaaataaaaaaaattgtctttcggtatacagggctatcctgatatgccttaaaggaagcttgtgcaacctgagacccaggatggctttgaatgtagcccaacatagatttgtaaactttcttaaaacattatgagattttttttttttgcaatttttttttagctcatcagctgtcattagtgtattttatatgtggcccgagacaattcttcttccaatgtggtccagggaagtcaaaagattggatacccctgctataccattggctgtctagaaagacggatgatatttcaggttcctgaacttcaatatggtttatccttcacactctggcacaaatgtatcatattatgacaactagagcatttgctcttttgctatgagcaagtttatttaatcaattttatattttacatataaaattatatactgtatggcatatagatatggtcagtatttatacagatgttattatgacatggggcatagccttgaggtaagtcagggaaaggttactgctgtttctaccaagtgactgcaaactgattattatctttattcattgcaattataaagaaaataatgacttgatcaatatccgtttatagtttacataggctagttgatttgctccagtaaatatatcatctgtggaatagcagttaatatgaatacctggttatgtttatgaaaatcagcagttattttacaagaccctttggcttttgtactggcaaactagagagtaaagcagagttgtgaagaaataaccaccattatatcttcatctcccaagtctttgttgatggcaataatctgtaattccttcaggaatgtagtacagtagtcccccttctctgtggttttgcttcctgtggttttagttatccgtggtcagccatggtccaaaaatagtaatatattttgaaaggaagagaaagagaaaccacattttcacataacttttactataatatactgttacagttgttctattttattaataattattgttgctatgctcctaccgtgcctactttataaattaaactttatcatagacatacatttatagcaaaaaagcttagtatatatagagttctatgctatctgtagtttcagggatccgctgggggtcttggaaggtattctccacgaataaagaaagattactgtattttttttttttttttttagtttactgtgagaatgggattcgacagtttcagatacatatattttgcctttcctacaataatagtcctcattctctggtaggattctgacatttgctatgtatatgcattatcaccaaacatttctggcataaaaaatacccacaggatacctctgtggtactcacatgggcccactggaatcattatcatatatatactcaaggcaagatgtcatttattattacacctgacttctataaattcccaaaaaataccatggtggtattttcagtctttgggaattttttatcagttaagactagtaactaataattgctagaagatattcctgagtattctgagtattattttttccctagtacacgtgcctttaggtcactctgacaaaggcttggaggaagatttatggtacccatgcttagcagcatagaaaacccctttttcaaagggacctgagctcccctcagtcaaagtcctctaagtctataaattagggtgcagtctatgaatttccattatagcaacttaagtaagtttttgcaccccaaacaagaattgttttgtttataaagatgatatagaaccttcataggctatacatttcaggtttacattacatttgtaatctgtattacaaatatataccctatatatttcattcctaaggaccctcagatcaattagataccaccacaatacctgcagtgaaaaacactttgattatttatattgtctctaatgattgagtgttaccatttgttctctaccaactcagacttcattattctccatcgacatcaaaagttcagttcaaaggtctaaacctaatcattgtgtctatgctgcagaagacagacatcacagcacttttcatgaatacatttcttaatgctagcgaagggaacatcagaacactctagagtagaggtcagcaaatgatagtcagtagacgaaatccagctggtgtcctatttgtgtatcatctgtgagctaagaatggtttttacacatttaaagttgtagaaaagaagaggagaaggataaggaggagaagaaggagaaggagattccaagagtgccacaaagcctaaagtatttacagaaagtttgtctactgactcctgctctatgtcatagcagggaaattctggcattgcagcctcattgactgtaggccaccatggaatccaagctttaattaaccattctaataggctgttaatactaccacaggtacttgagataacacattaaatcctgaatgctgttaaaatacaaccatattgataaattcagtcagatccaatcttctgattcatctttctcagtctaataacccttaaaattcattccatacatactttccaaactcatgctgatacatattggcaatatccatgaacaatttctgagtattaaatcgttttttgtggaattttctcccttcccttgtgggatctaactctagttactgattcaagaggcaaccagtgagggatgttggcatctgtactaagaaaagttgacattacttgtaaggcaattgcctcaagtgaagtttttaaaaatgttccttttttaaaaacttttattttagtttagggcctacatgtgatggtttgttacataggtaaactcatgtcatgggggtctgttgtacagattatttcatcacccaggaattaaggccagtacccaatagttatcttttctgctcctctccctcctcccaccctccaccttcaagcataccccagtgactgttgtttccttttttgtgttcataaattcttatcatttagctcccacttataagtgagaacatgtggtatttggttttctgttcctgaattagtttgctgagaataatagcctccagcttcattcatgttcccacaagacgttatctcattcttttttatgggtgcatagtattccatggtgtgtatgtaccacattctttttatccaatctgtcattgatgggctcttaggttgataccatgtctttgctattgtgaattgtgctgcagtgaacattcacgtgcatgtgtctttatggtagaatgatttatattcctctgggtgggtcgaatgccattactgtctttaggtctttgaggaattgccatactgcattccacagtggttgaactaatttacattcccaccaacactgtataagttttccgttttctcgacagcctcgccagcatctgttattttttgactttttattaatagcccttctaactgatgtgagacgatatctcattgggcttttgattttcatttctctaatgatcagtgatattgaggttttttccatatgattgttggccacatgtatgtcttcttttgaaaagtgtctattcatgtcctttgcccactttttaatggagttgtttgcttttttctcttggaaatgtgtttaagttccttataggtgctcgatatttgacctttgtcagatgcgtagtttgcaaaatttttctcccattctgtacgttgtctgttcactgttgatactttcttttgctgttcagaaactcttgtttaattagatcccatttgtcaattttcacttttgttgcgattgcttttggtgtctttgtcatgaagtctttgcccatttctatgtctaggatggtattgcctaggttgtcttccagggtttttgtagttttgggttttgcatttaagtctttaatccatcatgagctgatttttgtatatggtatatgtttggtttgggtttttttgtttgtttgtttgtttgcttgattttttgaatcgaggagggatagtgaagcattcaaactaacaacaaaaattctttactacactagtgagataagggaaaggaagatggttattggaattgcatgaaaactggacccatgaaagaaaagtcgtagaaaaatggccatacaggaaagcagccactgtccaaactaaaatggaggagtgggtggagggccaataaaaaaccctatcattctttcttctcatctgatattctgatggtgctttcaatcaaggtaggcatgggagcctaggtgatgtaatccataagggccatcctccgggaaagaaatcagtctggggggaatcatagaaaataataagattctgaggagatcattcttgatgttgaattggagaaatgagaagcacttggcaaggcgtggtggctcatgcctgtaatcctagcactttgggaggcctaggtgggtggatcacttgagcccagcagtttgagaccagtctggtcaacatggggaaaccctgtctctaccattaaaaaaatacaaaaaatacaaaaaattaacttggcatggtggtgcatacctgtggtcccagctactcgggaggctgagatgggacgatcgcttaagcctgggaggcggaggttgaactgagccccaagatcacgccactgcactccagccttagtgagacctcagaaaaaaagaaaaaaaaaaggcacttaagagactgtatgagatagtaatgttactgattctgacaatttattttattattcaaattctctaaagttaccatatttcattgattctgacaatttattattcaaatgctctaaagttaaaatttatctttaaatttgtagtacattatagttttttgatcacagcattctcttcttaaagaaacaaaataatgggtggtcttatggtcagtgttgtcttggaatcaatacttttttttttttttttgagacagagtctcgctctgttgcccaggctggagtgcggtggtgcaatctcccttcacttcaagctccacctcccaagttcatgtcattctcctgcctcagcctcccgagtagctgggactacaggtgtccgccaccacgccccactaattttttgtatttttagtagaggcggggtttcgccacgttagccaggctggtctcaatctcctgacctcgtgatccgcccgcctcggcctcccagagtgctgggattacacatatgagccaccgcgtctggccaccacattttctttatccagcctatcattgatggtatttaggttgattgcatgtctttgctattgtgaattgtgctgcagtgaacatttatgtgcatgtgtctttatggttgtctttgtactctgttgatagtttattttgcagtgcagaagctgtttagtttaattagaccctatttgtcattttttgtatttgctgcaattgcttcctaaaacccatttctaacacaatacctttcccaaatcatcattcacattttttcttcccttaatacaaattattggtaaacttggaaaggtgcaagatgttctcaaccatgatatctatgacttgataaaaaatatattttcaaaaaattttcttttaattcccattccaatgtatataaatcatgtagacaatatagagacttaagaaataatcacgtattttatgaatatatatacttacctttgtataccttattattgtggtaatattttgagaaacttttgagtatggccttcctgctctcagatgtagacagtcttactggtaagatctaatatttcctgactcctattggccatgcgtgtgataagcacattgtatgaattttttcagttggtactttcaacaaccctatttaggtacttgtgttttattcaattttatgaatgggccaactagacataaaaagtgattagaggtgggattagaacattttcagtttatatatccagggttaggaagacttcacaaaataatactgtaacaattaatgccaagcttttttatatagaaaaaaatcccttccatggttgctctatgagacataaaagtatctgtttgcatcttaaaagaagaaagtggaaaattctgaatttgcataaaaatttttgctggttgttcttcaccatagctgaaaagcataatcttaaaattatgtgttggtaccttcctgcatttgaaagaaagaactaagttaaataatgtatatgcatagaagagtcctgtagaagatttgtaaaaatggacttgagtacaggtatttgatcatgagcccatgaagctctagtgaggaaatggagaaagataagaaagggagaaaagacaatgtgtgtattaataagtagaataacacagcgaggagttacaattcaataccattgggactctctggttactgtgtagaacaaacctcagaattgccccattgcaggttggataagctgagttatttacacatttacttctgttcctcactgcctgaggttgtctccctattcttggtacactaaatccctggagctaatgagctgctgggcaggtgcacagactgaggaagtactcttagcaccagcgaaagtcctcagtcagtaaagcagaggtcagaagtggtcaataataactgaccactaagcagtagctggtgtccaggaagatgtgggatgtacatccacagcatccactacacagatatatacagattatacaggaaacacttcatatatgaatgtcccactatgaataagtggaattagccactttcccagaggagaaatatgagttatgatgtttcactacattcaaacctttgaaaaatccccagttttgttctcatgttgtactagaaataacagtacaaagttggaatgtaaactcaattgagttatacttactgtgtaatgtaagtaatgatatatgtgtgtgtgattatattaagattaatgttcttgttgttattgctgaatccattatggctgtaactcatttttttttttttgtaatttttggctttcttttcttctgccttttggttaccagttagaaaaatgtaatactggaaggatgcattatgcaatctttttccattatgcacaatcaaaacatgggtatgagattggattttattcaaaaagaagaaaatctgccatttgaagctgtgcatatggaataagaagaattttaatatatgtttagtctcattcttttggtaatatgtaatgtagtctggttttggtggaaaagcaattgttgatataaattattgataaatatttctttcaggtttaaacatttgttatagtgtatttaagacaaataaggcattattgaatctgaaagaatatagtaaatttataaaaattaatatggctgtattttgttcctacagaaccattgtataatgctgtcactttatgatgcaagactgaagatgtacatttaaaataatttatttgcagatcttgattccatcttcaatagtaatgtctttttattatgatgcaactttccaggaatggaaattttatatttctgtgcttcaagtttatcatttattgtttcattgcaaagcctataatgacagtaaccctccttaaatggggagaattacttagggttgatttaattcaaatgtataaaatgaagtgcagttcaaggccactgggctacttttgagaatttatcaagaactattttggggtctgtggtcctagatattattcagttacaaacttctattttctagaaaaagggaaaagaaaaccatggcttattaaaagagtttttattaacttttatatttcaacacaacttagcttcatatgaaaagaaagaaagtcagcataaagatcaacaactatctttgtggctctgataagtaacttaacccctctgagcctcgatgagaacatcagtaaaataagactaacaggaccaacttcctgcagtttggtgaggattaaatgaggtaatacatgtcaactgcttagcaacatgcctggtacatagaaagtctcagtaaataataattgagaaaactaaagattaaaatactgaaatgatttcatctgtagagaagaaaggaatgatatttgatgtcaaattcaggtttttgagaattgtcatatgaggttattgacaaaatataagtcaaataaaaaggctcaattttcaacataagtaaaaatgcatctagagtattgagaaagactacctgtgtaattttcttgggctttgaaagacaggttatgattgtctctatttttgatttcatatagttgtctgccaattgtgataccaagccaaataacgtgggagtatttattctttacattaacatctactcatagcttattctacaattttcttgatttaaattatagagtcaaaaagtcaattctgtaaattcttcatagattactctactgttagagtacatgatatgttctgtttcctctttctccttggtaggaacccagactcccagtaagccttcacatactgtgcatagttaagactaccccataggctgcttgatattgactaatctaactcatatccctgcaaataatctactgtaatcttttaaataatattattgtgtcctttgctgttagaagttaaaagtatagggtatagggcagactgcccgcattggagtcctgattctaataccacttcagttttcccatctgtaaaatgaggaaaacattagtacttacttaagagtgtaattgtgagaattaaatgaaacagcatgtgtgaaacacatagagacctaatttattttaaatgcttgataattttaattattattaattttatttatactcctactatttttataactgtagaccagcttattctggctatatgcaatatgaagaaaaccctcctcctaccgttcctcaaacataaaaatactgaattatggcataatatttctgtttgttaaacaagttatttagcatccaggctagatgagatactacactactatacacagaataacagaactatattgatgattcatatacaacttacgtgtgattcccatatgttttctgccagatgtttttttctcattctacatacataaatatgtaaaaaaaagttgttgaatatctgttcaagaaattgtgcttggcattgtgtaggaatttggattgaaaaataaagcatctgccctcagagataatatttatatcacgagaaaagacagaaatacataaacccaataattcaataaaatacaaaagctctcagaatcattatggttttcttcaccacatcagtggtgtagaaaatacatgctctgttttcagaggaagaagatgacaagagtttggcgtttcactctttgtactcatgataatactgtacaaactgatctttaaaaatgattatgttttgtaaaataatataagtttattataaaaatataagcaatatggaagagtgaagaaaaagaaagccatatatctctcaaagtcctctctctcacataaacaattgttgctaatgatagaattattttaggtagataggcatggaggtactattttattaaaaatgagatttgggtttacatgctatctttaaatataaagttaatttaaagtaaaactaatgatatattttaagataaaaatttctttgactactttttagattatttattattgtttagggaaaaatgatacaaaaaatattgaatgaagtcattattttaaattaatgtttcaaatttaggcagtgttaaaggattaaattctattaaagatgaggttagaatgttttactttctcctccccaaatgctcagtttttcccactgtgtaatcacttttatttcatcaagttaaaatgtgcgttttgtagtgcaatcataatgccctcagcatttggttgttgttctatatgtacgtgtattcaactcaccctattctttttccaaagtttttttaatttctgtttactttactttggttctgctattttttggctggattttcctctattatttaaattttgattacagttacactttcatataaaacaatgataaaacatagtgaaaatcaacagttcttcactttccctttccccaaatactattccacacttctaagaaccttaaaagccatagttttttcaaagtttctttttttattcctttgcatatttcaaaaagatacatttatattatgatttcttgatttactaattttagctattatctattgtcttcctataaaacataagataagtatttgtatacttttgttagtctgactcttctcttattctccaggatatttaaatctcaacttgtcattaattaatcaatttttatattattataactataaacacatgcacactattgttccaaatagtctataattatcctgctttctttcataaattttggggcttttttccagaattaatatttacttcatttttgttttttatgcaaaatattgaaatgtacctatctttaattctttttgtaaatgccctattagacctgtccaacctccattattagcatattttctctaattttcaaatacatgtgataatgttacaaatgctttatttatttcctatgtctttccctccccaagtcatatagcttttgcaggtgtattgcagtataacttacaaacacaatctaagatatgtagatgagtgaatttatatatatatatatatatatatatatctccatatatatctaccacctagatcaagatatagaccatatccagaactccagcaggctctctcatacctattttgttaattctaccctaaaatattcagatctgtatcactgtgaatcaagttttctgctttggaactttacataaatacaattatgcaatatatactctttcttctttcactcaatattatgtctttcgattcatccatgttgcatgtagcattgttacattctttttcattgttatgcaatattttatagtatgaatatactgtgaaaattagttttgtaaaaattttcttataattcatctggccttgaaaatgctctaaagaaatcaagaccaacctcacatttctcttattgtggtgactttgttttctttcctggatatgtgaagaaattttataattatcattaagttaaggacaatttaatcaagatctgttttctcttcttttttttttgagacagagtctcactctgttgcccaggctggagtgcagtggcataatctccgctcactgcaaactccgcctcctgggttcaagccattctcctgactcagcctcccaagtgcctgggactacaggcacccaccaccacacccagctaattttttgtatttttagtagagatggggtttcactgtgttagctagaatggtctcgatctcctgacctcgtgatcagcccgcctcagcctcccaaagtgctgggattacaggtgtgagccaccgcgccgggcaagatctgttttctttaacagttttagctggagcctgattgtttcacattgatccatagagctggttcctttatctttcttatttcaaggattttaaaaattattaaaaattacatgttttacagtgttttaatgtgtatattattctcttctacgtcaggcttttggatcatccttatactgaatcttttctgtttttgactctcaactaaatatatcgtattttcaacaattgtgttagccttgttctgtttctcctcctttgtttttttttgatttactatgaaaatatcaagcttttcttttgggccagaaattaaaatattatctataacattatctatgtctaatctacttatttctttttctaatttatttattatctgggtaatggtattgttttggctcgtttccttatttattatactctttcatatcattctttttaaaatttaaatcaacttgtctttgaattctagttttatttaatctatgattttttatactatgaaggactttcatagagtttttctctggtataagcaaattaatatattgcctagtgagcatattaaaatttttgagaaataataatttaacctgctgatagcattgcaaatataagaaaatattttttctttttccaggaaatacaaaagatataataatgatatatgaagaagatgctgaggaatgggctctgtacttgacagaagtatttttacatgttgtgaaaagggaagccatcctgttatatcgcttggagaatttctcttttcggcatttggagttgctgaacttaacgtcttacaaatgtaaacttttgatattatcaaatagcctgcttagagacctaactccaaagaaatgtcagtttctggaaaagatacttcattcaccaaaaagtgtagttactttgctttgtggagtgaagagttcagatcagctctatgaattactaaatatctctcaaagcagatgggagatctcaactgaacaggaacctgaagactacatctctgtaatccagagtatcatattcaaaggtagtgttgccaaaccttgtttgttttatttttatttgtttttttttttttgtaattaaagaattgcaagttgttttagaaccaataactggtgtcaggataggaataagaaaaatgagagctgattttattcaacagtatgttgtactgtccacaaaatacattaagtttcttaatttttagctctattccaatcaaggcttattccttgttctaaacatggcttataaatatattctttagggcagcctggatgagatcatggcagaacaagtatggtatgctcaagtcatatgacagtttggttctggaagctggtttcttatgtaactggtgaggcatgagttaatatactctagtggtgttaccagtcagtagcagttcaaggtttgaaggtctgggttacaattacagagcttttaaaattttaagcatgtaacctttagataaaagaaaataccaggtcccattaattaattaattacatttccatgtaataataaaaatgctgcagcttacaatgttaaagcttctcccttccacagttttattctgctaggtgtgaaaggggtgctgtggtcagctgcttccctggtttccttagtctgccctttgctctcaactcccagtcttctaactatggtttcatggcttaaagggaaggagtgaagctatcattttatcttggccacaccagattaaaagttggctattttttttggagcaaatttctgagttttgggaaattccttattcgctgggaatgtctctcttgcagtttcttaataagtcaaatagtccctcttctctaagatcatagctgtggttgtctaatgcatatagattcttactgttgagttctatggctccttcatgtgtctctcatgatgaaaatggcactgagatacctcctggctgggtgtttctcctaccttgtccacatctatctgaagataaaccttcctttatcttcatttatctttttccggacaaactctgggcatacaagccattcccagagtagctatcaccatcctgccctcagagcagcagtacagccacagtctcttgcctttagtaatttccaaacctggatccagcataagtgttggagttctgtaaatccagggaacctatatcaaccccaaatggttcgctggaagcttttctcactatacttcttccctggtggaaaacaactttcttcttaccaaaattccttcttattttccagtattgtaacctcttcaaattcaatggtttttttgtttgttttgttttgttttgagacagagtctcgctctgtcatccagggtggagtgcagtggcatgaacttggttcatggcaacctctgcctcccaggctaaagcaattctcgtgcctcagcctcctgagtagctgatattacagacacgcaccaccatgcctggctaatttttgtatttttagaggagatgaggttttaccatgttggccaggctggtctcaaactcctaacctcaagtgatcagcccaccttggcctcctaaagtgttgggattacaggtgtgattaaagcattgtcttagttgtctattgttgcataacaagtttctctaaattttagcaacttatacataatggttatatcagtttctatgattcaggaatctagaggggtttagctgggaggttctggagcaggatttgtcatgaggatgcagtcaagctgtccagagctaagatcctctgaagcctccactaagtgaagatctgctaacagggcttacattgttgacagtttcctttgttattgtgattttaataatcccttggttggctgaaggtcacttctaatcattcctgaggaaggtgccttggaagcaatgtttctgaattgctgaatgtttaagagtttgtctcttgtcttacactgaaggtagagtttgtctgaggacagtattgctcttgctcttctgtctctagcactgcagaatttacagaatttttatttgcctagctgactaaaggattcttcatttatagttgaagtttagtgactttactagaatattttagtgctgactattctggattatttttcccagggacatgctttcttatttttgtttgtatctttttcccaaaatgtagagtcaagtcttcttttatttcatgaagaatttcttaacttatatctaagtttacggtttatttttcagggactccttttttatgtattttggatttctttagtctgcactgcactctacaatttctctctaatccctttgagtctattaatatctaattaacttagtttgcattttcactttaacttttgctaccattttatactttcatgagtttctctttctctgtattacttccaatctctttcgttttcatagtacttttactttttctcattgtaccttttggttgagcacttataacttaaaattcatctcttgttcttaattcactcacctctctctaacttcttgcatatctgcactatataattgctttcaaaaggtgatttctattcattacattttaaaaattcacggtgaaatgtttggttacaattttcaactttgtttatggtaacgtgtttagtttttgctccccatctccattggttttctcctttcctcttttcctccctccctcccttccttctttgctttctttttccctcccttcctcccttccttccctccctctctccttccctttctcactttttctcttttagtatctttatatagattctatgcttgttcaggtttctttcttttttttttgagacggagttttgctcttgttgcccaggctggagtgcaatggcacaatctcagctcactgcaacctccacctcccaggttcaagcaattctcctgcctcagcctcctgagtagctgggattacaggtgtgtgccaccatacccggctaattttgtatttttagtagagattcggtttctccatgttggtctggctggtcttgaactcccgacctcaggtgacccacccacctcaaccgcccaaagtgcggggactacaggcgtgagccactgcacctggcctcaagttttcttatgtgtcactgagaaaagtgagttttttttggtccagccaatggagatagacagagtgggttttgttgtttgttctgttttgttattgttgttgttattttacaataaaagactgtacttctctgcttccacagatgtagactgctttctgtaatatgatttttctgtatagctcttaatttagcctcactttgtctgctttttagaaccaaactgcttccatagatgcttctccctcaaattgttgcctcatatctacaaggtacccttagccttataggaagtaagtttgccggctcttttttaaaatctgcagcttctggactgtttcttcaaagtgtcttttctctgtttcctcctgtacaccctcatgctgtatcatcactgttttaggaaacagttcattgaatttgggtctaggatttcactgtttcctatttcctctaagtaggacatttgcataatatttcctcattgtctatgtgttgggatgatttccaagaataaaaaggggaaatattcacagtacaccataatgttcaaactggaagttttcaagtttcttatgatctctttttctctctctctttttagtattcctcaagtatattaaacttttttgactgaaaagaaaaaagtgttacaataggaaaattatttttttaaatcacagtaaagcacaagtaagtttatgctactcttctccctgaagattgttagtaaaattttagatggctctccacacccataatttctatttattcaaagaactcatgttgttttggccacttgagctataatgtcactattatgtaaaaatatttgatatatacctttttgttgtttcagttgttttgttttatgatgagtatttttaggtggatatgaaagtggtattctgctatgtcttcaaattatatttctattcatgctcggtaagaggaaaaactcacaccttatagacaacacagcactattttggagacactattatctctcatctgcccacattgattttggactctgatttcttagagtaacttagatgtgccaattggaaaatataaccatcttatttggaaaagggtgttcaaatatagtgcatttttgtctgaggtacaagaatgcaaccagaagcatatagttgtatttccaagtctacaaatggtagcaatctccaaactgcataaaataacttttatatgtgggttgtgtcctttgaagaaattggttctatttgctgtagtctatgcagtgataaatttgcttaagtgctctgctaaattattttatgtttatgttgccaatcatgttgaagacataaagtcttgtatttaaattgagatcagtacaaaaaaaaatgggtgaaataggacaaagaatgtggaattcagattttactgtcccttttctatttttcctcattccataaagaaattatacaaagaataagggaaacttattattcagaaacaggctatgaaaaagagaatgataacaatgccaggaaagtcatggaaataattaaatgttctaatatattaatataacacaaagaaaaatcagaggaaattttaagaaagagaaagctattttataattaatcaaggctccagagaaaagtttttaacattaaaatttttttaaaagacacagtaatttatattttctcctagtattttatttcctttaaaggaattaagaaaaccaaatttcctgtcttcttaattcccaaattgggagtaacacaaatccagctgtatttactcttttctgtgtgttttataatcgtttgtatgacattccttcctttttctgtcttctatttgttagttttggtgttttacctaacttgcttttctagtctttccacatttataggcttcatacagcattgtttatatgtgatataaataagctgatctgaaattgttataaaatcaactgccgtttctgaatatcaccaacatgtacttgaatccttctggttttcaggatcctggcacctctccaaggcctctgtcctcccttgttctttgttctcaactctgcccccgtcacttctggaccaggcatgctggtttgcttgcaacccctgagctaccctttaccaacagctctctccatggcttattttctcatattttcttcattgtccattaacaggaaaaacttctctttcttgaagaaccttaacatttccattttgtttttctgttaccaaaccaaggatttcaaatttttagctttattttacactttttaaaagaaggacaaaatgaatagtaatgtaacagtagaattattggaaaggcaaaacaaaacaaacaacagaacagaaacaaactatgcagaagcattgttttcctttctttctgtctgtgctgtgtattgcttaagaactctgactcactggaccttcctagaactagtcagtgagatgttgtagcctttcaaatgaagtccttcctttttgcatggtctttcagctctttgaaggtatggctccagcatgggtgtccaggccatttctgtcaccagcattagtgtagacatactgtatactagggtaattgtatcattcaccattgaacaaacacagcctttccatttttgcgttcactccattgttttttcacttttctcttcatctggagtatccttccacatattttcagttgaaatctcaaccatccttcaaagtcagttgacaagttgctttattaataaattcatgtcatatcgtttctgcttgaaaaatattttcctcatctaattctattaattttgattattgcatacttatgactctcgttacattctatattctccgtaactatttttttaaccatttcttttcttctccttattgctgttttacaaatggaatgttgttaactttcttttatgcctggcgcggtggctcacgcctgtaatccaagcactttgggaggctgaggcaggcagatcacttgaggtcaggagtcgagaccaggctggccaacatggtgaaacccagtctctactgaaaatacaaaaattagctgggcatggtggtgcacacctgtaatcccagttactcaggaggctgaggtaggtgaatcacttaaacctgggaggcagaggctgccgtgagcccagatggtgccactgcactccaacctgggcgacagagcgagactctgtctcaaacaaaacaaacagaaacaaaaacaaaaaaatttcattttaaaaatatttcagcattctcaacctcaaaaaaaccccacaaacctagaaaggacaaattgtgtttttaagtacagatttataaatgtttctggtacagtttggtttttctctttattgaaacctcttgatgaaaggtttactgtgggattcttgtcaagaatacataacctcaatctaatcatgaggaaatatcagacaaatcaaactgggagatttttgtggaatcaaggaagattctacaaaataattgctctgtactcttcaacagtattaaaatcaagaggttaaaagaaagggtgaattattatttcacaataaactaatccaaagccatcggctcggcactatcccagagctttccccatcttctacattcaattaatttctgtggcttagaactgtatctccgtgcccatttctcatccattggcctagatcttcatcttccatttcacagtctactactagaacctcccagctggtggcctttttcctcccaatttttctaaaacacatactaaattatggggctctacgtcacctatggaataaagtcaaaataccttaaagtagcaggcaaggcctctcataatcaaatattatgtacaattttttttaaattagcaggatttaaaacacttactttgattgttcacaaatttagacaataatcaattctatcagtaaatgtgtaatgataatttagtatatttaggactaagaccggtacaactgtttttgtgcttctagaatttattaaggtttgaaaaattgttagctgccaactttaagattcagggattgaatactgactttttttctttctctaagaaactaatagttcattataacttcagaattccaattaaagtgatggattgtttgaaaagaatattactcaaaaagtctgaattataaattgagttcaggtatctgatactttacacaagggttttattttgtcccaaagagtttctctggcttgcatgatttaataatgtcactcaaattatttctgagactgtaaggactaaggtttcaaggatttttccctcaatgtatggtacatattcaatttctctttaaagaagctttttatatattaatcaatttatctttttaaattctatttttaattctttcattttgttttttaaaatatcatgtttggtcattctcatgtatattgaagaatgaaactcaaacaacaaaatggttagtaaacatttattagtcctaggcagcagactgtaattatgatttatttattgctaataaaataagataaagacatttgatcaggatatttttagctgtgtttgtaaaagcattctgtatacgactctggatagcttttctcctctccctctccctctccctctcccccttctctctccccctttccctcttctctctccctctccctcccctctctcttctctttctcttcttttttgagacagggtcttgctctgtcacccaggctggagtgcagtggtgggacctgggctcactgcaacctccacctccagagttcaaatgattcttgtgcctcagcctcctgagtagctgggattacaggtgtgtgctacgcccggctaattcttttggatttttagtagacacggggtttcaccatgttgcacagactggttttgaactcctggcttcaagtgatccacccacctcggccttccaaagtggtgggattacaggcatgaaccatcatgcccagcctctgggtagcttttaaacatattcttattatgaatgtatacaccctatttctgagttctactgcctccttttttgaatcaaaaactaaggtacactgttttattactcaggatcattgtgttattaacaacttagaagttagcttatattattctttgctttccaaaaatcttacctttctttagatgatttcctctttatttttgctaaaagctgatttttttttaacatttcaattccacatgggaaatgatcatctgctgcataaacagcatgattccaaggcttttctgaaaattaactctagtgttaaagggcagaaactatgtacagagcccaggaaaaaacaaaattttactgtctcttattataaaatatctagttctgaaatctatgccaagacagttggtatcctgaagtctacctgtaatccaaggtccaaagaaatctacccttatgtgatgattgagccattggagggagatcatacctttgagctgtgtttgacttgaacatgctctcccttagctggtgaccagccacttggtaacctcagtaattatttttcaagacagacactttaaactttattttcttaacatcagtaacattttcttgttcacacgtatttatgctggaagttaaggtataggatcatgtgagattagttaacagcttgattcaagatgatgtatctgacactgttttgccatatttttatatttcacacaggaatagagtgagaaacttatatattttaactttattcttgactgagaaacacaataggtagtttaaactaaattaaaaaataaagattttaaaagtcagacattttatgatatcaccaaatgagaattcacttacattcatttattgaggatatgtatttttaaccttgagttttcatgagtgatttcaaattacttttactagtgtcttaatattctcatatgttgagagagctgaaatttttagtatcccattttataagttgcataatagaagggttgaaattacatggtttttttcaggaactatattcattaaatgtttatggttgtactctttactaggcaattatgatttccttttgacagtaagagaaatattaagatatgtggaaatcatcacaagtgctcctctaaagctcatctcatacttgtatttttttgactgttagtagcatcataatgctacaaaatgtatttctagggaggtaagtaatgctcgtcaatccatttaatagcttcccatatgaggaagcttactcttattcaacattactttttattcaagtacttttgcaggaattcaatttgactaacattatggaaattgagaacctatatttttcagccccgttattatgctaccctatcccctaataaatgctctatcatcccttcaattcttaagcagggaggatttgtctgaatcattgcttcattattcacaatgaccagcaccatatacaataataatttttttattcaactggccaaattctttacaactcttgaacttcttttggaatatgagaaagtgtgatttatatctaatgtgtaattgtttcttaggctttcatagctttttagaaactaagacaaaggagatatacaattgctttttttccatattctttccaagatagctactatataatttcaaatatttaatttttttttttttttttttttttttttttttttttttttttttttttttgagacagagtctcgctctgtcgcccaggctggagtgcagtggcgggatctcggctcactgcaagctccgcctcccgggttcacgccattctcctgcctcagcctcccaagtagctgggactacaggcgcccgccactacgcccggctaattttttgtatttttagtagagacggggtttcaccgttttagccgggatggtctcgatctcctgacctcgtgatccgcccgcctcggcctcccgaagtgctggcatcacaggcgtgagccaccgcgcccggccaaatatttaattttatagtgtgtttaatctcaataaatatatgatgcctgactttgaattatggacaataatttttaaatttaaagaaaaaaatatatttttgttgggaacaggccccccaaaatctggccataaacttgcgccaaaactggccataaacaaaatctctgaagcactgtgacttgtttgtgatgaccgtgacacacatgctgaaggttgtgtgtttaccagaatgagggtaagaagcacctggcccactcagggcggaaaaccacttaaaggcattcttgtgccttaaggacatgctcctgctgcagataactagcctaagcccatccctttatttcagcccatccctttgtttcccataaggaatacttttagttaatctataatctatagaaacaatgctcatcactggcttgctgttaataaatacatgggtaaatctctgttcgaggctctcagctctgaaggctgtgagacccctgatttcccacttcacacctctgtatttctgtgtgtgtgtcttgaaatcctctagcacctctaggttagggtctcccccaccgagctggtctcagcatattttgagtgagggtctcactctagaatgcagtggtgcgatctcagctcactctaaattctaccttgcaggttcaaccaattatacctcagcctcccaagtagctaggaccacaggcatgcgccgtcacgcccagctaatttttttatttttagtagagaaagtgtttcaccatattggccaggctggtctcaaactcctggcctacgtgatccacctgcctcaacctcccaaagtgctgggattgcggtcatgagccaccgtgcccagcctaaaattaaaacatgtatatatttaaaagctttttatttttctaattataaaaataatactcattgtaaaaaaaaatctgaatagtacagagaacataaaagaagcaggaagaaaatgtcacttagaatgacaatacccagaggcagtcactgttaacattttggcatatttcattccatatataattctgattgtgcagaatataaactgtttaaaagttgagagaatcataatatgttagaggaaaaagcaaggcataaattataagtataggactaaacttaaatgaatatatgagtatctttttttaaattaaacaaaatctgaaatgataggccaagatttcatatggcccagagatgatatattgacaactattccatgggaaatgaaaatctcactgaaatcaacagtgaactccaatgaatgattccagtttggaatgaataattcaaaataatgaaagcatagattctaatggtaataatcttttattattattattattattattatactttaagttttagggtacatgtgcacaatgtgcaggttagttacatatgtatacatgtgccatgctggtgtgctgcacccactaactcgtcatctagcattaggtatatctcccaatgctatccctcccccctccccccaccccacaacagtccccagagtgcaatgttccccttcctgtgtccatgtgttctcattgttcaattcccacctatgagtgagaatatgcggtgtttggttttttggtaataatcttaattacacagaattgttcaatatgttgatgtagggaggagcaaaaattttatagataagctactcacagatgaattattatgaaaaatagaataacataaatgaatatgaagaattttctggtacttcatatgaagaaatttaaaaaacctttcttataaataattaaaccagttatagcattaaaagtggtctcaaataatatctcctcaaacattgttatttgacagattgtgaaattgaaattctgacaccttgcattctttgtgcaagacctatggtccagaagtggggaagaatctggtagaacccatgttgcgtcagaacactggcttctcctttccaaagttctaagccaaatggcaatagcacttagacaagagattatatgatttctcttccattatttgttcacgattgatcaattcctttattccttccatttaaaaattaatttctaacattcattaataaattctatgagccaaccaccaataaaagaactttctacacattttaaagtttaattgtcacaaaaacattaggtgcagttactagtactattctcatttttaagtaaaaacacaaacagaggaggcaactagaaaataacagaactggaatgtggaccaaatacttctagcatccccatttcaaataactatactcttggacaaattttggtttgactttgaaaaaataatttttaggctacttgcagagaactagatcatttctaatttcttagatatatacgtactcaagtctaatctatgtgtttgggtttttatatttcagagtctaggatgaaatctgaggtgataatattgtcatcttgaaatataaaaacccgggcacatggacagctgagctaatgctgtcacaggtggtgaattttccctttcctcatcacctatattttcagtcatgagagattctcagcttttatttgcacctctgcattctaggtttcacaagagtgtcacaatttaacatatttaatgtcttagacatcatttcttgatttacacgtataaacttgcaatttattttatttgaatccaatttcagttatcttctcatgctaaatgagctttagaaagtttttctgtctggaacagtatagtgatacttagaaaaattaaaacttttaaagtaaatgattttctgaattttctgttggaaacattttctttttcatacagaaaaatgtatttcctttcattttaggctttacatttcagaatttcaaacaaaaaacagtgtccacttttttaatgtaccatcttcttagtacacctactttcccctttggtcttattatagtaaggtttagtttcacttttccttatcagtattacttccctattttgtacttttttgataaatattccactatattaatcttgattcaatgacgtaaaatggtgccccatagtgccttcttcaagagcatattaatcataccaaattactctgctcaaaatgcattcaggcactttcttcatattatccttttgatctctgggatgtattttcccattgttaattgaaacattagtgttacacattttatcattttttcctttattattatattcaaatgttaggaatgctttcccataaccctggaacccacttagatattagtgatgctttgtccatcaaccagaaaattcatattttctgtgtctagtatattgtctttgcgtaattttcttttaaatatatggctacagccaggtttggtggctcatgcctgtaatcccagcactttgggaggccgaggtgggtggatcacgaggtcaggagtttgagaccagcctggccaacaaggtgaaaccccatctctactaaatatacaaaaaaaaaagattagctgggcgtgctggcacgcacctgtaatgccagctacttgggaggctaaggcaggagaatcgctggaatctgggaggcggaggttgaagtgaggtgataccacaccgttgcactccagcctgggtgacagggcaagactcggtctcaaaaaaaataaaaataaaaattaataaataaatatatggctacaagaataattacattcttttggaatacatatattcccctttggcttggctgcttatccactaaataatggttttagctaaatcagtggattttattgagcttctactatgtggcaggcctttaatccatggagttgaggtagatgtaaagattattgattatggacatccagatatcactatctaatgaaagggacaggaaagtaaataatatgtaaataatgtaatgcagtgtgacaatagttctaatgaggtgcagtgcatccaaagagctattgccaagtgggagataggaaggatcttccactagaagcaaccattgatgtgaatgttgtaaagtaattagagggaaaaatggggttaggcacaataggcgaaacagaagagcctatatgaaggaatgaaagattgtggtttcaggaactggtgagaagattggaaagactgcaatggcaaaccaggtgggtcatgagggcctttcctatctcagaacacaagcaagtctgctgacaaggcccacttgctagaacttctcttgtgtgaggctgaggaaggacaagatgtaggtggatctgccaaaggtcttttaccctcagtgcaaagtatgactttgtgaccaagagcagagggtttggagtcagacagacctgggtttaagtgaagctttgtgacttatgacaatttatttaactttttaaaaactcaattcttagtaaaatcataattcttctcagaagataatggttgcatcccttgggatgagtgtgaggattaaatatgattatggatataaatttctacatagggcatttgagacatagtcaaaactcagtacttactagcttacttttacaccaaccccaaacaagcttcttttagggctttatctatcaatagagtgatcctcaaggaaagttttcctagacctaactgggaagggtccttttttaatttaacataccctactgaataaatggggtgataaacaaaacttatttctgtctcaaaggtgagtagactcagtttctacaattttttaagctgaggatcggatatacttatatataatatttctgagaaagtgaaaggaaattaaaatattatttagaaggttgctttatatggaagcaagcagtttcaaaatcattttacctagtcatatgaaaatatgaaactaaatactattccgttccatgatgtgattattatgtattgcatgcttgtaccaaaatagctcacataccccataaatatatatacctactatgtaccaacaaaagttaaaaattaaaaaattaaaaaagatactacatcaccaatttatttatgtacatatagcagtcagatattttaaatttacaagttaaaatcctcagatatagcatccctgaaattttatgaaaatattcctaaatatatcagattaatatgttgattaatattctgaaaaacatgccaaaaaaagcctgctgtcaaaattcaagtactacctcttagataactgtaaagaatttgaagctacttgagagaaaacaactgagatatttacctgtctttttcaaatccattttagaccaagaagaatcattattacctattggtaaggattacacatttgacacaataaaaataatcattttctctagcagtgaaaaccaattgacaacatatagctgcctctgggaattctttgtaaagtaaatcatccttgtgagatatttcagtgagaaacaagaactgataagcatactgacttactcataaattgtcatttctatgtaaattagcaatcctaactgaaacatcaatgcaatgtcaaataaggtataatcttatgctatggtaagaattaatgccttagacatttttactagagatttgggccatagggtttttgtttttgtttttgtttttattatactttaagttttaaggtacaggtgcacaacgtgcaggtttgttacatatgtatacatgtgccatgttggtgtgctgcacccattaactcgtcatttaccattaggtatacctcctaatgctatccctccccccttcccccaccccacaacaggccccagtgtatgatgttccctttcctgtgtccatgtgttcctattgttcaattcccacctatgagtgagaacatgtggtgtttggcacacgtatgtttattgccgcactgttcacaatagcaaagactgggaaccaacccaaatgtccaacaatgatagactggattaagaaaatgtggcacatatataccatggaatactatgcagccatacaaaatgatgagttcatgtcctttgtagggacatggatgaagctggaaaccatcattctcagcaaactattgcaaggatatgttgtttttaacagctctgaaaattttgtgtttttgattccatcagataattcctgtgataaattgactgctgtatgcatggataaaactgtgggttgggaaacagtatagggtagtgtattagtctgttttcacactgctataaagaacactcaagactgggtaatttttaagactgggtaatttttaagaagactgggtaatttttaagactgggtaatttaaataactcacagttctgcatggccaagaaggcctcaggaaacttaaaatcatggtggaaggtgaaggggaagcaaggaatatcttacatggcagcaggagatagagagggcaggggaagtgctacagttttaaacaagcagatcttgtgagaactgactcactatcatgagaacagcatgggggaaaccacccccgtgatctagtcacctcctaccagattcctcccttaacacctggggattacaattcgagatgagatttgtgtaggaacacagagccaaaccatatctagtagtgatcaaggttctctgaagtctgactagctaggtattctcctgacttcagcaataactagctgtgtggccttgaagagttcatttattgctcagaaccttattttccttattaaaaatggcaacttccatcccttttcctcaccctccctgtcagcatctgctgcgctccagattttactcatatatcgtttgcctcccctcattagattgcaagtcgtatgaaggaaggcttaccaccatgtcctctgcatcctgaatagcacctggtacatagttggctggtaaatatttgttcaaagaaatccatataacaaggataatattattgcctgcctcttgggttggcagagtgtgtgtgtgtgtgtgtgtgtgtgtgtgtgtgtgtgtatgtatatagtgagttaatatatgcaaggcactaagaatagtactggcacatagtcaatgttcagtagttgttagttgttattcatattcatgagaagtttggggtatttatttttgtattttgtctctttttagttttttttactattattatttttaatttttccataagttattggggtgcaggtggtatttggttacatgtgtaagttctttagtggtgatctgtaagattttggtgcacccatcacccaagcaatatacactgcaccatatttgtagtcttctatccctcactcccacaggtccctcaaatccattgcatcattcttatgcctttgtctcctcgcagcttagctcccagatatcattgagaacatacgatgtttggttttccactcctgagttacttcacttagaataatagtctccaatctcatccaggtcactgcaaatgctgttaattcattcctttttatgtctgcgtagtattccatcatacacacacacacacacacacacacacacacacacacacatatgtctcacacagtttctttatccactcgttgattgatgggcatttgggttggttccacgattttgccggattcgctccctcccctgagttctggccaggaagcttcttgccccgttcaaattgttacaaagttcagctagagaattccttctccctgtggagttttaccccctgctcctctggccatcttcctgatggatccctttggcgccagcgaggaatggctgcctgggaacccagtgagctcccagggcctttctgctacctcctctacctcggtgttttgctctgctctccaaattgactcagtcagggaaagttagacacttctcccgcaaacagatcttcagcttctccagtggggctgtgtgttcgggagaggagggtctctctttcccacttccgcagttggggcactcatagttttggggggggtctcctgggtcctgtaggagcagtccgcttcctccagagggtctgtgggtcctctcgggattgctggtttgttcttgtagttaatctggagctaaaattcacaatgcgagcccccgcttgctgctctgtctggagttgcactctagtcctgcctcctcctgtccgccatgatctccggtattcattttaggtcaaacccatattttaattttttttcttttaggcaataaattaattatggcttccatttcacttgctagctagaagtcatcactaaaaacactccagtttctacacagtaacttaaggtttaccttgctacactgggaaaggaaagattaggcactagatccatttgctaagataatacagtcatgcacttgagatataagagaaatacaatccagtgtcaagggcatgcagtttaaagtgaagagtaatattattttgttaattgcttcatgctttattatttaatttagctattcaatcgtgatagtaaaaacaaaacagaacaaaacaattctattgttacttaaacataggtaattttaatatacagcctctttttcatactttttgcaatggcaagggtctctaacttttaggcattagagatggatgtcccttcattctcttcctagtctctcattccaggatcttgtttatgcccttctagcatcctcccacctctccctttcagcgatgcaatcactccccaagttctagctgcatcataggcttatccccttatctgctgagccacggaggcaactggggctggacatacatgccttgctcttacttccctgcacttagcccccttgtactttacttaagcctatcacactaggttccacagttacatgtaaaaacctgtagtgtactgaaggcaataccagaaattgaaacattaaagttgtcattacttcctggagtctcatggcaattgcaggtaggcctttctcaaagagaggtttggtacttttttactcttaatccgcttcttccaacctcatctccttgaagtatgttcagttgatatacaataatgcatttattttaccaatagttattgagtgctggtcacttcctggatctcatggagactggagaaaggagttatgagaatataggtccaatggctagaatgttctctctcttctcttcaccattttaagtttcagacccacttctgaggaggccaacctgaatgcccaatacatgtctttagcttaacaatgaacatacagtggtggtggcgtttttagttaggacatggagatacacacgcacacacacacatatacacacacacacaaatatataagcatatatatgtatacacacactcatattcttaggacatggaaatataggtaatttgtatgtattaacacatactatataaaaaaatttatgtgtgtgtatatatacacaataaaatttgtgtgtgtgtatatatatgattatgtctatctaattaccttctaaactatttaaagcttatataaaaaggaaaattaactcaaattgttatctaaacatcagtgaagtttcattttctacccaagggccggaaaaacttcgtcatttatttactttggaaaatttgggatttttctattgaatttactacttatggctctgttactttattcctaggttaattctatctgctttttagttttctatgtctgtttgatacaaaatactatattctctgcacattttagaaaagtgttagaagaggaaagaaagattctatttggcttcacattttattgaggaggaacagtttctcactcacagaatataagagctgtctacaaatagttttaaatgtttgacagaaattcagtaatccatcactggatagggattatatttttaagggtgtgttcagaatgaaatacaatgtcagtaaaagtcttgataaactgtaaaaactcattagagtataaaatatttttattattgcacttaatatgagcataccttgatttgttctgctttgaatttgtgtttgggtgtctttttgtttgtttgtttgtttggttggttggtttgtttttttgagagggagtcttgctttgtcacccaggctggagtacagtggtgtgatctaggctcactgcaacctctgcttcctgggcccaagcaattctcctgtctcagcctcccaagtagctgggattacaggcgtgtgccatgacacccaactaatttttttttttttttgtattttttggtagggacggggtttcaccatgttggccaggctggtctcgaactcttgacctcaagtgatctgcctgccccagcctcccaaagtgctggtattacaggcataagccaccgtgcccggcctgtgctttgcttttttgtgctacacagacactgcattttttacaaattgaaggtttgtggcaaccttttgttgagcaagtctattggcaccattcttccaacagtatgcacttgcctcatgtttctgtgtcacattttggtgattcttgcactatttcaaacttttttcattatcattatgtctgttgtggtgatctgtgacaaatgatctttggtgttaccattgtgattgttttgggtgccatggactgcacccatacaagacagtgaatttaagcaatagacgttttgtgtattctgactgcttcactgactgggtattcccccatctctctccctctgcttgggcctccctattccctgagacaaaacactattgaaattaggccaatgaataagcctacaatggcctccaagtgttcaagtgaaagaaagagtcacacatctctcgcttaaaataaaaagctaaaaataattaagcttagtgagaaaggcatgttaaaagccaatataggtagaaagctaggattctttcttcaaacaattagccaagttgtgagtgcaaaggaaaagttcttgaagaaaattaaaagtgctactccagtgaacacacaaatgataagaaagcaaaacaactttattgctgatgtggagaaagtttgaatgatctggatagaacatcaaaacagccataatatgtccttaagcctttttcagagcaaggcatgtggtagatagaataaagtactgtccttgagatataaatcatttaaaaaaacctaactaggcgtggatttatttgattattaaaccaggcaacaagtatttattaagcctctaccatgtgccaggcacaactgtatgcactagagatatagaggtgtcaagttcgactaaggtgttggtaagaaaaggtgcctcaaaggaataatgagtgaatttgggtgggagatagagtagaaggagaggggaaggataatcttgggtggcggtttatatttttagttgagaatcactgtcagttaatagttgttgctcctatgaatatcctggtcaaaacacctacaaagcagagagccaagcctacacatttaacccttggaaaaaaattgctggagttagcccttctcttatcagtttttctttctctgttgtctttgggaagggtggtaagtgcaggttccattctgttcccttattcagtcccagtactagctaattttgttttataaaataggcttcttttattcttagggcaaaagcaaaacttccttttgctcagtagaagtagcagctgggaaagtcccagttatctctgttccaaattaggttttaacttattaacattatctttgtcccaggaccttcttctgctctttgaattttgagttcgtggtttcttcagttttggaaagtaattagttttggaaaacgaattttctatttgaagttgtcttttccaaacatgttttggactccgttttctctgttgtgatgtctctgttcatttagttccagattaacttttatctttgagaaactcctcaaaatttgttcttatgtaattgcaccatttatcaatttctagtgctttaatacattcattatcttaaaagcaatcttttctattattgcatttatatgttgtagagtaggaaaatagatacatgttctcagtctgcaatcttcatcatttcattcctctacttgaattaaatatacatacataatttaaacctgtaaaataaatacattttcagtgtagaaaaatcagaatatgtattacatatactgtattattagatgttattaatattatatatttatatctatttagtaaattacacatgacccacaagccagaaagaaccactcaatatttttcggctatatatatatatatatatatatatatatatatacacacacacatatagtctattctcattcattcaagcctatgtctttaattcctaccacatagctctgtatatgtacagtttttattttactagaataggagcctactaaattgacagttttgtaacttgaattttttcagttatatcgtaaacttcttgctgcctgttaaatactctttgatagaattattagttttatcaattacaacttttatcgcataagatatttttatcttattccttatttcttagattgcttccaattttctccattacaaacactacttctgtgaatattcatagagataaatctttttgtacatttgtgattatgtccccagggtaaataaaataacttttttttacctaatatcacagaagaattagcagaaaatcctggatactgccatggtggaatgacttctccttcttttaaggtgtattaaataaaatccatttcttagtttttctacaaactcacaaaagtattgagccagttttatacaacctttcactgttttgatttgtgtatgtctatgtgtgtgtgtataagccaggaggaagagagagagagagaaagaaagaaagagattgcttatgaaagtgttttaaattgttagtgaaataaggactgtttttcatttcaaacaagactagtactgagaggaagctggaagtcctaggtactgttgtgccttagttctgcaactttcataagacagaagaaaacaagaaaacttttcttctcagaaacagcgtggagacagctcctccctctcaagggaggctctcttttgttactctgcttttctgatagaattacctatatggagctggtgacttctcttttttttggatacagtgagaccaatattctaactacttccaaatctactgcctttgactctttctttttaccctgtcaatgctgcttagccaaagagcaccaggaatgtacctgcacttgaagtatttggattttttttcttgttgcaataaagagaaggcacatcagggagaaccatggggtatctcaggaaaagggcattagaaaggacttggaagatttagacttgtgttcagtgatttgaggagggttcaaggaagcagggcttggatatagtttgcctgctatcaagaagcaggcgtaattttatgatttgacatattaatggaatattaatgactctacttggaagtaacggaccaacttttctggtctgcttgagactgaggggtctcctggggcaaggcattttcagaacccaaaccaggaaattcccagacaaactaggaggagtggatcacaccgcgtagagggcaggagaaatgagatgaggctacagctggaattgctaaagaagcagtcattcatactagccaggatttgctcatttttgtggtttgggcaatgttcattattttgtctagattctgacatgattacaacgtggtcttgtcactctcttggttcatcatggtgacagagtggccttgtctaatttcgatgttgttggtgctcagtagaaaaccagattccgcctctgagtagcaggctaacttccggaaaagcaaggcattctcatgttgccagcctagtttctaactgtcaggggctgcttttcttttttccagttcccttcttggggggtttcagggctgcttttgggtgggcatgagtttatagatgtgaccttctcatttcaagagttttaattttagccacattggttctgtgccatagtgaaacattttgggctttgagacactgaataataataaaacatgatctatttctcttaacacattttttcaaatagagaacaatgttttaatgattaagactaaatgctaaattactgttaaaatttttaaaatcagatgctatgctgcttctttgagattcaaaatttacattagcatatttcagtgttcttagtaatactgctataaggaaacccaatttatttgatatagacacttatttccatagaatgcattaacattttggtaagtactagtatttcactattaaaccagtatttcctagaaataaatactagtctaatttatttagtgattgtcccataattgtgctttctgttttttttttaaattagaaatatgtaaggggcaaataactattctgatttaaattgttctgacttaaaataaatgtccttaataaccgtcatggaaaacaaatggttttatgttttacagatctactgttttaatattaagagaaaatagatatggtgactggattctattttttggaaaacacttaactagtagatgaacatagtattacatagttgatttagtttagtcataaagattataaaactagttaaattgtgaagtattattttaattattaacattggttcaattatttcagctatcttaaactcagttcggtttcccgtatattaaattggttgtttagcaattagtctttatagcaatggaggaaatactgtggctttagttatattataatctacattcataaaattttctctagattctgaagactactttgaggtcaacattccaacagacctacgagcaaaacattctggggaaataagtgagagaaaggaaattgaagaactatcagaagcttcaagaaacaccataccactagcagtggtgcttcccactgaaattccatgtgaggtcagtaaagataccttgttatttaagtgaccccattgtgttatggtggtggtggtggttgttgttgtttggagagacagggtctcattaggttgcccaggctggtctttaactcctggcctcaagagatcctcctgcctcagcctcccaaaatgttgagattgcaggcatgagccaccgcatccagcccacctgttatttttttaatagatattgtatttcacaagaatgcaagctccaacatagctgtcatttttgtctgctttgttcatggctatcctctgaacctaggcaattagcaggcatttgatacacactggatgatagttgaattaataggcatttgttacataattgttgaaaaattaaatagtgaaggttatatggaagcttaattttatcaactgtgacttcacattttgcaaatagatgtacaattgcaatagctctcaagctagtcaaaagaaatttagattcacagtaaataggttaaggatctattttcctaaagggaaacatacccttggatagaattttaaaatactttatttttaggaccacaccatattttcaatgaagaaacatgtattaaaggctgacattaagtggaaataccataaaagttagaagagatagtccttcaggaaataagagtataatgtggggggatgatttctgggcaggtgactgtgggaatatatgttcctagcatgtcttcctcctaaatcttgcttggaatgaaccactaaaataagcctttccaaatatctgactatataatcttaggacatgaaaaagatgctgggcctcagtttgtggcatccttgagtataaagagccagagatacaggagagcgttatgggagttgcctgaaggagtctttctgatagaagccagtgacaggggctcactgacctttgggtgggtctcctgatcctactggtaccagtggtcctgatggaggtggaatatcctgtgtagaagggtatagtttagtttcctcaccctcactctctagacccttaccccatgcctaagcagaagaattgctgttttaagctatttgctgtcagttccagaggaacaaaaaaatgctttgacactaccttagagaccccaggaaacggaactatacaggtatgaggaaactgacacagatgatcaggcaaagaaaaattacaagggctcagaacttaaaggaaggagatcaggctgaacagtcagaactcgtggctcctactgagtcagaaacaatggaaaagacagaaaataagtgtaataaaagaaaaatggcaactactctcaagtagatgaaatcaaagcagaaaaaagaaaaccctctgaaactaaaagtagctcaacaggagttatacagtgagtctaaatagctgcttttaaaaatatctgcaacagtaaaattcgagcactgtaagacccttctcttactaaattttcaaagaaatcagtcccaaaatcaaacctcactgctatctaagcaaagatgtgttatttagatagctagttagataagggttttttcaataggagaatcatggactgttttttattgacattgatataattctttcagactcttggatttaaattatttcaatataaaatttcttttaggtaccccactttttaaagaatcctaaacatttaaaaggttatacaaagttattttagtgccagccccacattctaatcaaagtaagctaatcattggaccaaaaatagttatcccagacaagattttttgttttcagaacctagattttagtatagtctgaatccataagactattgccaaccaccagagaaaagaccacttttacccactgagtggaaatcatgtttcagacttgccacgacaactttcagcctatgtcaactgtctgaaagcacaacctttgaattcaaattcatttctgagaagttttccaagtagtccgtgaatagagaccacttaagattactgccttaaggaaatgatagttgaggcttccctatcatcctaaaaaatctagaaattttaccatactacctcagtcagtcaccaggtcttccttaagatgtgcctgattcatacccagtatcttcaaactgtgttaatttctctttttagttttgtgtttccagcatgctaacactgggttgactatgagctctttatagttgcgtaattttcattctctctgatgaaaagggagttagtttaaatttttcctgctgctgcctcttgctgtggaattgctgaggtctatggacctgcctcctagagaaattctcttctttctgccctcatctgctctgcagcattaactttagtctatcgttaattaaggcagtgggtgctgttgctactacctatgacccttggagcttgggaatattgattcctctgccttgtcactcttcctagcactgctcttttccacagatttggatttcctagaccttgaaaattatgtgccacttctcaaacagcagaaaaatattttactttatttctttaactttttttccccatgcactagtgaagatatccctccattgtcctatttatgtaagttaattatctgtgtctttgagaaatacctaggtgagttttagtagttccaatctgtttcttaatttgacctcttcttttactttctataagactggcacactttttctattttagtattttttggacttttctttgtttatgggccaagacatttgtttttctagcatatgcctcttggtttttttgtgtgggtcaattgaccatgagagatgtgagttctaggtctcccaaatgcatccactgttcaaacgaacctcatccaattttatctccctgatgaaaaatccaactgtgaggtactctcccgttggaattacaacaaaaccagaacttgacctgatctattttttagtaacttctcttccctgtgcagtccattacaccggcaaactccctcaaagaagtggctctccactgcaggtgattttgaccctctctacccagtggatatttggcaaagcttgcagagatttttgattgtcataactagggggttgctactagcatttagtgggtagaactctgaaagctgctaaacttcctgtaatgcacacaacagctcccacaacagtgacacatttggtccaaaaatatcaacagtgtcaagtttaaatcttatttttgtgatccctagtcacagattcagaaatgacttccatattttctcagcagtagctccatcctatagaacaattaggagtgagcttattttctttatctctttttttctttaaacccagatctttaaatatatcattttcccttccttttggtagaatctgcccactgtaatctcaactttccttctccccaaatctcttacttcctttaatataatcaaccctaattcttttatttttattttattttcccactgctgctatcctgatgttaagatagagacatttgaaaaaccagttgagtcacttattgatttcttgagaaaatttaattctgaaagtcatcgtgcaaccacaaaagaccgttaaagtggctttatcagcatttggatctatattaattttattgaatgtttttacaatcagaatcctaccacataccatattccctaataaaggtctttattttatatgacctgttcattgacacacttctaaggctaaaaccctaatatgagtcttcagcccttcgacagaccatggattatgtaataaacaaatatagagataaattgagatgacatgaaagaatgtaactcttaaaggccataagaatctcagagattacctttttgcccgttcatcccttgactctgaatacaatttaaaacagtgtacaaaagctaacagcactacccacttacttctgataccaaatcacaaactagtccttggtaaccaaccttaacttaaagcccaatcctgtgatttaattggaaaatacagtaaaagcagcaaaagatgcttgtgtgcattaatgcctgaaaagtctgtattgtgaagtgatgccttctcagaggtgaagttttacagtgaccaaaagatgtctctttcttttaaataggtggttatcaaaaactaagctacatacagggactattaggggagttttcatacacacaaaataatgcctgtgtcctacctcagagattcggatataaatgccacattgcagaccagatttcacctcttttgttaggtctcaaggcttatgaccaatgtagccaagctttaaagtttggaagtgataattgtcataaacctttgtttccctgaatgctctgacctaaataagggattcacagaggagtcagaaagattgggagcaaaacaatagcttcgtaagtggtaaaactaatttatgaccacttgaggatcctaatattttctccattgaattaaattagctaatgtaattaagagccagtgcttactcccgggagttgaggaagctttgagtactgagagaagtatggaacagagctgagcatgctcaatgttaaagtgtcatatttttacagacttacttcaccttaatttaaaaatatatatacagaatgtttttacgtgaataatttttgaaaggtgctacgataatataagaaaataaaaacacccttaggatgtttaacatctagctagaaaggcaagacacagacatgaaaaactaatcaggagtagagagcatgactcttagaaacagtcaaatgatggttatggatatgcagtgcagaaacagtcaaatgatggttatggatatgcagtgctttagtgttcctttgaaagttctaaaactctttgtgagctgaagttgcaggaggattttgtggagctggtgagacctgagttggacattgttggagaggataaatatggggatatagaaggagaaaaggaattaaatatcatgccaacattatgttcaagcaagcccagctgcctagtttacggtgcaaaatgaaaatacaaagtaccatgttcaaattattataatgtcaaggtaattacagcagaatattaaaccaaatacagggccttctaagtgtggggccctgtgtgacggtaaggtcatgggcccatgaagctggccatgggtacaaatgaagatgtgagtgcctcatttggggtggtcagtgtgtttgtcttttgcttagaacatttctctggaaatggttgaaaggtggagtcctgactttcttttttttttatttttattttttttcgacacagagacttgctctgtcgcccaggctggagtgcagtggcgtgatctcggctcactgcaacttctgcctcccgggctcaagcaattttcttgcctcagcctcctgaggagctgggattacaggtgtgcaccaccatgcccgggtaattttcatgtctttagtagagatggggtttcaccatgttggccaagctggtcttgaactcctgacctcaggtgatccacctgcctcggccgcccaaagtgctgggattacaggcatgagccaccgcacccggccctgagtgaggaatctcctgtgtcagaagcagtcatgagttgggagtcggttgggtggataaaacactgggagagtgcatgtgtactatccaaatgtggaaagccataagtcaaagttaaacaaggaatgatgcacacacaggaaagatctttgaactttaaagcagaggatcttgactaactgagcccaagtgaaatggaaagacattatttggctcttaaagatttgaggtaaggggcagatatgagaaacaaaaggaacaaaagaactgtactagaagcgaggccctgtgaggaggaggttgcagatgtgaggaacaggagggcttacactccggcttttctgacacattgcatgtgtggggcaagagcaacaagtggaatagtgggagttcctttgaaataggatcctttcccgatgagcgttgtaaattctgaggagaaatttagttttccctgtggaaaaatatttaggagtattagactctggtggaaaatgcctgaagtagatttttgtgtgagctgaaatgattctataacatcaacataattagaaactcttttggataaagcataaagatgtaagttttattggtgagtaatttatacttaggggcatttaagagaatcttgaaattagtaactttttgagaaacatgattttataagagcatataaatgggatccctgttttttttaagtatggaattgaaacttattatgacttgaagaaagcttttgaagggtgatatctaagataatcataaaaagaatgttttattttaattttttcatggggttcgacagcatgatataaggattagtgtggatttggaaattaaatatttctgattagtcttcagaatgtaattctgtatattagttgtccttttcctaaaagagaaaaagaaatagccttatccatttattttggtatgtgtatgtgtgtgtgtgtgtgtttgtctttctgtatgtctttgtgtttatctgtttcagttaggtttagaggaaatatatttatttaaaaagtgctgagtataatttctagtataaaatagataataaatgtttatgcctttcttttctctgtattaaccccaatctttcattcctagtattttttctcaatattttttcacaaagttattcaataacctttttcaccttatacatttggcctctccatcttaattaaatctagaaactttagatttataacctttagtcaactcaaaaaccatggcagacacttaccacaaataaagagtggccactgaacttctactacataaaatataaaactattggacttcttaaaagtcattatatttaaattgtaagagatcttaaactttttcaattctatcatttatagataaaggaaccaagttatataaaggactaaaaaagggatttggaaaaatgatttggttaacagctgaattatagccttctgctggtctgcgaaatgatgcttataccctggtacagagagccatattgaggaagacgcaagaagaaaaggaagaggctatattcatactgtttctttaagttgcaaaatatggcattagagggaaaaaaagagcgtacaataaaaagaaatttgatactatttaaaatgtagtgagaatcacatttatgtattttatttctggatacagttgaaaatacaaacaccatagaagacttattcaataatagtgtattaccttaattataaagaaatgtaatgggttctttggttaatgtaaacttttccaaatgcttaaatgggttacattttcatcttacagaatcctggtgaaatattcataattttgagagatgaagtaattggtgatactgtagaggttgaatttacatcaagtaataagcgcattagaacacggccagccctttggaataagaaagtctggtgcatgaaagctttaggtaagaatgtttatgatttaataagcataaaacattatcctgagttccttccaataaatttataataaatggtttcacttccttacaaaaactaatattgttctgcaggtgtttcctgtgtttagttttcacatacccaaggttgttattattaatctggatttgcaaaagtaagaacatgtaaattatgagaaattagtttgtatactgtgtaatgaaatgacatccagtaacatcatacatttttaaatatgtcagcagagagcattttaatttatggcaaccactaaacatatgactaaaattgtttgcttttttgtgacatttggattagcaatttattttgagttttattaataaactctatttttttccctttctttcttttttcccccaagtctctggtatatttttgttactctgaaaagcattttttcccattattttatcagtatggtgcaatttgtacatataatcttctcatcttttcctcatctcacttacaaagctaatcatttgattatccagctttgcttatagcatgataaattgtatcagatttaaaattccagatggaataaccataattgcaacaataattgtattaaaatcaaaatctaatattaatctaatactaatttctggatattttaatataaatgtaaaactgcttggtttttacatttatgatgtcttttcctgatcagagaataaaatcatcttattaaacctcataaatgtgaactttataaaatattttgaaataaaaagatgctcaatcttgttatgaatttggaaatgtggcaaaaatattttaaattaaagatcatgtcaaacacattttgaacattttttccttttaaaatatagtgattatgcagtctatttacaaagcatttacagacttctgtttgtgtggaaggcatgtgtatggatttccttgcacagcttagactgaagttggattataagaaggaaaaactccatactaaacatttataaacatttcagacactgctttctgtcatggataagcatgtgtagaagtgaaatgagaaaaactctgtctctttccttttctttctttcttgtctcaatgccccctacttcattatgtcacattcttaagtggtttaatgaataaaattttctaactaattagtttcagaatttaaatttagttagactaaagacactatagaaatatcaatattgcaaattaagaagcacttaaataatatttcccaaatagcagatcaagatgtcaaatataattattcacattacttaagaatttttgctcagtatacctactgggtgagagcagtataaagaataaaacatgtcaaagttcaaattaattataagaaaagcagaaaatgaatatgccatgcttccaagatataccaagacatactattgtcttcatgattaaacaacaaatctgtaataaataaataaaccactgtttaccaactatcataattaaacttatttaagtattcgtttcaactgttgtattctttaaattgatgagaaattttctcccaaaatgttggctgctttgtagcaatattcaagatggttacctgaacctgtttggttggatggaaactgccttggcagaaatgggcccagagccttattttctctgcttcatgtcactgtattttgaaatgttttgaaccctactaagaacaactagtaagaactacattttacatcatgacccagtacatatgcacagatatataaggaaaacaaaggttttacaagtaatatttagatgaatggttttagctcgaacagtaaagagcccatttttacaagaaaaagctgaaccactacaaaatcgaccacgtttcttgaacccattagagaactaaagttgcaaggtgttagatgcaggtgtgatacctttcctcaccatcataagggtcacagttgtcactcctgtaataaaagagagattaacaagagaaaagcctaacaaatttatttaatcaaagatttatgggagccttcagaaatgaagacccaaggaccaatgggaaactgtccatttttatgcttaggttcaacgaagaataaacagccgtgtaggacagtgattgaacaaaagaatatgaactagtggtaacaggcttgaggggaggaggacccagtaagtcctgtctgtccagatttttgctggcttctctatgtcacattctttcctcccaggtatggagcaggctttctctgaaatgaggatctttaaggcagaagagagaagggagaccttttttggttttgtggttttctttgggaaagaggagctctagtttctatgacctgccttggggaagaggaattctggcttctatgacttgatcaggggcaggaagaagggttggagacaggaggatggaaggtcagaaagaccttgcttctgaggccctttagtcttcattagttcaaagtatgcagcacaccaacacgtcatactttggggtattgtcttctgaactctgacaaggacaatccactattccaaaagctggagaaaacgatgaactaagagagtgtcatttgaaatctgcttacctagagcagaagccactggagccacaaactagtaggagcacttaagtgttaattttgatgaatgtctgaaagctgaatatggattagtttgagagtgagaaactcctgggggtagtagttttaggatgtccccacacttttgtaggatttacctccatgaatcccaccaggtttttacaatgaagatctgagaaagagcccatggaacctctggtggggtcagaggaaggataatcgtggtgaaatactcccagcatgttctccatagcacaggcctactctccagaagaaaacacctcaccagagcctcattccagctgggaaaggacatcatctcactgtggctccctctggccttcctgtctcacttaaaggggattaggggaaggtatgccacagcaaaaacccttgtaaagtcacaacgaagagtcactgaaagactaagacttaatcataagaatgtagaatgctttccttccctaccaccttatggttaccacaacaggattccagcataatgacagtggattactgtttaaaaaagcaaacaaccaaccaaaaaaacccagcaagattcagactctgtctcggtaaagtacttagaaaagtacataatcaaaaagagagacagaaacaagaatgctagaggaatttaaagctgctagcactgatagctacaacaaacattaaatacagtccaactcctaaacggattcctataaattctttcactacaggagtatttaccttacatctagtcataaaccaaacattgcaaggcattcctaaagacaagataaaacacaatttaaagagacaaagcatgcatcagactagaattagatatgacatacatggaaaatgtatgaaagaacatattgattatataaaaagagataaactttgagaaagaatcaacaggaaattctagaaatcaaaaccaccgtatcaaaaattaaaaaataactttaataggtttactagtagagttgacaaaggtcagaaaagaatcattgaatttgaagacaggtcaatgaaaacttcccaaacttaaatggtaaagagaaaaaagtttttttgtctgtttgttttttaaagaaaggacaaaacatctaagaaatgtgggatgatttcagaaggtctaacatacatgtaattggaatacaagaagaatgacaaaatgaagcacaataaatattcgcatattaatgacagatcaaaatacagatataggaagctcaagtaacatgaagaaagataaatataaaatattgacacctattcatattacattcgaactgtagaaaactgaaaacaaaagagaaaatcttgtcagaagccagagaaaacgaataccttacctgtagagaaatgagtataggaataccatttgacccagccatcccattactgggtatatacccaaaggactataaatcatgctgctataaagacacatgcacacgtatgtttattgcagcactattcacaatagcaaagacttggaaccaacccaaatgtccaacaatgatagactggattaagaaaatgtggcacatatacaccatggaatactatgcagccataaaaaatgatgagttcatatcctttgtagggacatggatgaaattggaaaccatcattctcagtaaactatcgcaagaacaaaaaaccaaacgccgcatattctcactcataggtgggaattgaacaatgagatcacatggacacaggaaggggaatatcacactctggggactgtggtggggtcgggggaggggggagggatagcattgggagatatacctaatgctagatgacacattagtgggtgcagtgcaccagcatggcacatgtatacatatgtaactaacctgcacaatgtgcacatgtaccctaaaacttagagtataataaaaaaaatttaaaaaaaaaaaaaaaaaaaagaattacgttgaatttctcttcagaaaccacacaagcaagaaaatagtggagtaaaatattttaagtattgtgaaaaaaaggaacccaccaatctaaaattctatattcagtgaaattatccttaatatagaatgaagtagaaataaggattttttcaaacagaaaaatgaaggagttcattaccagcagacctgccctgcaagaaattttaaaagaagttctttgggaaagaagggaaataatgtaggtcagaaacttagatctacgtaaagaaagagcatagagaataaatgaatgaaggtaaaaacacaatatttcattttccttatttttaattgatctaaaagataaatgtgtgtctgaagtaaacactgtcaatgtgttgggtgattacagcatatggataagtgaaagtaatgacagcaatatcataagggacaggagggacttaggtttgttaaaaatgtatatttcaaactctaggacaattactaaaaattttttaaaagctataaatgtgccatgcacatgtaccctaaaacttaaagtataattaaaaaaaataaatataaataaataaataaataaataaaagctataaatggtaggctaagaagagagaaaatagaatcctataaaattctcaagtaattttgacagagagcagaaaaggttggggtagagagcgggaacaaagaaaaatgtagggaataataaaaattacaagtatgagagatataacccaaccacgttagtgaagccaagtaagaactacttaagtttagtgaatagtctaagaacgccaattaaaagacagagattgccagaatggataacaagcaagacccaataatatgttgtctataaaaaactcaatttaaatattaagacacgggtaaatcaaaagtgaaaagtgaaagggttggagcaaggtaggttggaggttggtgcaaaagtaattgcggttttgcaaatggcattgaaagtaatgtaatgaaattgaaatacaagaagaatgagaaaatgaagcacaagaaatattcaaatattaatgacagagatcaaaacacagatacaccaacctaataccatgctaacactaatcaaagtagagctggaaagttgtactaatttcagagaaagaagattttagaaaaagaaaaattatcatgaatgaacagaagcattatataatgataaagatatattctccaagaaaacagaaaactcttaaacaggtatgcacttaacaacagagtgtcacaatatgtaaagcaaaagctgctggaattgaaaagagcaatagacaagtccactattgtataagatttgtgatatacttgcttggtttggagatcttgacctgtatttgtgtgtacttacagggttaggtgttgcctgactactttcatctagatggtaaacagcaacatttaattttactctcttctatttgagtccttacattaattggattttatttttactgagaggctgtaaaatacagtcatcatagtgaaccaaaattaaagttaaataatgtggaagcagaacagagtactgctcatgtgaaggtcagttcaataatatattactgagggggccttccaaccagatgaatctataagacattctctctgacatacagttgagagcagtaattaagtattgatttaataactgccatttaacaaatatgagaatgtatacagaaaacacaatcctttaaaaggcatctcattggaggattactctaaaatcgacatcattatcggtagatccaccagtaaaattttgagttaactaaggattcaatatataagaaataaatcagttcagtttcatgttagattaaaaatatatagaatatttatctactctgtatcaaaaaactaccaagcaaatctcaccatatacctctcctgattcattaccgattttctttcaaaaagttaactccccatggtaaaactcctaatctcttttgtgataaacaaaattaatatcttatttcaaaataatttttatgacttatcataacatttaaatttaaatttatctttataaaatctactgaaattgatttcatttgactccaataactccagaacttccattaccatatgcgtactgctgtagctgatgagatgtgctttaaaactttcatttttgtttgttgtaatttctcttacattctctattggatggatacttctttgggaagagagagctcctatttttctacatgcatcttctttgtaatacaggcgaggtgtctactcaagaaatatgaggaagaaatttcagctccttgacctagttaagcttaagattgctttcgttgcatttaagtttccctcagcaatattataagaagtcctttaacagcttcatgagataaagtgaaattaatacttaatccttaaaaacttttaaatattcaaagctcttatatttaatgacctattcctaaccctagatatttgagtgacagttttctgggagaatttgggaaatatctcaatgacagattaaaagcacttaaaatttgttccacagatgaatttaaagaattacattttgtttagtattcttacactaaaacacaataacttttttattgaaatgattgtttattgatattctttcatagaaagtcctaaattcttatataactttaattctgctcatatattacagcacaattcacaatgtagtgtatcattcattttgaacaacttgttctcaaaaaggctttggatgaatgtatgatgtaaacagtacttcagtatcaggggattaaaccttgcctttcccaggatttttcattgcagtcaattgaatacaaattgtatcatttaaatcagctgtactctttcaaattactatttttgagacacttgcctgtaattaattaaattgttttcataagataaataataaatacctaacttttgataaatggctatacttttccaaattctaaagaattatgtaaagattatagattattacaaagaaaagttatactagtaagtaagtagggacaaataatttagtgctttacttttattgttattttaacatgtttttatattttaagtttatttttaagcaaataagtctaaaattgtacatttcattttgtgttttccaactaccaagaattttaaaaatgattttaagtgctagagatgagtaaaagtgttatgaatttttaaaggcttcttttatattctctaaaagatgtaatagtatgaatatgcattatatactctgcccctaacccttgtttgtttttcataagagtttcctgctggttcagtccatgtcaatgtctactgtgatggaatcgttaaagctacaaccaaaattaagtactacccaacagcaaaggcaaaggaatgcctattcagaatggcagattcaggagagagtttgtgccaggtaagttaatctttccacgaagttaatcataatgtaagctgaagagctaatgaaggataagaggattcatgctttggtataagtttgaatgtggattgaataacagtgaattactaccaatcaataggaagggaagaggcaacctctgttgtgccaaaatgcagacaaattactttgcctaggtcaaaaaaaaacagataatgtcaatggaaaacagcttattcattacaaggtagccattgtgatgggctcattttaaagctgttacaagcagataaagggagagcaattagaaagaactcctaagaaatgaattccttctttattcagatctgcataacacaaagtaaaatgaaagtctaatcatctgtctcatgctttgagattaaggagttagacaaaccaaaatatcaccaaaaagggaacgtgtggtgtcaatctagaaattgttactttcatgtggacacatctaagctcagtgtatgtttttcttagtttcatttatcattgttatctgattgtgaaaattattttttctttgtgatgtttattgggaatatgtgcttattccatcaaattttcagagtgaaatgccatttctatttataacaatttgataactagaattgtaactttgcttatttgtctcagttttttgcgtgggtgagaggtagaagagggtagagaaaggaagtcgaagtatcttcaaatttaccataaaatttaccataaaaacctatcttcaaatttaccataaaaacctgtaaggtttttaacaaaactgtcaatgataatgtagctgacaagttttcatgaagctttatgtgtttaaactagtttagaattggaggatttgttatttcatgtgacacatttttctattagggttttatttttatattatatgaacgacatattttagaacaacagaaaaggtaaacattaagacaggtagtgaaataacatttgtcaaaatggagagtctgaggacatttgacaaaatgtctatattgtaattccaaagcaagtagaaaagtaatagcttaaaaaacagactgtttcattttcttgtgacaagtccaccttatcctctacttaaaaattatattcataacaaaaaagattaataaaggtaatatattgcattgtgactatccagtcagtgtagaagtaaagtagtctccaaacatattttctgttggtctttctgttgtgggtggggatctttgaatatagtaaaaattaaatgtaatttatgactcctggacaattggtcaggatgctataaatacacaagtcatgatttcttttacagcttgaagtgaaaacaaaaagtgagtttgctagtttttagataagtagaaaaatgctgtttcatttttaccctctgtactggaaatgaggggaaagaaagggtcattgcttttctcaaggatttttctctaccaccaagctctggcggcctgtagaagggagaatgttgggcaggcacaggatgattcaggttttaccatcaggagagagccattttaagtcagaggtctgagtaatgatggacagaattactctaacccagtggcagcaaaccatggcatggcaaggagagacattaagagattgtttaatttatgtaatttaaggcaggtttagaggttttgcaactgtcatgagggcacctagaagtattgtgggattagagaaaacaaaatctgagactgggatctcagaccagatcaagctgtactgtaacaggggatagaaggaaaggctgcacttgagtcagtctcccaaacatcttggactaagtgtgacatggggtttgtctaaatcttctggcatctggaccacacagggtatctgtgaactcactgagaagttgaaaagcactttctacccctgaggaagcaactgcagaggcattgccatggtgtattttagatttgtttgacctcgagggagttgtcctagcccacactgtgtttctccttcagggcatttggttttcctttctgtatttgcctttgctcccacatagattatatatatttaacaaattttgtggtcgggcatggtaactcacgcctgtggtctcagtactttaggagttcgaggcaggtggatcacttgaggccaagagttcaagaccagcatggctgacaatggcaaaaccccatctctactaaaaatacaaaaattagccgagcatggtgatgtatgcctgtaatcccatctactcaggtgcttgaggcaagagaatcgcttgaacccgggaggtagaggttgcaatgagctgaaatcacgccacagcactccagcctgggtgacagaataagtctctgtctcaaaaactaaagaaaaaaaaaaaaagaaaagtaaaaagaaaaaaaaacccagcattttgtggaaagctgtacatttcttttccaggttagaacatttcagtaattgtttctttcatgggctactcagccattttttttaagaaatgtgaatattttgcccgtggttcactctgaacatctgtattgaaaacacaatgtaaattgtaattttatttagcatagttactgtttatatgtcagaatatatgccagaagatttgaatttttaaaataacctacttacttagctgaaatgttatattgtaagaactttcctgagttttctagtaaattttaatggcagatgtgatttcagtaatcctaaaaattagtagtaagatctttctcatgagcatttaaaagctattgggcatgtaataacatgaacattgtgtgaatttgaggaaagaattactaatgagaaatctgcaggatttaagtttcagcaattgttgagtttgtaataagagaccttgtattatcattttaaaaaaactgcgcatatagcaaaatgagcgttctgtgaatttgagaaaagaagtaataatgagaaatctggctttctaatttaatttttaatgatgtctattaggttttagaacactaatctgaatggtttaattatctatctgcttttttaatcatttcatctttgttagataaacactgaatcccagaacatagcctcataaaggtgaaatttccagaacatcacttaaaacagtgaatataagagagattcaaatgaaagaaatccaaagcccagtttgggatgataattagaattgaagtgctagtgttagaaatactggtaactcctattgaactaaggtaattaaaatctttgagactttcatcctatttacaaaaatgtcttggggaaataataaagttaactttgtaactagataacaatataaaagggaaataacatcgaaaggctaaaagaacacagtaattattaatttaagtagtaggatccttttcagtaaaagatttttgaaatgacaccaaataattcttcttagttatattgcttattagtaaaaaggtatctttgttttgcacgtatttatccttttgcatattttactttacacatattgaaatattattttcattttcatgtcaggtacacttctgtttttattcaattgcatgtattattcaatctttgatttgctgcctgcaaatatttgatacaatgtaaagccaaatgggttttgaattaggaaaggtacggacttagggaactctcatcgtgaagaacttctccctgtgcttctgttaatagttccctgaaaggttaatttcttcattgaattaaagcttagatgttagcagttgtctcccttaatgaattcttcaggagattcttcccatcgagagatactgggaagtctcctgcctttcagaaatgcttttaggtccctatctttctcaaaagcttaatggaaaccttcttttctcttcaccagctcctattgataagaggtacaaatgcgtctagtctctaagctttaccatacatcagtgttatctaagatacttccttgctacaaactttcagtggcttactggataagaaggttcaaacttctttgaatgtcacacagactgcaggttcccaagtgttttccagaatcaactcctttcacaggcgcatcttttccatgtcttcttaactctatgattgctatgttctagccactcttttagagcatattatgctcttttcttcaggcctctcccttctttaatgcatgaacactgtgtttttcatgtttgcatgcccagtatctttcacacaactagttcctgatacaagggggcaactaatatttgttgcttaaaaagtggggaaaacacaaacagttgctttttacagtgctaattgagtagataagtgaaaacttatagaacaggaatttaaataaagatagaaagtgagaggaaggggtggagcaaattggcagaatagaaggctctaccaattgtccccctgcaaggatttatcaactgtctatataagaaaaccaccttcataagaacaaaaaatcaggtgagcacttaaagaatctggtttaacgttatatcactgaaagaggcactgaagaggtaggaaaaaatcttgagtcaacaatgccaaccttcactgatcctctgggagcaggtgtggtgcagagactgtttctgtgtgttggggagagggagagcacagcaattatgaggcattgaaccctgagctgccctattataacagaaaataaaacaggaccaaactcagctgacattcactgtattaatccattctcacactgctataaagaactacctgatactgggtaatttataaagaaaagaggtttaattgactcacagttcttgtggcgggagaggcctcaggaaacttacaatcatggtggaagatgaaggggaagcaaggtacattttacatgttggcaggaggtggttggggggactgccacacatttttaaaccatcagatctcattagaactcactcactatcatgggaacagcatgtaggagaaaccacccccatgatccaatcacctcccaccagggtccccccctagatacatggggattacaattcaagatgagatttgggtggggacacagagctaaaccatataacccacttgtggagagagcatgtaaaccagccctagccagagaattattgattccagcactctgaagttgagttcctgcaagcctttccactactggctaaagtggtctgtggcacaaaataaacttgaaaggcaatctaggccaaaaggattgcaactcctaggcaactcctagtgctcaactgtgcccagtgacagtggacttgggggcacacaacccagtgaaacacaagctggagtggctaaaggagtgacggtatcacccctctcctaaccccagactcaaaagctcatggctccaaaagagaccccttccctctgctttaggaaaggaatggaagagtggggaggactttgtgtggcatataggataccagctcagccgcaacaggataggacactggtcagaatagggaacccactgccttgaaggaaaggatccagtcctggcagcattcatcacctgctaactgaagagcccttggccctgaataaacagcagtgatatccaggtactacatcaagggccttgggtgagacttgctggcttcaggtgagactcatcacattcccagctgtagtggctaagagggaagactttctatgcttgagaaaagtgagggaaaagtaaagggaaccttgtctatccccaggtccaggtggcacagaacagagggaggctttgtttgggccaaagtaagggaagagaataagagtctctgcctggtaatccagagaattcttccagttcttgtccaagaccatcaaggcagtacctctatgagtctggaagaactacaatgttactaggcttaggatgccccctaaaacagatacggcttagatcacaacacacaagtctttaaaatctggaaacccttcccaagaaggatggatacaaacaagcccagattgagaaggcttcaataaatacctaactcttcaatgcccagacataggcaaacatctataaatatcaagaccctctaggaaaatatgacctcaccaaatgaactaaataaggcaccagggactaatcatgaagaaacatagatatgtgacctttcaaagaactcaaaatagctgttttgaggaaacgcaaagaaattcaaggaacacagagagggagttaagaattctgtcagagaaatttaataaatagattcaaataatgaaaaagagtaaggagaaattctggagctgaaaaatgaagttggcataatgaagaatgcctcagagtcttttaatagcagaattggtcatgcagaagaaagaactagtgagcttgaagacaggctatttgaagatatgcagtcagaggagaaaaagaaaaaaaaaaagaaaccatcaggcacacttatgggatctggaaaatagtcccaaatgggcaaatctaggggttagtggccttaaggaggaggtaaagaaagatacaggggtagaaagtttattcaaaggggtaataacagataatttcccaacctagagaaagatatcaatgtccaaacatgagaaagttatagaacagcaagcagatttaacccaaagaagactacctcaaggcatttaattcacaaactccctaaggttaaagatgagtccttcaatcagaaagaaaaggatgtctgtgagcaataagaaagcatctgaaggtacaaaacttactagtaatagtaagtacacagagaaacacagagaactgtaacactgtaagtgtggtgtgtaaactactcttatttcaattagaaagagtaagcgatgaaccaatcaaaaatagtaactacaacaactttttaagacatagtctaataagatataaatagaaacaacaaaaagtttaaaagcaggggatgaacttaaggtgtagatcctgtattagttttatttttgctcgtatgtttgttagtattaaattattatcggcttaaaataatggggtataaaataatatttgctttgggaggcagaggttggcagatcactataggtcaggagtttgagtccagcctggccatcatggtgaaactccatctctactaaaaatacaaaaattagccaggcatggtggcgggtgcctgtaatcccagctacttgggaggctgaggcaggagacttgcttgaacccaggaggcagaggttgcagtgagccaagattgcgccactgcactccagcctgggtgaccaagcaagactctgtctctaaataaataaataaaatagtactttcaatcctcttggttacttcaaaccaaaataaatacaatgggcacacaaaacaaatacaaaacaagaaactaaattatatcacagaggaaattactttcactaaaaggaagagagacaaaaagaaagaaggacaaaaaggccacaaaacaaccaaaaaaacaaatatcaaaatagcaggattaagtccttacttatcagtaaaaaccttaaatgtaaatggactaaactcttcaatcaaaagacagaatggctgaatggattaaaaacaaaaaaaaagacctagtgatctgttgactacaagaaatgcactctataaagacacacatagactgaaaatgaaaggatgaaaaaagatatcccatgccaatggaaaccaaaaaagagcaggggtagttacactgataacagagaaaatagatttcaagacaaaaactatgaaaagcgacagaaaagttcactgtataatgataaaggattcaattcggtaacagtatatgacaattttaaatatatatttacccaacactggagcaaccagatataaaatcaaatattactagacctaaggagagaaatagtcctcaatataataatagcttgagactccaacacctcaatttcagcatcggacagatattccacacagaaaatgaacaaagaagcattggacttaatctgcactataccaaatggacttaataaatatttacagaatgtttcattcaagagctgtagaatacacattcttttcctcagcacatgaccattctcaaaaatagaccatatgttaggtcacaaaacaagttttagagcagtcaaaaatttgagatagtatcaaacattttctctgaccacaatggagtaaaattagaaatcaataacaagaggaaatttgaaaacttacaaatacatggaaattaaacaatatgcttttgaatggccagtggatcaataaggacattaagaaggaaactgaaaaatgtattgaaacaaatgatatggcagtacaacataccaaaatctatgagatacagcaaaagcagtactaagagggaagtttatatctataagtgcctatgtcaaaaaaaaagaaaagaaaaatgttaaataaacaatgtaccgatacatcttaaagaactagaaaagcaagaacaaaccaaacccaaaattagtagaagaaaagaagtaataaagatcagagcagaaataaatgaaaattgaaatgaagaaaacaatataaaagatcaatgaaaaagttttcttttgagaagttaagcaaaattgacaaacctttagcaaaactagctaatggtaaagagagaagatactaataaataaaatcagaggtgaaaaatgagacattacaaccaatacctagaaatccaaaggatcgttagtggctactgtgagcaactatataccaacaaagtggaaaatctagaagaaatgcacaaagtcctagatacacacaaactaccaagattgaaccatgaagaaaaccaaaaccttaacagaccaataacaagtaactaaattgaagcctaaaaagtctcagtaaagaaaagcttgtgactcagtggcttcacagctgaattatagcaaatacttaaagaaggttgaatactaatcctaatcaaactattctgaaaaatagagggggaaggaacacttccaaactaattctacgagccctgtattaccctaatccagacaaacacacatcaaaaaaaagaaaactacaggccaatatctttgatgaatattgatgcaaaaatcctcaacaaaatactagcaaactgaattcagcaatacattagaaagatcattcatcatgactaaatgggatttattcttgggatgtaaggatgtttcaaaatatgcaaataaaccaatgtgatatatcgtatcaacagaatgaaggacaaaaaccatatgatcatttcaattgatgctgaaaaagtatttggtaaaattcaacatcctttcatggtaaagaccctccaaaaactggggataggaggaacataccttgacatagaaaagccatgtatgacaaacctacagctactatcatactgaatgggtaaaaactcaaatacttttctctaagatctggaagatgacaaagatgcccactttcaccattgttattcaacatagtactgaaagtcctagctagagcaataagagaaaagaaataaataaaggcatccaaactggaaaggaagaagtcaaattatccttgtttgcggatgaaataatcttatatttggaaaaaaactaaagacttcaccaaaaactattagaactgataaacaaattcagtaaagttgcaggatataaaatcagcatacaaaaaacaatgatatttctgtatgccaacagtgaacaatctgaacaagaaataaaaaaaagtcccatttactgtagccacaaataaaattaagtacctaggaattaaccaaaaaagtgaaagatatctataattaaaactataaaacactgatgaaataaaatgaagagatgaaaaaataaaaagacagttcatgctcatggattggaagaacctatgttagtatgtccatactacacaaagcaatctacagattcaatgcaatcctatcaaaataccaatcacattctttacagaaatagaaaaaaaactatcctaaagtttatatgaaaccacgaaagactcagaatagccaaagcaactctaagcaaaagaaattggatgaataacattacctaacttcaaatatactacagagctatagtaacaaaaaacagcatgatattggcgttaaaacaggtacatagaccaaagcaacagaatagagaactcataaacaaatccaaacacctacagtgaactcattttcgacaaaggtgtcaagaacacacagtggggaaaagacactctgttgaatgaatagtgctgggaaaattgcatatccatattggaagagtgaaactagacccacatttctcaccgcatacaaaaatcaaatcaaaatggattagagacttaaatctaagacctcatactctgaaactactgaaagaaaacattggaacaactctccaggacattggtttgggcaaaaatttcttgacaaatatccgacaagcacaggcaaccaaagcaaaaacggacaaatatgataatattgagttaaaaagtttctgcacagcaaaggaaacaatcaacaaggtgaagagactactcacagaattggagaacatatttgcaaactacctatctaacaagggattaataaccaggatatataaggagctcaaacaaccctatggaaaaaaaaatctagtaatccagtttaaaaaaacaagggcaaaaaatctaaatagacatttctcaaaagaagacgtacagatggcaaacaggcatacaaaaaggtgcttaacatcattaatcattagagaagtgcaaatcaaaactaccatgagatatcatctcaccccagttaaaatagcttatattccaaaagacaggcaataacaaatgctggtgaggatgtggagaaaactgtttgtcggaaagtaaattagtacaaccactatggagaatagtttggaggttcctgaagaaactaaaagtcaagccaccatgtgatccagtaatcccactgctgggtatatacccaaaagaaaggaaatcagtatatcaaagagatatctgcactcccatgtttgttgcagcactgttcaaaatagccaaaatttggaagcaacctaagtgtccatcaacaaatgaatggataaagcaaatgtcatacttatacacaagggagtactattcagccacaaaatagaatgagatcctctcatttgcaacaacatggatagaactggaggacggtatgcttagtgaattaaaccaggcacagaaagacaaacatcgcatgttctcatttatatgtgttgatttaatagtcaaaacaattgaactcatggagctagagagtagaaggatggttaccagaggctggaatgattagtgggggtttgggtgggggaggtggggatggttaatgggtccaaaaaaaaagaagaatgaataagacctaatatttgataacacaacagagtgattttagtcaacagtaatttcattgtacattttagagtaactaaaaaagtgtcatgggattgtttgtaacacaaaggataaatgcttgaggggatggataccccattttacacgatgtgattattacacgttgtatgcctgtatcaaaacatctcatgtcccccataaatatatatacctaatatgtacccacagaaatcaaaatttaaaatttaaaaaacaaaacaaaaaaagatagaaagtgaaatgaaagctgccctcttaaaatactttgttttttatttatgaaattgaataaatgatctgatgcttaagaaagtgttgaactctaagaagtgtcaggtactagaaaaattaagaacttattctgtacacttttcttcattttctaccttagtaatacaccatgttaatacatttctttactgacttttaacagcatacaattctagtcctacctttaaggaaatatttgctattcaaaaaggcctgagatagtaccactctttcaaaagactgcatattgtttttcctttaatggaaagtggctgcatggcataggtgcattagttctgaatgaggcaggagcaagagttagattcttttactaaatcagcagtcacatacttcatggaagctctgtttccttagggctaaaggaatgtccttatgtgtacaatgaagatgctagaatatattatcaccaagatcactttcaactcaagtattccataattctatgccaaaaaaattcttagattgggaattacaaccactctctattctggaagatcgacttacaaatatgtgggcactctgtgtatgctttatttcacttttatttgcatttcttcttagctgtccgtccaaaggagaagcaaatcgtccaagttctgtgtatcttccatcacttttattacttgttccatattcctgatggaaggtttgagatgagtggagaaagaacagtcaataaaatgcaatttggtgatttacttctggattcactttttcatattatttgtgtcccttattagaatgggtcaataagaataaggcatatctattgaagcttgtattttactgataacataagtgacatttcttttgtgctgcatttccacctgtaataatagtcaaaggaaaataattccaaattggggtagttcagatttaatgattatattcacttcagttacaaatcattgaactaaacagaagcataccacttagtacacttatgcatttattaaaaaataataaattggttaaatttaacagcagatatactagctgttgtgagaagacaatgtgtatttctgagtacaattacttagccattaatacaaccttaatattgattctctacaattttttaaatcttataagtcatcttcgtctattttcatagttattgcccccatatgttataacttatatttagctactgttaagaatacatttcactaatgacttattaatttatagtttcttatcactcagtggcaatgaatactcttcattttttatttatcccaaactaaagcatcttcatgcttcttatgtggccctgtctcattggctgaggttggctttgatcacccgtgcagaggatgactgtgtgctgatgtgagtgctgcctgtaaccaaccccattcaagggaagtctctggtttttactacctgcttttttagaggattcatgtcttaaacaagaagaaacgttttaaaacaatccagaaaaacaaagcacaagtcaaacacagttaataatgtttctttacaactactattccataataagataattagagaaaattagacgatctgcttctgataggaacaaacctcaaatcatcaataactctttggaaattagaagactgaaaaattcccgggccaaaaatatgcttgcttgtattttctaaaagtcaccatgcaatcttgtgggcctctgtactaataacagttatagtacagtatcaataataagataaagaaataaagtagatatgtaatttggaaactctaaactctctttggaattcttaaattatgcttttacagtaaaccaaatcatgacatgggaaataagtaaaagaagtatttgaaaaggaaaatgtaacttctaagaatgcttccccaccaattccctatagttcagccatttaattttgttaaccttggtaccttaggtagcaaaacacaaacgagtatacatcagttatgctcaagtctttcctaataaatccaatggacgttttttgtgtcaatttaacttgagttttcagcagcaattaacaccattgaccaaagttactgtcctgattcaatttttttttgttttctttgcttccatgagccatcttttcctggttttcctctcacttctgtgatgcttccttctcaatattctttgtagtttcttcattctgttacctataaaataaagttactaattgatcaagttttgattcttagactctctttattccttgataaatattccctctacatgttatctcattggttcttaagatatatttcaaatgtggtttccctttaaaccccattttttcagtgctctctaactcaggaaatgcatcttcatcagtccagtttaaaaaccgcaaacataagagtctccttaatatcttcttacatacttactctacaaattcaatccatactaatacatatcaatgttacttactaaatattggtcacctctcttcatatctcaacagttctaacactttagtccatcgatttttcttttgcctaaactactataatagtctccttattggtcctccaccttaagttcttgcacacctcctactatctcaaattcatagtctggaaggtttttgtttgtttgtttgttttgttttgtttttttctgagacggagtttcactcttgtcactcaggctggagtgcagtggcgcgatctgggttcactgcaacctccgcgccctctccccttctggttgaagcgattctcctgcctcagtctcccgagtagctggggttacaggcgcctgcctccacgcccgactaatttttgtattcttaatagagacggggtttcgccatgttggcaggctagtctggaacgcctgacctcaggtgatccaccgacctcggcttcccaaagtgctgggattacaggcgtgagccaccgcacccagcctgggaggttcttttacaaacaaagttctcagcatgtaattctgctccaacatttcaatggattacaattttggggtgaattaaaatatttgacatgagccatgtagccctgcagagactgtcccttctccttctctccagtttaatctcacttttctccctctccctgtgcattccaggcacagttgtctgcttatttcccagaccatgccatgcagtctactacagggaactttgcatgtgctcctctatctaactgaagtacttttccagttccccctttattctcactactttcacctagttaattctaattgctcctctaaattctttattctagtatctcttcctcagtgaatccttccctcatcttatacaactccctgtatatctctttgtaaaactgatcacattctaatttgacatctatgtgtgtgacatgtctcaaattaatgcctgcctttcatgaccacggtcaataagggcaaagctactatctacagttgtgcattggctaacaatgggaacatgttctgagaaatgcattgttaagcaatttcatcattgtgcaaacaccatgtgcaaacatcactcagtgtacttatccaaacctaggctaggagtatagcctgctacacacctaggcctagtatagcctgttgctcctagacctcaaacgtgtatagaacattaatgtactgaatagtgtaggcaactataacacaataggaagtagttgtatatctgaacatatctaagcatagaaaatacaattaaaatgtaatataaaatatttttaaaaagtgcatccataggcagctctgttataatttgggaccactgttgtatatgaggtctgtcattgaccaaaatattcttatgcattacaaggctgtatttagttctctgttttatctccaggaccaagggtactgtaagacacatggctgctcaataaatattttgttgggcaaataggaggtgaaaaaattttatacattaagtttcccacccagtttcaagtgatccacttattagagccctttgttccagttgccactagcacaggcacagcccctttttgaggaggcagtgggacttctggctgaagcagaaacagcaaggcaaagaagggaagggccagaaaggaaagaatcaaatgaatataaacaagatggattctgtcacataacttggaacctggctcccaaaacaaactaaaaaagaaatttctgaaatgttttcaataaatcatggcatcatttatagaaagcatttttgagagacattgttttgagtatgttattgctatatttgttttaaaacttcttatatttaacagtacgttgttacaaaatggttactaaaaagaggcaaaggtaagaaagggcatggttcttttgatttctttaatgcctacaatagaaacactttgatttgtctcttacattatgaatgtcattaagtatctccattaatgagtctgttcaagtttgctcaagttaaaactttgagaccttttgacattaggaattaacaatatattgggggggggggcatgttgaaaaactgagcacaatcaagcttcagtcattactccagaagtgtattaagaaaacttttatcagattgtctttacataaattatgatgttcatggattttgcatgattgatggggatgctagtcgttccccagtatttttttttcctttcttacagcataatataacattcatctgaggacatggcaatattgcatttcctcccttgaagctaggtgtagccatatgactaagtgttgcccaatggcatggcatggcagtggaagcaatatgtgcaaatttatgagcatgtccttaaaagatgggtggagtcatgctctctccctcactggctttttcttttgactggtttgaattccgacaaggaagtgatggatgaaccttcttgtaccatgaagatgatatataacagtgaaactctagacagaaagggcctcgatgcctaaatccagggtttctttcttgtttaagccactatcactttgggtctctgtattgcaatagcaaaatctacattctaactaatttaaaagttatgcgttatttaatttaagaatttaaaaataataaacagactatgtgttttgtcagtggaaaagccagtttggagggtcacatctccttattgctagacttacatgctcttcttatatcatgattacatttcatgagtttttgtatctaagagttcacataatagtatttagagaaaatagaatttttactggaaattttgcatatctacacttacaagattacatttaatatttacatttaaacttctaaaaaattctgtcagttaattattattgagattcatagctaatgagtcctggagcaggcatttaaatgcagattccttgaatctcaaaacatattttcttcatgtaataataccacttgcaagtatttaaagagattctacaactatatgaaaacctaatcaataatacatataaaatcattttcattgttttatatgtttgtttttatatttatagtcacagatattgcaattcaaagaaatgattcattcaaaacagaaaattaagttgataaaagaaaatatctcttttagatttatacatttacattattattttaaattaactgctttgagctgagcacgtataaagtttttaaaaaatctttgcataaccctagaaaacatttgctttgctctttttttctatcattttctttacaagctgcagtaagatttttttaaagatatgtaaactatttatcaaatttcactttaaacggctgttttggctctctttcatggcacacatttaagaacagagcaacaaatgagatgacctttcttttactagtgaaacttaaacaagcacagcaatttgttataagaagaagagcaaggctgttttcagctcaaccgttgactttccttttagatacttcttggcctacctccatttatggaagctagaaagaccagattccaacatttttaactaaccttgcagttagacatatcacgtgagagagttttcaacaacgagacacaaggggacatctttgaaacttttgcttttctggttaaacagagaaaaagaatagatatggttggctgtagccccctctcccagtacccctacctcccacacacatcactttcctccctctttctggctaaacatcagtataatgttgggaactgcagtggtgatcttgaagccatgggagcataatttattctttacttaaatactatttcagattttatccttctctccacgattagaatgtaggattaaatttactgtgtttagaatgtaaagatctaagttagaatctttatttaccacttattagctctgccaatttgcgtgttactgaattttttgtatcatgcttatcacctctataaaagtagacatttagaaaaatctaccttgcaggatgttataaaagttagagatagcttatatagagcctggcacattagcagtgctccgcatgtggtagttattactattagttaaactgtttgaatccgttcattgcatgcttattcctataacatatccttttacagcactccagtgatctgaaatacttcccagctatttacattatgtaatactgtcctaaaatgctttcaaatacagcctctcgatgccattttgctcagtgttcacacccctcatcaaagagaggagtgaaatccaacttcgaaggggtgcttttatataagtatctatatatctcaaggaattcagttttgtgtaataaatatttggggggatcgttagtatttaattaaacttattttttagataattgtacattcatatatagttgtaggttatatagaaagggactgtgtattatggtagtttgtgtttttcaaggacttggttcatttcatctaaatcatcaaactcatgtatgtagaattgttcatatactcccttttattcttttgatgtctgcagggtttgtattgatatcttttttttcatttgtgatatttgtaatctgcattttctccctatttttctttgtaagtcttgctagaagtttgtcaattttattgatcttttaaaagaatcacaggccgaggcgggtggatcatgaggtcaggagatcgagaccatcctggctaacaaggtgaaaccccgtctctactaaaaatacaaaaaattagccgggcgcggtggcgggcgcctgtagtcccagctactcgggaggctgaggcaggagaatggcgtgaacccgggaagcggagcttgcagtgagccgagattgcgccactgcagtccgcagtccggcctgggcgacagagcgagactccgtctcaaaaaaaaaaaaaaaaaaaaaaaagaatcacttgttactatagtttttctttattgttttcatactttcaattttgagttcagctgttatactttttgttctcttgttctgcttgctttgagattgttatgttctttttctgaattcttgaagtaggaacctagataattgatttgagactttctctcttttccaatgtattataaaattttctcagccctcctttagctatgttccaaaaattttgatatgttgtatttcactttcattcagtttaatgtatttttaaaattctgttcagagtttccttttgacccacagattacttagtagcattgttgtttggtttcttaatatttggacactttcctatgatctttctgttatggatttctagtttgattccatgcggtcagaaaagacactgtatgatttaaattattctaaatttgttaatatttgttttatgcctcaggatatgatctatcttggtataagtttctcaaacccttggaaagaatgtattctgctgttactggatggagtggtctatgtatgtggattgatgctgattggttagatcattgggatgatggtgtgtttgaatttttttattttttcctgattttctgtctaccaattgtagaaagagagatatttaagtcatcactgtcattgtggagttgtctgtttctcctttcagttctgtccatttttccttcacattttttgaagttttgttttttggtgcatatgtattcaggattactatgtcctcttgatggattgactctatcattatataaggtccctttctgtctcctgtaaatttttttgctctgatgtctattttattgatattaatatagccatttttgctttcctttgtaatttttgcatgctatatctgttttattcttctacttaaacctgctaattttacttattataaatattattaaagtataattttatttattataaaaacctgattttatttattataaaaaataaataaattttataattattattataaagagaacatatagttaaatcatatttttaaatccactctattttttgtttttaattttctctgttttcatttgttattttttttttcttgctttcctgtgtgttacttattttttttttaaagaaattcactttgatgtatctcttgtattttaaatgcacctatttgcacaactttttaagttgttgatgtaggtattatattatatatacaaaacttatagtctagcgctgtcttcattttaccagtttgagtgaagtataaaaatcctacctcctttgacttctctttacccatcccccatttataatataaatgtcttagatattttgactacatacatttagaacacataagacagtgttataccttatctttaactgtcaagtatgagttagaaaactcaagagaagaaggaaagtctatcatacttacctatacttttgcttattgtgttcttgctctctgatgtgccaaaaggtcttctttcattataaccttatactttagagaacttttctttttccattattttaggccacatctgctgataacagattcccttagtttttctttatcagaaatgctttgattttctcttcagtcctgaagggtattttttgctgggcataagattctgggttgatagttcttttaacacttgacaaatattttgccacttctttctgtccttcatagctgcttctagcaatctaattgtttttaccatatagataaagttttatttatttttcacttttttcaaaatattttctttgtatttagtttccagaagttttatgattagtcttggcatggaattggaggggtttatcctgtttttgcttttcacagcttgctccgtctataggtttatgcctcttgccaaattcaggaagtttctaggaattatttccttgtgtgctttttcatccccaccctgtttctcatctcttcctgggactctgatcacaagaatgttcaatcttttgttatagtcttaaaagtgcttgaaactgcttattactttcagtgtattttcttcctattgttcagattgagtaatttttattgttctgtcttcaagttcattgattgtttcctctgttctcttcatgtcactgttaagcctacccagtgaggtataattttgattactgtattttcagttctaaaaattctagttggttcttctttgtatcttctatttatttgctgagaatttctgttttcctgataaagctttctattttttatttgtttcaagcatgattataattgcttgctgaactactttttttaccagagctgttttcaaacctttgacagataattctaacatctttgtcctcttggtgttggcatttttattggttgtttctttacaatcaatttgcgatcgtccaggtacttcatataaaaagtgattttctactgaaagttggacattttatttgtatttagggagaggaaaaaggaaagtaggactactacatctttccagaagtaaattccataattctgaatattatttaaaatataatttatatctttattatatttatattttctagttaggaagaaatagttataataataaagttatttatcagaaataagtgtaaatttatataacactttcagattcaaatagagttgtgatttataaatacatatgcaaatgatttttaagttacattcatcaatcccttattccctcatctggaactaaaaaaattttcttgggagtagtctaacactttcttcatgaacataaagcattgttttttaaccagccttctggttatttcatttctcagtctgttttctgttttctttttccaatattgtcaataaatacagatgcatgtatgcatgtatatgtatatatatatatgtatatattatggatatgtgtttaatttgttcaataacaaaataataacactaatataatttcatcattttgttctattcttaatttcacatcaagttcattaactaaagtcttaggataaatgtgattttttgatgagcaaactttatactattttatttcaatctttctttttgaaagatttgtacaattgtatcaacttcatcaaatgttctttgggttgcacaatttattataagaagagaaaaattctaatttatgtcattttaaaatttcaatgccaatgtttagaaaggatacatattgtgtctttgaaacataattttaaaaggagcataactactccagtcagatatttttggttaggttgtcttctaaggagaaatcttggaattatttttcatagccatttctgtgatttttcacatctttgttttgtgttatataccacttatttatgtgcaagcataatactaggagtatgattattaaattaaaatagaagtggttagattcaactaactatggtgggctggaatattaagagttatccatattctttcctaattaattgtctttgtctatgtggtgacctttttttctcattctgaatacattgctactttatttttaaaatttaactatattatctatggcatttctctcattaaagtgctgtggtaccctccatgagaaatggtagttttcatattcctagtgggaactcttgctgttttgaattctcatctgtgttttagagtctcagatctggaaggaatcccagaagctattttatgcctaacttatacgtgagtgtaataactctatgccacatcaatctctacccactagattttgtatatttttaaaaagaaatggcgatggagctcctcatgtaaaaatgtcaatggctagataatatgctatacagaactgtcatggccattgacacaaattttaaagaaaatttacaaactaatgttatgattttcatatatttaaaatttctttcatcagtttgtatcactaaaacactttttttagctttagtataaagtgtcaacatattaccaataattttttgccccactgctcctttcaaaggcttcctgaagagattaaaacagtaataacaactaatataaaattgtgtcatcttcatttataggataggttccactgaatataaatactcaactacataaacaatcataattatgctaaaacctaaataagtttaatttatttcacattatagatgtttccacattaagcattataggcctgaaacaattactcattgagtacaaaatgaattgcaaacttatcaggtgttcaaggccttatttgaaatccccacttcttttttatctctcactcttctttttcttatggaagtacctagagtccttaaccaggccatgcatatgatacctacatgcctatatgcaatttgtttgtttagtctagaatgctccttgtgtgtatggtcatctcaatttggagcatgtcttccataaagcctttgctggccagttctttcttcgtgcaattgaggcagtttccttttgcccaccctacacctaactcacagtgactttcaacatggtatctgggactcttcattgcccatatgtgattacattactgaatttttggaaggcagagctttttgtcacattttcccttcttttttaaaaaaatgtaatccagagctaagagctttgcacaatctgtggtgtttactagatgcttatgaatgctgggttttgttatgcattacatagctacaagttgagaaaacgatttttcattccttcttttcacttcttagcacgactttcaagaaatccagggagacctaaaccactttattacttgcaccctgaattctgaaaaattaagaaataaatgaacaaaaatatctttttttcagtacagttatttaatttgtgactatgtcttgacaatatttatagttttatttttggaaatcctttcaaaactcttaattagaaacttttgttccacagttccctcttcatcccatgactttgttgattggcccacctccttagctataatcacctgtgtcttgagcaatttcgtcccagtcatagcatgacataagacaacttgaaaagaatactggtttttgtaacaggttatatcatgggcagtagaacacttgaatactggatggctcctcccaagatgcttaggttagagaaatagagtagaatatagttactctgtatctgcaggggtaaagaaaggccaagataaatattttccctcacttagacacagcaataatataatttaaaccatttcacttctgatccttaagttgaagaaaaagactgatcattttatcatttcatttattaaactgcaaaatatatttttaccaaaatttattattgaaacaaatttcatggttatccttgacctattgtaattctcttttaaaatttatattttatagttataaaatataaagttatattttcttatccaaagttatagtttcttatccaaaagcagagacttttatttcttgaatccatttttctgttatcttagtaattggtttttaggcaaggcccttatgttttgatttattctttctaaaaagttatcagtattactaaagattagccattgtttactccagttaataaatttttgttaaattgcactaaaatgagtttctatgtaaataattaacctagtgaaaattttctttttcacttgaaaacagaatagcattgaagaacttgatggtgtccttacatccatattcaaacatgagataccatattatgagttccagtctcttcaaactgaaatttgttctcaaaacaaatgtgagtattttccagctgcatcaattattctttttatcacattccattctatgtaactctttaatgaatgttataaccaaaaatataggtagctgcactgctgatgagatgatttagacaactcctgactcctggtgaaagggtacattagtacaaacttctgaatgttcgtttggtaattttttttatctcaggccttaaaaatgcacgtaacttttgcaattaaaaagcttacttcttgacttttactctaaggaaatgtttgggcaacttcatttaggatagaaattattcatcatgtcattgtttataataaccaaaaagtggaaatattttacaaagataagtaattgattatacatattttcatacatctattaacgtgaccaccagaaattaatattattataaatttatgcttcccggggtgatgttttggtgtatacttaagtgaataaaaagcaggctatgtagcagagagagagtgtgatcatctgtttaaaaaagtacgtgtacatttaacagcatataagtttatatatataaattgatggtctggacagataagtttatatatgtaaattgatgttcacagtagttatgtttgggttgtgcaatttcaaatattacatcttgtttcaccttattgagtctgtattttctacaactgtgtattatatatgtggttaaaaatatacaaatatcaagaaaagtatatgtaggagatatacatgaaaaattatatttccagatgtcatcgtgaggtcagtagtatattttagaatttttttttgttcctgcatagtttgttgacatactgtttataattcatttatatgcctatgtgtgaaacactgaagtagagatgtaatggtgaatatgacagacatgaagctaaagaatgtaagaagtctaatgttgacatattaaaaattaatgagcagagttttattttctgtagggtttctgtgctatttaaagcagttttgtcatcagcctggaaggcttcaagacagtaataagaaaagagtaggaatcctaaggcacaactgcttgtgattcacctagatttgtgagaagctgcataatggtgaggttccgttaggaagaaaagccaatggtatgctaactgtgaataagtagtcttgtgaaattagcgacattttatttttgtttccaatatacatttttaacaatatgtaattcacttacaaaattaaatactagatgagaatagaaaaggagcatatgattctttacatatgacacataatttaattggaaaaacaaataatatacatgtatttatagaaagaatcaatgagataaacttggtggtagtgattatattaacaatagaattttagataaagggtacattatttttcaagatgtgcttcaaaaaggaagtgggattttacctaggtcttaaataattatagttgccaaaagaatgaaaataatcttccaaagatagataattgattacataaattttggtgcatctattaatacaaccatcagaaattaatgttattgtaaatgtattttctggcttgaataatgttccaatgtatacttaattgaataaaaagcaggctaggtaacaggttagttctatttggaaattatttcaaaagtcttaattaggaacttttgttccacaaaccactcctcacctcatggttttggtaattgacccatctcctcatctcctgtaatcgtttgtcttgagtgatttgatactagtcataaccttcattcaagctagggaaccaatgaagacagagaaaggaaaaaggaattctaggcaagagaaagtgcatacaatggtgtgaagatggaattatgacacaattttacaaatttcctcagcattatatttgcttagatttctggaatcaaaattgtggagatggagaagatggcatggttttggtttcctgtttttatatgtaaagaattccagataagattaaaactgcctctcggtatactgtttaggttgtggaatatgaattttagagctaaaaaagctgagacaattgtggccccttatttttatagatggagaactctggatgggttatatcggagtccctgaaaatatgaatctggttcagcagggctggggtacattctaagtgtttgccttttaagaagcttccaggtgaagctgatgctgctacacctcatacctctcactaggtactaagactttagagcaattgttctcaaacttggctgcatattgcaatcacctgtgtagcttttaaaacatcctatgtccaagccataccctataccaatttattaatctgggagtaggtcccagccatcagtagttgttacagtttcccaggtgatttcaatgggcagtcaaatttactagcccctaattgcttcaatgtattatagaccagcaaaataattcttccttatattgaattttgacacagaaaaaaatattaccctctcttaacaaaggttataaagatagtagtatatgaaagttttgaaccatcactataatttaatggtaattttgtatctgaaaaaaattataaaattaaaaaaaaacttaaagctaaaaatgaaaagtttactataatccagataactcattcagaagcattattgctgggtattattgcataacagatgtcataaaacctatatataacagagccaaagaatctccataacattaagctctaatttctaattaaaatacaaaataacataatatatataataagaatatgcagtaaagacatgaatatgactcagctagggttttgcttgcctccttgatccaatagtcttggatcaatgtcagcttcagaatatctagcctttaagactttgcacctgtgtttcataatgttcaagttgatagggtttaagttacctttatacatatattaatcaagggaattggaaagagaaatggtgggttgctgaagaacctactagaggcattctgagaggtgaattcagcaaaccatgaatcaggtgttaccccaggtatctatcctgaggacaggtctttatttggtgaactattttatttattaaacaattattatttatttctctgtatgttagctatgggaaattgagaaattgagtctctctcagagaacataatcataaggaattgaaaaagtatacattaagattgacctaccgtaaggatttgtcatggaattacctgcagatacctatggttctttaaaagtatggagtgaaatgctatatcaaccaaaaaatcttattattgccgcatcctcaatttagagttattttggtaaattctgggtttagtttcctgccacttcatttataataagtaaaataccattccatgtcaataggtcttggtcattttttattcctctctagacaatacactcatgttttcttgcattatatgggtgggtggaaataagagggaaaatacataacaaataatattctataatattgggatgaaaccaaatattatataatgtatcatggctctacagagaaagaagacttttagcaagtgaggaattactactctctgaaaagaaaattaagaaaagataaaatcaacactgaggagattttataagaaatctttttgagatatttttccagtatacaaattttgcgaagcatgaagttttacggacctgttccgtttgcattttaaaccccctgagaagaaaatcagaagctgtgaagaaatcaatgtaaaagaaaaaaaaaatgggcaagagtattttttctgggatgaaaagtaatagatggtagggaaaaatgtagtcctgtaaattcatttcaaattagtaacaaacacatcatcattaagtaaacacactaaattagggattgatgtatacataagacattataaaaacttctagtgattaaattggagatttggcatgtaaattgactgtaaaattatagatttttccactccatttttttgctaatacaacccacaagtacaaattttcgcatctcttgccaataataattttagcatattctcaagctaattttatgaactgatgcttcagtttgaatcaaataatacaaaataaaacagccagtttgaatcttccaaattttttttacctgcgtaaccaaaaaaagattttttcaaaattatactattgttattcacgtttacagtgtttcttcaaagattctatatttccccagatgtgaattttgaaaaggtatgcttacaaacatactgtggttggaggctgtgagtacaaaacaggaaggaaagaagaagggagagaaaaaaggaaaaaaactaaacaacaaggttgataccaggatgagaatttggccttcgtcatcctagaatcactccccagacaaggaattacctctggcctgagtatacaaggagcatagatagagaagacaggacattcttacagagtcaaagaaatcttttggcctcaggatgcaatctaacactgcgaagcataggcaatgtgctatcctgagtccagctttaaggaataagcatttaggaatggtaagcccttctccacttttcaatgacctttataatcccctctcagcccaattccattaccataacaacacatattctgaaataatagaggaccctgtaattatagatgaaaaaggtaagcctgtggacatagtattttctcccaattagaacaccttgatgtgaaagattattaagcaatcttattcattcatttatgtaacaagtacaaactaagagccactcttctaggtgctccagaaacaggcggcctgtataggaaagctcttcttcatgaaacttatttaagtcactgagagtaacagagtaataaaacagtagcaacaaaataagaccattgcaaatagtgataagggttatgagaaaaataaagtgagaagatagttaggaagtgatgaaaagccatgtgaggattttacacatcgcttaatatcatctaattacataagacaaaatattactcttgctgttacgcagagaatagatgatggtgtgtaaaaatgaaagtaggaacaccagatgggaggctgtcttagtagtgacaggagaggcttgaaggtggctgtcacctgggtgttagcagtggaggtgaagagatttgcttgagcttggtagctctttgaaagtaaggattgtgggacatactgatagattgcagatgaaggaaagagaggacgggtctgtgtgtaactaaagacatgtttataaaaatataaataaaataaatatcaatgctgttaactgaaatagaggtgctatggcaagaatagttttgacagtgtgatcaaaagttctactttggctatgttaattaaaagataatacattggttggtattaagtatataagtcaaacacccaggaaggagctcatatgtgatattcagagccatagcctgaatgagattattctgcagagagggcagagcagggcaaacatctgagtcctacgcattgttgtatttagaggcctgggagagaaatttccataaagagactgagaagaagcagccactcaaggtcttttaaaagccaactgaagataaagtttctgagagaagaaaattatcaaccatgtcatgtcctactccagagagaagtgaaaaaagcccacaaaataacttgtgatatacacaacaccatccattaatgctagaaatgtacccccatggatctaggtactcccaattctttgtgccatgaaaataatgtagatatattggtttctcgtgaaactcagtaccaataggtattatttatagagcaaatgcctgggaagataaagaattataattctgattcattatgtaccccaaatatataaagccacaaaatatctaaaaacagatgggaatgcagactgattgagacaatgcaaagtgttaatgagtagagaggaaaaagagctatccagataaaacgtagaacaggtctatgtaaaatttcaattgactgcttttttgctcattttccaatgtagtgaacctcagtttcatttgctgtataccttttccctattttaagcatctccagagtttatatcagataaataagactgagttaagatgcacagatattgggaaaggtatgactagaagctataggacaaattatgaacaagttcatgtgaaatacaaaggacagaatagcagatgcatcaaaaaaaagtaacagattaggcaaagaactcaaaaactcaaaaagtgggagaacaccagcattaagaggcagatgataaaaagcaaacaaggcttgaaagctgaagtagttggctgcattatctccagacgctttttgtttttttgtttttgtttttttttgaaacagagtcttgctctgtcgcccaggctggagtgcagtggtgcaatctcagctcactgcaagctctgcctcctaggttcacaccattctcctgcctcagcctcctgagtagccgggactacaggcgcccgccaacacacctggctatttttttgtatttttagtagagacagggtttcaccgtgttagccaggatggtctcgatttcctgacctcgtgatctgcccacctcggcctcccaaagttctgggattacaggtgtgagccaccacgcctggcccatctccagccaattttacaccattcctatctggctaagtatccgtttctgacttgtgtcatcttggaagctgaaaatgtgacctggaaagatgagaattattcatacattcttacagaacaaacttttgacaataacagaaatctgaaaaataagcatgacctctatctacccatgacacctggttgactataagaaattatcttcctcgtgatcattatctacaagatgcaaatggaaattacttttgtaggaatataatgggtaatgtttagttgaaatattattctaacaatactgtttttctaaaaatgctattaaggttttatatttctctaagaaataaattattataaatattgtttagcatgtaattttcaatttgttttgtataaagggtatttggaagttagcatgatgtgggctttagttgggattgcaattttaaaatatttttaaagtagatgatttaatctatacttactaatttgactgatgtttattccctttttactttcatctgatatttacaaaggtctgtgctgttgttctaatggtatcttttataattgtccatttatatacttttttacatctttgaaatttattgagccttgctttaagttcaacatatgatcagttcttccaaataaatattccttagtgctgtatctgcatttgagatcagaggcattaacatgggttaaattgtgaaaatgtctagcattagatattgcattagcaactaggagatcagccatgtgattccctttagtcaaaggtcctggaagaggtgtatgagccctaatgtgagtgatgtaaaaagggtgcattctacttctaactgctgtttgcagttgggtaaataaagtcatcagttgttcatctgtatgaaatcgtaactgagtagtttcaattaactgtgtggaatgaaccacgaatgaagaatcagaaatcacattaatgggcatataaaaagaagtgaataccttaattacagttacaagctctgctttttgagctgaagtatagggcgtctggaaaactttactttttgagccagaataagaagctttaccattattagccccatctgtaaaaacattctcagcaccttcaattggtttggatttagttattttagggagaatccaattagttaatttcaaaacctgaaacaccttcattttaggaaaatgattatggagaatacccacaaagtcagctaaatgggtttggcaagtaagactatttatacaagctagctgtatttgtgccttcatgagagggacaataatttttccatgatcataaccatgtaatttaacaatctgagttctcccaattcttatcatagtagcaatttgatgtaaataaggagttagagtctgtgaattagtatgtggaagaaaaagccagtctactacgtcatgttcttggacaataacaccagtaggtgaatgctgagttgaaaaaattagcaaatctagagtcttctctggatctattcaatttatttgagctctatggacttgctttgcaattagttgtaactctgcctcagcctcctttgtgaattgccaagggctaataagactaggatttcctctaaggatagaaaacagattactcatggcataggtaggaatgcctagagcaggtcgtatgcaattaatgtcccctagtaatttctgaaagtcatttaatgtttttagttgatccctacgtatggttactttctgtggcacaatggtagtgtcatttactaaggtccccaagtaggagtaaggagtagcagtctcaattttatcaggagctgtaattaaaccagcacgagaaattgaattttgcaagtgaccaaaacattggagtaaaatttctcgagtggtggcagcacaaagtatatcatccatatagtgaataatgtaacactgtgaaaattttttatgagtaggttcaattgcttgccccacaaacgtctggaaaattatgggactgtttaacatgccctgtggcaacactttccagtgataacgtttagcaggctacaggttgtttactgcaggaattgtaaatgcaaactgttcacagtcttgctcagctaaaacgatagtaaagaaacagtcttttaaatctatgactactaaaggccagttttttggaattatagcaggagaaggcaatcttggctgtaatgctcccataggttgtatgactgaattgatagctcttaagtcagttaacattctccatttgcctgattttttcttaattacaagaactggagaattccaaggggaaaatgttggagctatgtgcccattttctaattgttcagtaactaatttctctaaagcctccagtttctctttacttagtggccattgttctatccaaatttgcttatctgttaaccattttaaaggtataggttctggaggcttaacaatggcctccatcaaaaattatttcctaatctttggcaggaactttgtttttcctcttgaagtggttctttcaaaccttgcaaatttttttctagacccataccagggacataccccatttcatgcattgtatgttgactttgagggctatgtaattgttctggaattagaacttgtgttcccattgttgtaataaatctcttccccataaatttataggtacagaagttataattggtcgaatagtcccaggtcgtccatcaggcccttcacaatgcaaaatataactactttgatatacttcaggggctttattaactccaactatgttaaattgagtgggttgaattggccatgcagacgtccagtgctgtagagaaatgattgaaatgtccactcctgtatctaccaaacctttaaatttctttccctgaatagttatttcacaggtaggacatttatcagtaatttgatttacccaataagctgctttgccttgtttatttgtgcttccaaatcctcctgttcgtttaatttcactttttcccatttccacaaatggcacaatcaggaactgtgctatgtgttctcctggctctgctttccagggaacagaagtagatacaacaatttgaatttctccattataatctgaatcaatgactcctgtatgtatttgtaccccttttaaacctaaactagactttcctaaaagtaatcctgttgtccctgctggcaagggtccacagactcctgttgggaccttttgcgggggttccccaggcagaaggctcacagcttttgtgcagcataaatctactgtggcactaccagctgtggtgggggacagacattgcacgggagcgagggaatggcctgagctggaaatgcccccgtttagaatgggacggccccctcacggtgtttcccgaaatcgggttcccatctttatcaaacttagagtgacactgattagcccaatgttttccttttttacattgtggacatatttcaggatcagcagttttcttttttccctatctggcggcctgactcgctgattttttctacattcttttttagtatgaccatgcttcccacagttaaaacaagccccaggaaatggggtatttcctttatccaccctcagtcctgccattgcctgtgctagcagagtagctttatgcaaattgcctccgataccatcacaggccttgatataatcaactaaatgtgctttccctctgagaggtcacagagcagcctggcaaacagtattagcattgtcaaaagctcataactgcagcactatatcctgagcagccgaatctgcagtcatctttttaagagattcctgtaaccaaactataaaatcaacgtatggttctcttggtccctgttttatagcactaaaggaagggtattgttccccacttgaagtgattttttcccaagctctaatgcacactctgctaagctgttctatggcatcatcctgcatgaccaattgtgcatctaaaccagcccaggtgccaacccccaaaagttggtctgcagttatattaatttgaggttgggcctgggcattgcgagcagcctgaatggaagttttatctgcccatcaagttttaaattgtaagaacagagcaggagtaagacaagctcgtgtaagagtgtcccagtcagtaggaatcatccaactggaaacagcaacattctttaacagtcccattacaaaaggagaacctggtccatactgatttatagcttgtggaaattatttgagtaatttaaaaggaaaaggctcaaatgtagctataatatttccctgttgatcggggggtatattctaaaagggaactgccaagcctctaaatcaccctctcatctagcttgctgaattcctgcctgaatagaactaagagtggtcgttcaaggcgctgctcagtcactggggcaaccactttttgcccagtgtcctctggaaaataaagatctggagggtctttttcttcaaataataaggagggggtgcagaagggtagggatgaacctttcccttcctttgccgctttagctttagctggtaaataaacatgctgtgtaacctcttctgttactttgctatactctcattcctcctcatcatcagtgtgaaaaagttccaaagtgaaacgaaccagaccccacacctgtaccattgttaccctgatgcttctgagctccccttcttactcaccacggggattgctttaagagtactagggtgtcttccagctagttttctgttccaactgttgctctgagacccatcaacttggattcgagcccccacaatggacgccacttgccaagaccacctcagttggggagaccctaacccagtggcactagaggaattaaagatgcacccacagaaatatacaggtgtgaagtgggaaatcaggggtctcacagccttcagagctgagagccccgaacagagatttacccacatatttattaacaacaaaccagtcattagcattgtttccatagatattaaattaaaagtatcccttatgggaaacgaagggatgggctgaattaaaggaataggttgggctagttaactgcagcaggaacatgtccttaaggcacagatcactcatgctattgtttgtggcttaagaatgcctttatcaaaaagcttatccaccatgatcaagtgggcttcatccctgggatgcaaggctggttcaacatatgcaagtcaataaatgtaatccagcatataaacagaaccaaagacaaaaaccacatggttatctcaatagatgcagaaaaggcctttgacaaaattcaacagcacttcatgctgaaaactctcaataaattaggtattaatggaacatatctcaaaataataagagctatttatgacagacccacagccaatatcatactgaatggggaaaaactggaagcattccctttgaaaactggcaaaagacagggatgccctctctcaccactcctattcaacatagtgttggaagttctggccagggcaatcaggcaggagaaagaaataaagggtattcaattaggaaaagaggaagtcaaattgtccctgtttgcagatgacatgattgtatatttagaaaaccccatcatctcagccccaaatctccttaagctgataagcaacttcagcaaagtctcaggatacaaaatcaatgtgcaaaaatcacaagcattcttatacaccaataacagacaaacagagagcaaaatcatgagtgaactcccattcacagttacttcaaagagaataaaatacctaggaatccaacttacaagggatgtgaaggacctcttcaaggagaactacaaaccactgctcaatgaaataaaagaggacacaaacaaagggaagaacattccatgctcatgggtaggaagaatcagtatcgtgaaaatagccatactgcccaaggtaatttatagattcaatgccatccccatcaagctaccaatgactttcttcacagaattggaaaaaactactttaaaggtcatatggaaccaaaaaagagcccgcattgccaagtcaatcctaaaccaaatgaacaaagccggaggcatcacactacctgacttcaaactgtcctacaaggctacagtaaccaaaacagcatggtactggtaccaaaacagagatatagaccaatggaacggaacagagccctcagaaataagaccacacatctacagccatctgatctttgacaaacctgacaaaaacaagaaatggggaaaggattccctatttaataaatggtgctgggaaaactggccagccatatgtagaaagctgaaactggatcccttccttataccttatacaaaaattaaatcaagatggattaaagacttaaatgtgagacgtaaaaccataaaaaccctagaagaaaacctaagcaataccattcaggacataggcatgggcaaggacttcatgactaaaacaccaaaagcaatggcaacaaaagccaaaattgacaaatggtatctaattaaaccaaagagcttctgcacagcaaaagaaactaccatcagagtgaacaggcaacctacagaatgggagaaaatttttgcaatctactcatctgacaaacggttaatatccagaatctacaatgaactcaaacaaatttacaagaaaaaaacaaacaaccccatcaaaaagtgggcgaaggatatgaacagatacttctcaaaagaagaaatttatgcagccaacagacacatgagaaaatgctcatcatcactggccatcagagaaattcaaatcaaaaccacaataagataccatctcacaccagttagaatggtgatcattaaaaagtcaggaaacaacaggtgctggagaggatgtggagaaacaggaacacttttacactgttggtgggactgtaaactggtttgaccattgtggaagacagtgtggtgattcctcaaggatctagaactagaaatactatttgacccagccatcccattactgggtgtataccctaaggattataaatcatgctgctagaaagacacatgcacacgtatgcttattgcagcaaagacttggaaccaacccaaatgtccatcaatgataggctggattaagaaaatgtggcaaatatacaccatggaatactatgcagccataaaaaaggatgagttcatgtcctttgtagggacatggatgaagctggaaaccatcattctcagcaaactatcacaagggcaaaaaaccaaacactgcacgttctcactcataggtgagaattgaacaatgagaacacttggacacaggaagaggaacatcacacaccggggcctgtcgtggggtgggggtagggaggagggatagcattaggagatatacctaatgtaaatgtcgagttaatgggtgcagcacaccaacatggcacatgtatacatatgtgacaaacctgcacgttgtgcacatgtaccctagaacttaaagtataacacacacacacacaaaaaaatgcctttaagcggttttctcccctgggtgggccaggttttccttgccctcattcctgtaaacctacaaccttccagcgtgggcattagggccattatgaacatgttacaatgctgcagagattttgtttattgccagttttggggccagtttatgcccagattttggggggcctgctcccaacaacatatataaaaatatcacattgtacacactaaatatatataatttttatttgtcaatcataccatcataaaatgtaaaaagacatggggcaaatataatacacataattttcacttctattatagtcttttccatttactctattgaaaatgtattttaaaatatgtaaaccatgacagaagagggaagttttcttacagaaactgtgaacagaatggagagaaagtccactactttgtacactttgcagttttatttagttctctgtgaggttaaccccaattttcttgtctatccacttttttttagttgttagaaccaagcccctgttctttcttttatttaatgccatggttctcaaactttagcaggcttcagagtcacttgaaggatatgttaaaattcagattgctgccatctctcttcacatttctgatacagtagatctgggttgggtacaagaatttacatttctcacaaatttttatatgatgctgattctactcctgtgaatcaccaatgagaaccactgagtgaacagtaattgattggcatcattgttatgtacataactaaaattgacatatatcaaattaaagtcaagatagattttttattccatctgtgtccttgaattaaaatcatgggtgcagaggctgtgtgtgatggcttatgcctgtaatcccagcactttgggaggccgaggcgggctgatcacctgaggtcgggagttcgagaccagcctgaccaacatggagaaaccccatctctactaaattttctactaaaaatagaaaaattagcctggtgtggtggtgcatgcctgtaatcccagctactcaggaggctgaggcaggagaatcacttgaacccgggaggcagaggttgctgtgagccgagatcgcaccattgcactccagcctgggcgacagagctagactccgtctcgaaaaaaaaaaaaaaaaaaaaccatgggtgcagaatgaagtagtcttagagtgactgttcatctaaaaatatgttttcccataccatttttttaaaaccctcagaaatgcttacaaaaagtttaatatactccacttcatagtaggtactcttctagatactgaaggaaagtagaagagtgtgggataaacaggacacagcccacactctcagagggcacagaagccaaggaacaagaaaacagaactacaaaaataagtgccatgaatacagtgtgtgcactacacatagtacttaacatgcgttttgcttactctgtcaaacaggtctaagcactttacttatgttgttatttacttcctgacaatgatcctgaggtaggtaccatttaaatctccactttacagatgagaagttgcatactttgcccagatggtaagtggcagagctgggacttggatccaggcagcctagctccagtggccactttgctagtccccagacgactgtgcctcggtacactatagtgagcatgagctcggggtgtcattgaagtgaaaaagaaagagaacagtcagaggaaactttacagggcagattatcttaaatttaaaggaaggactctcaagttttcctgcctaattatataaattactattacaatgaataacttataacaagtttgaaataacctcagatactcttttcattatttttgcaatcctagaaacattgtaatttttgtttcctagtatatgatttcctacatatcagccattttgtccttatgggtaaatactgccctttaggaagaagccccattgggttcacagattaattcccagtccctagaagaatatctagtgctcagtaaaaatttattatattaattacttagctaatggtaaccaggttaaccatagactaaaataaaaccctggtatcaatagatacaaattattaatatttgagctccccaaataaaatgattcttgtttgttggactaaggcagcaatttagattgtcatggttttgtttttcattttattttgttcttcttattcatggcatctgctattagcagaatgaaaaattggcatgtgtgccttctgaatatgctgcactgaactgtctgtgctcaagtaccaaggcacatatgtttgtcttctctggaccaacacacaaattgtaggtttttcagggtcaacagtaataagcatctataattatagagttaggaaaagaaacataaatagtatctattagtaactgataacaggaaataggctctctaatatccattcattttaattaggaaaatatgcatgggttggcctcaattagaaacacacacacacatacacacacacacagaggaggtagggcagaatgggctttttaattaatgtcttgaataagttatgacttaggaaacttcctcttacttttgcagttgttatgtagtaatgatcctcaaacgtctgaaattctttgaaattctagagaggttcagaaaccactgtataccacactctattattaatccaccctaaaaacacctccctcccctttctaaaaggacccatttgcttactggattctgccattaccaaatagttatttttaaaaatcttaaggtttgaaaactcacattacattattctgaaaaggaaagagacttagatgtagaacttgtttttatgccttctttctgtaagttatggtttgccaaagccgccacagcatctgcctcactgtattggtcacggttctcaagagaaaccaataaaatgtgtgtgtatatgtgtgttgaaagatagatagagataggttcatagaaatacatattatctataataaatctctataacatatatataaaatatgtattgaatatatagattaaattattaaatatatacataatatatattaataaatatataaataaatataaaatataaatattggcaggtctgaaatatgcagggcaggttggcacttaggggtttccctaatcattctcatattccattttcattttgtccctataatacatatggcagtgcttccaaaggcgtcttaagttctccccactccttttactgcccaaaagatttcctagatttacttccttgtctttgtgcattttattatcaaatcatttaatattttaaaagaatgactccagtgctcaagactaaaaggaattccttttaaaatgctgaaatagtccttactaatgaagtaaagtttccttggccgacatgttgatttactgctttgtggccctgatttcttgaatgtctgtgtgaaacccatataaaggccaataggtagcattctacctgtaagccatggccctgtgctagagtgcccaaccatctgatcccaacccagcccatctggtttgtgcacttttactgttcaacttttcctggatcttttcctggttcttggttcttgtcttgtcaagacacagcagagacaaagttggtaattttcaaaaggaattttttttaatgaatgtagaggaaaagaatgcaaacacatttgtatagaaataaaatttctagaggcttcttattttaaccagagtttagctacagattggatggattggataaacaggaaactgtccagctctttttattgccttaacattgtctgggttttctagtagaaaatggaaaataaacgtatttaaatattgtgagatttaattttatttgatgtcaattctagaaacctctaacaaacacttcacatctccctttgcttcctagaattacctccacacatggaccgcaagctcccaggctgtttgtctgtggccttaagccctgcttcaaccttgttttgctcattgcctacttctctctggcgatccctagcccacagccctagataagaaggcacttcatagtgtgtcctcaaagactctttttctgaaatcagagcatctttcgccacctgccacatccttgttctgttgctcttctcttgctcaatctgccactaggtacctgaaacccccacctctccaattccatttgttaaccactatattttcttcttccttttcctcctcctcctatcattactgctgctaattttagggtgaattccatccactaggatattcagaaagcaatgagtcccttctgggtttgagatgacatgctccatttatttctcatacttgtcaactcatcatgcaggtgctttggatgacagaatattgacattctagaactcaatttttacaattttacaaaactttcaaatcttaagcgtacaattcaacaaaatgaagaatttctatcaaaaattttcaaatgtacagtctttcaaagaaattatctgagaacaacagagtaactattcatctttatcccaagtttttcctgttgtttgtctatgcctgacaataagaataaacaacagagaatcaaggctctagaactgctctttctttctacttgcaagatggttgtggaagtggattctaaccattcccagtttggattttaactgagtgggcccagaacacagagatagcccgggagaagctctcataagtcatagacttgaatggtcacagttgcctcccccagctccacagcttttctggcctcaccccgaggagcagtacacaggggccatagcttctctcagagcctccctgagtgtatggaggagcaaagaaaataaggcaccgtaagtcagaaaataactggccatgctgcaatgggaaaccaattttgaactccctctccaaaattaaaaggggcctctagattgctttaaaatgcacttgattctcattatttgcagtagttatgttctataaagtaatcgaataagtcaatgctgaacctttgctcctaggagagttatagggttaggttcctgtgagcttctggtcacaatgttttgatcaaccaattgatacataaccttgctttatgtgtgtttctgtttaaaaataccttatttaatatacactgttgattcaaagtgaactcaccatcaacactgtaactcaggcctgaatgaatttatctaatacatatattttctccataaggcatgccactgctttcaagtgcttagaaatactacacagcacttcagcactgtacttgggggccattttaaacagctaattcaccaaaataaaccacaaaaactgtgacagttgtggcaccaaatggactgcaaacaggacatttgtttacagtttgagagctgaaataagaaggcatatggttgccttgtttgaccccagctgggaatgtgtgctttgggtgactcaaatttttcattgctatacatatgtctgcaaatgactgggaaagtgccttaaggtgttacaaacaaattttgtgagtaaatgaatttgcacaaacagaattcccaaataatgaggaccaacagtacttatttgcatggaagaatacattggacataggtttaataaccgattgagtagatgttatggtcaccaattgaatattgagaaaaataagatgcataagttcaagtagcttgtgcaaatgacactatgactaaatactagaattaaattaaattttataggtttaatgcatacaatctggctccaaagtcctaatgcttaagtgctacactatattgcttctcatgaaagataaatattaagttttagaattttggtatttaagtaataaaaggcattattttgaagtttatttagcaagaagaaattaagactcatttgaatattatgcagattaggacataacctattcaactaaaacatttgaaagacagagtatcttgtatgaagtttcttgagacaattaacaagagaaataccaagtagatgtaaattctaattttttctcttatttaagagaatattttagtaacaagaattcaattacaacagttaatgaggtagattcaatattgagtttaatagtaaagtatgtatctacttgtgaattttccactacgatattttatgtaatatgagaggtaacaacaaaactgtagcatagggctttgatggactatttcctttgtgcattttgtttacattatcaaggttttagaagcatgataaccttggcagcatttttttgtttcttaaaattccaaatagaattatatgtctaatcttttgacaggattggaagagtaacacctcacatgttatataatggttctcctgtcagagagcaaaaggtttcataaacacagcaatgctctgtttttacagatccacagaaataataacatttcatcagatttcaaatactattatgaaaggaatgaaaattgttgtttcttcaacttttcagctaccttccctactctaattggtgtctgattaaaacccaggaaaaattaccttccagagagtttcttggcttaaagcatttgtgacatggcatcaagcccagaagaatatcagaagttctataattttgacccccaaccctttcatttcataaattaggaaactgaggtccacaagatgaattcttaagaaccacagatttagtggctgagctgggattagaatgcagatttcctgatttttaatcttctctttattgtgtgctttattgttttgccccaaagtagccaccccaaagtggtcattctactctgaatgaatatttactattccagataatgatttatgagaacaaatggattgcatggtcatgaatttccagttttaatactcatcttactgttaaattcttgtttaatgcttatattctaaacttgagtatattttcattttattattctagtgagctaggttaatcttttgaaatcgttggtttgattacttcaatttaattatcagccatctttgtagagactgcctcagaaagtttaggagcaactctgcacaaacaaatgtatgacttgatttctttgctatgtgctaattcacctgtttatttgtatttgtaaaacaagtgacattggacttctctttaaaaaatttcccccagacattttattctattctcatgaaattactgtttgaaagacattggctgaaacaactgaaaactaaaaatgtatctggtctagaagaaaatgaaaagtaaatttgccacaccttggtttgaattatggcttctctatttacaccttggtaataaaaacagatgcagttaatctagattaattaaatgaaaattgccatgaaatgaaacaaatgtacactgtagattaaacacatgctaaacgtttattgtatctcctaaacaaatctattattttaacctaacaagtgagactgtaaattgtttgcaaagtaaatgtgtgcatttaagaaaataactacatagtgtatgaactaagatgattaaagcaaattgacagttttcaaaaaagcaatgagatggctgttttccattgctttaaaagtttgctggaagacagttgactttggttttgattcctttgattctgtggctataagacttcaccttacttctgataatgccacagctattatgttggtgtgtaatttctataactttttctcagctaagtgcaaaagtatagaataataacaaaccatcattcatttgtgttttattttgtttgtcattgggatacaggttgcattcatcattttacagtgatataaaattaataaatatcttctaattgatagttaataattatgaaaaatcaaactctaagacattgataaaaaagttgtaaaatccagatggaaatttccacactgaagttatttatgaaagcactcacctgtattttctgatgcagttagtttttgaaagaaaaattttatatagaaatctaatataacccctcaaagaatttcatgttcatttcaactttggaaggaagcaaactaggcaaggaggtagaatataaaattattttatagatgaacttgcagaatttcgttatttagcgtttggttaatgtctaagtacattcaaaaggagttattacagcatgtttttctttctttttttttcatttaagaggttgatgtggctttttaaattaaacttacctcacaagtaagattggtgcattaatgctagtgagaatattagtttatatttattttaatataggtaattgagcgaggggaagattctaaatttctagaactattgatagtttcttacacaaaaagtctgctgtgctttatgggaattacttttaggagcagattgtgttagaccttttaatgagattgccaataaaatgaaaacattaaatcctactacttcttatgcttacagatactcatttcaaagaacttccaactcttctccactgtgcagcaaaatttggcttaaagaacctggctattcatttgcttcaatgttcaggagcaacctgggcatctaagatgaaaaatatggagggttcagaccccgcacatattgctgaaaggcatggtcacaaagaactcaagaaaatcttcgaagacttttcagtaagttttttttttaaattatatctctgtatattctgtttgatattgtagaagagactgtaagaagaaaaaacctattacctttaccgttttctttaagactctagttaaggcactattaggcacatgaaaacatatcaataatcgttaggttgcagaaaaacaatttgataataattcaaaaagtctacccaataaaaagttaatttatgttgcttaaatttgttttccttaagtgattccttctccttctccctgttaagtcccagttctgtcttatgaaggttgaagccccaaatttcagaacactttttgaagaatgttagttttgtaagaatgtaaccaaagaagattttaagaaggaggggatactatctcagtacataaaacacactttgtgtttccataatcatgtttagaaaagcaattgtttttctggttgtaacaaagatatgcacattttgctccagaaagtgaattatactctgatggctctttggaaaatataatgggacaatgattatgctgataaattatcaaaatttgtccctgagtatttaaaacaaataattttgttgtcaaggaagagttgatatagaatatgtaaatcctgtaagcttctggctattttggcatttattctgattgtcagattaagccaatctaattaatattggacttcagaaacaatcattggtatttgagatttccagagagtatatttaaaataaatatagcacatgaagtattatgataaaattaataaactactaattttttgtcttatgtccttcaaatcagaaataaccattatttttattgctggaaggattttagacagtgattgtcatatatgctagtttttaactagttatcattctttatctgatgagggcattcattttcataattgttcactgtatgcaggcattgaatagggcagcatggtatctatctggggtaagtcagtaagtcaattcagccttggatattttccattaatactgttatttaatacattttagttgcctgtctttaactctatacaactctagtctttaatttttagccactggtacactgggttaaaattttccctggaagtcctagcatctagggatgctttctaaaataatccctgattttcaaaaagtcattcttccacttcttgctctccagtaaagactcagcttttgacagattcaaccccatgcacacttcaggtgctccataagtaacaaaataatacataatgatgacagtagatatgaaagtaagtacaatggtaggatatgaggtttgatggatgtgggatataattttttttctcttacaccctctcagtatttatacctctgctcctgcaataacagcactgatagaatttgattgctatcattgtatctaggtgacaatcactttttcgtagtcgctgcattctaattttacagttatacttgataattcttgtgtgaaatatgttacataattttctatagtatctttgtaagctgttatttctgcctgaatgtctacagtaaatgttaccattatagttaagatagatcaattattttgtgaatgttctgctgtcagtaaggaattgactgtagctgttgcaagtgccaacagatctgtcaatgcgttttcatgaccatggataattttatatacaataattttgcaagctacgaaggcctttttgcaaatgtgtagttaagaaaatgaaacatatgtattatattttgaccctcatggaaaaatgtttcctgtcaatttatatgacacataaattattcttctaattatcaattttatctaaaataaatttggaagtcatatcttctgagtgaaggtatgctagataaccatatgttgacactgtcatggatgaagctggaaaccatcatgctcagcaaactatcgcaaggacaaaaaaccaaacaccgcatgttctcacccgtaggtgggaattgaacagtgagaacccttggacacaggaagggaagcatcacacaccagggcctgtcatggggttgtaggagggggcagagatagcattaggagatatatctaatataaatgatgagttaatgggtgcagcacaccaacatggcacatgtatacatatgtaagaaacctgtgtgttgtgcacatgtaccctagaacttaaagtataataaaaaagacactatctattctaaatactgttatttaagtcttttaaagagtgtatgtaaacctgatggagaaaaatggaatctcattatactactaaaatactttactgttgctttaaaagcctctatatcacttcagtgttataatgacttagattctgataaatctaagatcctcacaaatgcattcaaatttttcatgaactattgtttcagaatagtttaaaggagcagatatttttaagtttgaggtttacaatctactagtggactacacttctactgaagaaatatctatttttaaattccaacatattttgctcctaactaatttactgatttgctcagtacttcctaatcccccatcaataaaacattgctcattttagaatttcacagggagttacaatacagtgatttgggtcatcactaaataaagtgggtagaaggaaaaaagaaattatgattttagaaaaatacagagaaaacacaaaagcattagcaagcattcataaaccaagtggcaccatgtcttattgttaggtatatgaaggaggaggatgaagataaagagaagaatgaggaaggaggggaggaagagaaaggagagaaggaggagagtaggagaagaagggggcctgaaatcacatttcttacattgcttcatgacattttttatttgagaggttaataatttatacacagtctatgaatagagcctcttcattatgaatgaatagctttcatgttttgataaagttatgtaattaacatctgtacttcatttatgttttcagtgctattactggataataatatcatatatttctataatccataaagtatttcaaatatctactcatttttcagtttctaacaatatcacctgagagaattaatatgaaaagtaaatgggaaaatggcaaaagatttggtacttaaattcacaactgcgtatgaacaacgatttgcttagcattattcataaggaaagcccaggacattttaaatagtaaatagtgacattgatgattgattcagccttcagaaacttatctcttaaataaaacgtgcatgaaaagttgaaaacaaactggaacttggcctcagattgaggtgctttgagatttaagataaagtgtacaagactagtctgtactttaagcaaacagatataaataatatttgcttgtattagctcacatatgtcaccccatccattcccatccgtttagaacccttaacaaaatgattacatcaatgtgtaaatagacaaggaaaagtacattctcctcgttggccagctatggaattggagacaggtgttcacttatcttagaaacaatatccagaaaatatctttttccttccaccactgtgttcacttgtagtttggtttaaatatttaagtatcttaaattttcttcatgaatataataagttgttaattataaatattgatgaagaaaatttaagaaatgggaaaatcagctttccatgcacattctctaactggcttttcagaagtactcctgattgggaatctttctattgctcatgtgtgcgatgggattcctgtggcatcaggctctccttaatctatccctacactgctctttgtccctgtggacactgggcccgtgtgtgtgtgtgtgtgtgtgtgtgtgtgtgtgtgtgtgtgtgtgtgagacagagagattttgttgccctccagtatctgactgacaggccctaatctttttcagatagtcaagggcttgggtttaaaatacaggtatggaggggtaggtgttgaagcatttacaatatccctaatataaagcaataattgactgggtaatatagagaaccaattactcagaagttaggttttgtgtttaggctagtaaacattcactcttcctggctctttatttctctcattctcagcattgccctctcagtattttacaagtagattgttccatttaattcagtatatatccatgttatataatttagtttaaatggcagcatatcctgctttgcttatgtagtttttcctttcttataagtctggaagcttgtgatggatagtgggctctcctcccctcccaccatcaggtacactaaaggtgctcagcatgtatttttctcgttgatggtacagaaggttggtgtccaattgaaagacttgtcttatttcactttcccaatcatatacttaactaggtcccatatggtaaataaaataattggtcatatttcctatacttggaatttttttaaagtttagtttcggagacttcatagacagccctactgcttgtcttcagcatatattttaataggcccaactagtatgaattttggaattctggcttttattcaatattgatgttctgttctgttagaattgaagaaactagaataagtcacataattgcatttgactgcatgcattataaatttatgtgtcagttttgtgcttgaaactacttgggaatctctttcaaaaatctggctatcacagaatttttctcttctccaagtcctcagacccagttttgatgccctaactctgcagctctaaacatgctatgtaaactcccttaaatctttttgctttattgtcaaattttccattttcctttactcctagagtcttggaattcagccaggtctggattttaaacctaacttcatcaaaaactaagtttgcatccttggaaaaaataattcctcatagagcactttaggatttgatgaaatgaatgtaaaattattaaatatatagaagacccacaaaaaatattgcattcaccttattttctgttggcttattgttattcatatcaaatttagacttcactgtcaatcataccttctcttttcttgcatcattaatctctctcattatactgactcttccctgaaaaagtgtttcaagaatatatatgtacatgctttacatagacatatagttttgtattgtttaaagactatatatatatatgtgtgtgtgtgtgtgctttgcatttagctcactactaaagctgctctgtcaaaagccataaataatcaaccatgtatcagatccagtggatttctttcagacatcttttggcacaacctttgacattgctttctttgaccctgccctctttctgaaggtccactgaccccttgtgactttcttgtcttccccatcaggaaaggttctttctgcactctcttcacttgtgattaaaaggcagtgtcatagctggaacaaatgaaatcatgtggaatttgtgtgaagcagaagaaaatttataaacaggattttaaataagcacttaatgggaaaggtgaaggatgcatatggtgaaagaaatgggatgtgcagttgtgtgaagaaggcagagtaggtaaactctgacttcttaggccagaaaaccaaatcttgttattgactttttttcatagaatgcatattgttttttaacttatgataatgacctacaaaagactatgcatctattaaaagaaaacttaacatttgatatgggattttggtaaaatatatactaagaaatgtttgtagagccccaaagagctcatacacaacttaatggtaagtacataaaaacctagttgtttgcggtatttttgcctactcatactgtaagaaaatacttgatttttaattatttatttacacgctttgcacaggttgtatgcttaatgcaacgtgtatgatataactagattcaaatagaaaaatctgtaaaaataaatttcccaaattaattttatgagatgtaatatattatttagaaaaactgtccttaggctattcatcagtagaatgttcattaggaaagagatttctcatgtctactaagcccagtgtgtgagactgcttaaagtaatctctttctcccagaaatcatgttagtttggtttaacagagtaaagcaaaaaccccatttgtaattctcaggaataactattctcagatgtcacagccgctgttttctcagtgttttgctatgtaataaatgatttatattttcataaagttgctagaatagcaatcagtgtctgtacactctctttccatatacacagaatatagttttttaaaagctttcctgggttctcattcattactctgcctcagcagagtaggaaacagaagcagaaagggtcaggatgatgtacagctagcctccacagcagtataatcatttggcggtgcgttgggaaggggagcaggcatcactgggaaaagcaagatgagtaaaatatctgaatagtccttgaacgtttcttacaactcagacacataaacagattattgcattatcaatttacatcaccaaaagataaattagccctaaaattcaacaaaatagaggttttgtaaaatgaatatagtgtgtgatttgtatttccaatttctcgaataagcataatgtattatattcatcactcaggttttttatatcagaaatgttatattctcataaaaacaggagacacacatttttcataatgtagacatttgttatcctttttattccaagatctattaactcctttacttcataacttccctcaattgaataattagtattttaaaaaataacttattgttaaaaatttttctgagaataatgacccttttgataaaccttagagggcactttgtcctagcaacagctgaactctgaaaagccacatcttattttcccaggcagaagggaatcttgtttttgggagctatcataattttattcctaaatgagatttaccttgtagtatttatttgaatatctattctcacttttgaaaaaatattatttagagttagggtaaggccctctatctacactttaagcccatttcccactgttctcagatatatggaacagagctagggtagaaaatttagatataacagctatatagttcagaagaatttataatatatttgcttttatcttcattgtaccaaatgccatagctgctatgaatgcaatcatggtatatgaggacaagtgatgatatgattttgattacctatgcctcagtaggtaatgatttttatgctcattgcattaaaattaattcaatacccacagataaggcaatttatgaaagtaatagagggaaataatatacatgtgcttacagttcttttccaatagagatccttaatacatcattaaataattttttaaagttgaaacagtatcttattctaaataggtaatttgttatcttttatacatttgcttcacatgctggcagtctccaggatcctattaagagtcacatccttgcctatgggggctaaatcgtctttaaagacccttggatacctaagtttttgtaatttttagagttctgatttctcagaagccttctaaactttagttctttcatttttttctggcttctttcaaaccaattagcttgtgtagaacagggtaacctagagctctcacttacatgcctgctggtcaaaaggaaatgcaatttcagagaatgcaaaattaatcactaatggtaattaaagcaatcagtattgacaccatatctgtcgagcgtggccctcatgaaataaacacacggcattgtcctttcagaaggaaaatatgcaaaggcaattgaattaaaatttcattggaaaaatattgttcctggaaattcttctccattaactggctttgaatttccatcattcttgattcttgaagataggaaagggtatttaatataatccaatgtagattgggtatatacttttctactagtatcatgaaatggtttttactttaaattcatgtaaaggcctctccaggcatatgaaaagaatcagacttatgaaaaaacaagaatattcatcaaatattacagctctgagcctcaacaatatatttttttcatttctccttatgtagcaacactctctttgtgatatatatatagatgtgagaaagtaaagattatgattgacttattctgcctctaaaaaatacagtataaaaagaaaataaatggcaccagttgaaggctaaattttgggtttgttttacataaattaatcaactctcgcttaagccagaaaacagtctccattttagtttaacaaatagattgattgactcaacgaatatttattgactatctgttaggtgccaagcattgttctaaacactggaaatccagaacagaccaaaactcctaccctaatgggaaataagactataaataaataaagatatacaatgtgtccagtggaaattaaagtttaaggccaggaagaaatagaaagaaccacattgcataaagtggtgcgtaaaaggagatgggagggggaacaattttgaaacgagtagtcagggaagtattcactgaggagtactttttggtaactgtctaaaactatgaaagagaaattcatgcatttatatggacaggtattccaataagagaaaatggcacaacaagggcaaaggctctggtaggatgtggatatccacaaaagagccagttggtcaatgttactgaagcaaagtaagtgagaaataaaagaaacagtaattagatggcatcagaaagataagtaaggccggatctgtagggctgtataggtaatgatgagaatttggtattttggagaaaggcattagagaattctgagaggcattgtatttgtctgtttacacactgctataaagaattgccggaaactgggtaatttataaagaaaagaggtttaattcactcacagttccacatgactggggagaccccaggaaacttacaatcatggcggaaggggaagcagtcgcgtcttatatggccgcgggtgaaaggagagaaggaggaattgtcaaacacttacaagaccatcagatcttatgagaactcattagctttcacaagaacagcatgggggaaaactgcctcatgatctgatcacctcccacctggtcccaccctggacatatggggattatggggattatggggattacaattcaagatgagatttgggtggggacaaagagccaaaccatatcaggcatcatatgatttaaattgatcagagtcacaactatattgatcacagaccatacagggcaagaaggacagataagacctgactggcaactactcccatagtccagatgatagatgataaaaagatgctagtttccactaggatgacagcagcaaagacaaccagaagtggttaggtttgaaatatgccattgttttttagtataggcaatggaatttactgactttggtggtggaatataaaagaaagtgtgtagttactgatatttccaagtatgttggtagaagcggaggatggaattaattgccatttactgagatgaggaagattgaatgaagaaatggtttgttaagaaaaatcaggagtttggcttgggacacgttaaatttgaaatgcctactatgttccaaagtttggaagtagaggttatagggagtaccaacagaaaaagccaacaacgagcagcatttgaggtaggaagagaatcaagaaatctattgacctggatgccaagtaaaagaaagattttcacagatgaggtagtggacagccacattaaatgctactgacaggtcaactaagataggacagataatcaaatttttgatttaacaacatgtgtatgtatatttgtatgtgcatatttatgtatttctccttaaaaattagttatcataataataagcctttccaaatattggaaagatgatttactgggagaggagagagattaagataaattttgtaatgaagcatgagctctatgatactttggggacaattctgatgaatattttgctctaatttagtttgtcccaaatacgtcttattagctgtttgtggaaacaagagtgaagcatgatgctattttagaaacacatttcctgacatgtggtttggaatccttcaagaaaatgtagaggaggagacaacattcagtctccagctggtatgagtgtcttgtggagaaagtgaactgtcagggaaaaaaaaatcagagcatttttatctgtcagacattaaggtccattcatagtgaaaaatcgtaaactcagatccctgatttgagcctgtggctgagatttcagcctaagcaagaacacttctccctttgttagtgtttaattttcttttctcagtactgccgagttcacttattcaaatttggctcttggtaaaatatcagcaagccaattaatccatttccttaatgagaactctctattataagaatgggtaactgcatagacttatattgaacctatcaatcttgaatttgaaggggagaatgccaattatccagtcaatctggttcattactgcagtattggaccacgtcgctaaataagcccacagtgcaactacaatagcattgtgggagtggagagcagcgcctggcgctgaacatttgttcacggcccattatatgccagattgggttagaaactttatgcacaccctctggttccatgttctctgccaccctctgaggaatttctacttagtttacattttgagaaactgaggctaacaagttggagagttagtgagctgtgaagccaccaaatagcctccaaaagatggctactcataacaacctgctaactttatggtctcacttcttgaattctgtaatgattcaaatgattctttccaattttggcttctcctttgttcttttcttgacatttcaacctgatgtccatacaatgcctctgaataaaatatcactctcatcactatactattatcataataattcccaaatatttagcaagcactcagtctacatctgatgtgttaggaattgttggtgagggagggagaaaggagggaaccttgtactttgactcctctctaaaatctacttcatgaaacatcagattgttggaaggtccaaattatatgtatgaaaggcctttaggatttgtaaagcttcagcaccatttttaatattatcatcaccattttaaaacttcccataaataaattttaatattttaaacactttgaaagtgaattattttaatacttaagtcatttctaattttaaaaaactatatgacacatgaatttttctctcttttctactgtatatggctttcaaaacgaatgtaggaaacaatatttatcaaattttctccttaaatgggttaaactgtaacattttctcagggaatgaatatatgtactatcctttattttttgtctgctttctacttattaagtcaatggagtttttcagttctcagaaaaatttaagttgcaatcatttaaagtagccagagattgcatttagcaacattcagctaatgttgataacccttcctggtgcttatattgtattaatagtttgttggggggggactaaaaatgaataaacacacaaagtaatttcagaaagtgataaatgctgcaatttttttaattagtaaaaaaaatttaattgaagtctagttacaagaaataatgatatatttgttacaccatgctcaatatcacgttatataaataaaacattcatttaatattagtttttccttctctcatgacatcttcataacacttctaatcaggtattaatatgtaataattaatatattaataaattcaaatctagaatgtttcctttattagactataaatttgatgagaacatatcagagtttatagttccatagtaattatatgtatgtggatattggttgaatatctctcccacagaactgtaaattttatgagagtgtgtgttcatcattgtatctgccatgttcagcagtgactatctctgagtagatgctctctaccttcccccattctctctttgtgtgtgggtgtgtgtgtttatgtgtgtatatatgaatatatatatattcatttacctattcattcttttatattgtataaaaagaataaattctttctaaaattattgggcatgtactattcgttgagtattgttacagttacagtaacataagacagacaagtcactggtctcatgagctcacatttgaaagtgataaacaagggagggagtgttctttattatctgtccttcttcaaaattctaactttacccccatagccattcgccagtgaaatatcagatagtagttaagtactctggaaaaaaataacatgttagtataaaatccaaaaacaataaaattagcaaaaaattttatagtacttgctatgtactagtatctgtttttgctgctttgtaacagctcagtcctactatccaggttttacaaatgaggaaactaaagcacagagtgtttaagttcttgcccaaggtcacacatttggtaataagtagagatgagttttgaacccaggcagtgtagctctacatgctttaacatggcactagattacatctaatacttagaaaaggcacacttaaccatttttagtatattctctaacagtttgtcccactgcaaatctgacagaccatctttctatgtaaaatcattgctaaacatcacaaaggattcaattcagatggaagtctgggtccaaattcagttttacctgtgttttatgcagatggactaaagcacctctcagaatccagtaaaagaaaataccaaattctagtttttataggttgagttaaatttagttatggctgtcatgtacctaactttttaacactgtcctttgctctgttctttggctgctttattgccacagttttattgactctcaagagtattgtgatagttaattttaggtacctactttcctgggccacaggatgcccaaatatttggtcaaacattattctgggtgtttctgtggggataatttgaatgagattaacatttaaatttgtagtctgagcaaagcagattgcttttccaaatatcagtgagcttcatccaatgagttgagtgcctgaatagaacacaactggaacctttccttgaactggaatgtctgtgttttcctgcctttggtcttgaacttaagaaccagccctttctgtatttccttctgctagcctttggactagaactataccatgggatctcctagttctcaggcctttggacttaaattaaaaccacaccattggctttcctgggtctctagcttgccagctgcagatgtggggacttacgagtctccataattgcaaaagtcagttccttatcattaatctctttctatataacatatgtacatcctattggttctgttactctggtgaactttgaatagcacaagtattgatttgattttaaatctctatgacattttcttccctcagtctttcaatggtaaaatcaagatgaggaaataatctgaatgctagtttaatcatatcgtgttacagtttgttgttggagctgaaactgagtgtggaatattgacatggagagagggctggagggctggagatgaagtgagagatatgcagagccctagaaggcagacagagaggagcagaaacatgggccatggcaaagctataaaaatccataacaattcaggagtaactaactaaagttgttttaggaaaataacatgaaaatgattaaaatattccttcatgagaaaatgtagtttgtttaagatcctgtggtaattttcaagtacttcctaggaagtattttaagaaagtaaagggacctgttttaatgggtgaaaagttctactgactgttagtagatgaatgttaaatgccttgcaatgtggaggacaatccctccctgtgaagaactggcctatccaaaacatcggtggatccttccttaagaaatagtagcaaaagattttccaccaatcccactctaaccttaataaacctagaattcaactgtttcctgatttccttatccctttggcaagtagatctattaaatagaatttgaataatgtttttatatatgtgtgcatatgcctatatatgtttgtgtatgtacataaaatttctgtttcactaactatgaagtcaaaatttggactttttaaaggggacttttctttaaatttcaccttagttgtcctgttgtaagtttgttttcttaaatatttatatgtaaaaattttaataattggtagtatgtcagaaaatggaggacttccatgttgctagagacagctatcaccctattaccagagagcacagcttggatagcttctaaaaggaaaactgaagataaaattatagctgatgtattatatgccatctgctaaatgtctatctcctactttaatgagatattactcttccttgtgagtaacatttttacacttctgaaagaagaaatattgtgagaccgctcattcctctgggaaaatatatacatgtactggatgagacggaacagagaggtgctcttttcaacaaaccaacctctcacagatagattaaaaacaaaacaatagattttgtgcatgggtaaaaattacagactaaaactaaatttatctttagtgtatagctctgtagctatattttagctttgtaaaatggatctggcaaaggtgtttatatagggctgtctgatattactgtcttttccctgtggttttgaaatggcttatattttggcaataccatattatcacccggaaaatgtacactgaaaaatattcttgtttccacaacttgtagtgtgaattagttacactgcaaactctcttcctgttcaaatgcaagcatgagttttagacataataatggcatgaatacttagcaaatggctattttgaaatttaccaaaaacaatggcccatggtagggataggaccatagaaagggagattatttggagaaactagtggaaataagatttagagttttatttatgttggagtgacaggtagcgtattcaatggccaccagagagaccggtaagaaaggagaaaaaaaaaaaaaaaagctaagcatgagagcattcactggcagtaatttcttttcagaaaaagcaagtcagtggaagaaaagcatattaaaggggtatggagttttacatggctatgccactggcaccttctgcccattacacaagggttgttatgtctgtagcctaataaaggtgagtattttccagggcagtggttctcactattgtgttgcagtctcttcacaagtatatcatcatatttgatttcataagttattttaaaatataatttagcatatataatgttatactgatgactgtcaaagaaaatgttgagctaggtagcacaatgcaatatagatacaggaacaaattattgtaaaaatcagcattcagaaagtagcatcaactgtgtagcagtggaaggtcaaacatttattgaaagagtgagaattctgtctcacagtctagtggaaggtggtcagggcagtaaacagctctattcagatctcatgacagtgctgaagggctaccgaactgatagtgccctaactgtgtatagttttataaattctatgagacactgtcgtttaggagtccagattaccccataattattgctggcttttttagagtgatttgagtcttttcatccatttggtttgctgccaaacagacaaacaaaaaaccctggtgtctgaacgcatatttcactgcaaccacgtaaatattgtgaaccctgccttagggtctgggtgccactagcaagcttcacagggtatgaagacaaaagataagggtaaagctattaagcacataggataggatctcttactactagaaagaaggccaaacatgtattagcaataactgatgaaatttccagagtagataaaaactcttgttagcagcctaagggtatgctgaatattttgaaacagcttagtattaattttttttttaaaagactgcagtcctacaacttacttgtttgaaatgagcctctcaatatctttctactcatggtttactaggggcgtagactgaattgtgtatgtgaccttgacatactaagaagctacgatgagaaacagacaattgggaggaatagaggggaaatgatgactgtggtcactgaaggagaaactcttcatccctttgatggaaataaaagaaaattatgagcagtgagagcctccatcacatgcatcccaaatgaattttagaaaccagagctactcctttgtcttgagatttatgatgagatctccttgtgtcatttctgtcaaaacaagacaatcaagaattaataagcctcctaactaatgtagtcagtaaccttatgaccatagctggaacataaccaaacaaaaagccaaaacaaaaccactgacttacctgtaaactatcagaacaattcataaataaatggacaattccctagggagcactgtaacaagcactattatgactgcgctgatattctaatgccatttcaaaacacttttactaggaggaattcttttgaatttcatacacatttaccaatgccacaattcttcattgcacacttattttatgagccgtgtttacctgcccttttcacagcagtaccatggctaactctcttgctgaaatgtcatcttcttcatgaggtctcctctgaccatactatttaaaattgccaatacccaccccacttcatctgccattctaattcccatttattttagttcaactttttctttttgcatagcacttatcactttctagaatacctcatggtaccctttattgtctgcctttacctcaccccaacccatccccagaatataagtaccatgaggacagggatctttgttttgtttttatttaattaacaatctttttatagttgaagaaagcaggttacccaaattaacatagtaaaactgaacactcacactgcaattctaaaagcaaagcaatgaaaaaagttataagaaaagttcttaagtagtcaatcaggaaaacagctgtgtcagaaaattgccttgtgaaggcaaattgaaatgtaaatctttctgtgggctgttaacttgctgaaaaatacatttggctcattagtggggcactgggactactcattagttaagtggagagaaatatacagttaatgtcttaacccaagacccataatctactttttgagcaggtatttattttaacttttgaaatcacttatcaagaatttcttgaaagtgggggagttaaaaggaatcttttctgaattcaacacatttattatttaatttatcatcaaatgctattgaaaatcttatctatgtgtaacaccgtaattgatagaatctgtcatctttccctcaagtaattagtttaggggtgtgcctagggaatatatgaaacatggaataaatcctctctctacattcatattaagaagtttaattaccagaaataaatccatacatctacagtgaactcatttttcacaaaggtgctaagaatataccttggagaaaagacagtctcttcaatagatggtcctgggaaagctggatattcatatgcagaagaatgaaactagaaccctgtctctcaccatatacaaaaatcaactgaaaatggattaaagacttaaatctaacacgtcaagctatgaatctattaaaagaaaacatggtgaaaccctccagcacattggtcagggcaaagatttcttgagtaaaccccgcacagacaaacaaagcaaaattggaccacaccaagttaaaaggttctatacagcaaaggaaacaataagcaaagtgaagggacaacccacagaatgggagaaaatatttgcaaactgctcatctgacaagagacttataaccagaaaaaaatatatatgatatatatattttttatatatcatatatgtacatgtacacatatatgatatgtatacatatatgacacacatacatgtatgcatacatgtatatgtacacatatatgcacacatacatgcatatgtacacatatgtatccatacatatatatgtacatatacatgtatacatacatgcatatatgtgtgcatacatgcatacatgcatgtatatatgtgcgtatgcatgtatacatgcatgtataagatgtatacatgtttgcatatactttatatgtatgatatatacacatacatgtgtatacatatatgtataagatgtatacatgtatactagacatataagatgatacacatacacgtatacatatatgtatatgtatacgtgtatgtgtgtgtatatatataaccagaaacactctataggaaaaaaaattaattatccaactaaaaaatagacaaaagatttgaatagcgactcctcaaaagaagacatacaaataacagacatatgaaaagttgctcaatatcattgatcattagaaaaatgcaaatcaagactacaatgagatgttatctcaccccagttaaaatggcatatatccaaaagacaggcaataacaaatactggtaagaatgtagagaaaagggagctctcatacactgttggtgggaatgtagattagtacaaccactatggagaacagtttggaggttcttcaacaaactaaaaatagagctaccatatgatccagcaatcccgctggatcccaaaagaaaggaaatcagtattttgaagagataactgcacttccatgtttattgcagtactgttcacaatagccaatatttggaagctacctaagtgtccctcaacagacaaatggataaagaaaatggggtatgtgttcacagtgaagtactattcagccataaaaaagaatgcagtcctgtcatttgcaacaccatagacagaactggaggacattatgttaagtgaaagaaaccaggcattgaaaaacaaactttgcatattctcacacatttgtgggagctaattaaactaaagagcttctgcacagcaaaataaactatcatcagagtgaacagacaacctatagaataggagaaaatttttgcaatctatccatttgacaaagggctaatatccagaatctacaaggaacttaaacaaatttacaagaataaaaaaacaaacaactccatcgaaaagtggacaaaggatatgaacagacacctctcaaaagaaaacatttatgtggccaacaaacatatgaaaaaatgttcatcatcactggtcattagagaaatgcaagtcaaaaccacaatgagataccatctcatgccagttagaatggctatcattaaaaagtcaggaaacaacagatgtggagaggatgtggagaaataggaacacttttatactgttgatggaaatgtaaattagttcaaccattgtggaagacaacgtggtgatccctcaaggatctaggaccagaaatgccatttgacccagcaatccccattactggtatatacccagaggattataaatcattctactatgaagacacatgcacacatatgtttactgcagcagtattcacaatagcaaagactttgaaccaacccaaatgcccatcaatgatagactggataaaagaaatatggcacatatacaccatggaatactatgcagccataaaaaaggatgagttcatgtcctttgcagggacatggatgaagctggaaaccataattctcagcagactaacacaggaacagaaaagcaaacaccacatgttctcacccataagtgatagttgaacaatgagaacacatggacacagggaggggaacatgacacactggggcctgtcaggggtgggggtctaggggagggttagcattaggaggaatacctaatgtagatgacaggttgatgggtgcagcaaaccaccatggcacgtgtatacctatgtaacaaacctgcacgttctgcacacgtatcccagagtttaaaatataataataataataaaacaattgaacacatagagataggaataaaatgatggttaccagagactggaaaaggtagtgaggatgggggaaagtggggatgactaatgggtaaaaagatatagttaaacaaaatgaataagatctagtattttgtagcacaacagggttactacagtcaataataattgtacatttcaaaataactaaaaaagtataactggaatgtttataacacaaataaatgatacatgcttgaggtgatggataccccatttaccctgatatgattattatacaatgcatgcctatatcaaaatatttcatgtaccccttaaatatatatacctactatgtaccccaaaagattaaaagtaaaaaagttaccaggagaaataaaaaacataacaacacatatatcaagcttgagtatatgaatgaaagatagctcttggagaacttcagtccataaaagctatttactgtaatgataatgactaatggcaatgcatcccaagcttgtctgcaaggcctttgcatgcagactgtgaatatatgttctctgttcatatccccatattttataaaaattatacaaagcaaattatcctcagtccccaaaatactttaaactacattcagtcaactctcatctctccctatctcaggcaataataacatggtctaagttgcaaaagctgtggtttattcaccccacatttctgaaagtcacaggccaagcagtagctgtgatttatcacccctctacctgagacgcagcatttcctgaaatactatctgatgaaatcttaatctattgccaaaatccccattcttccaatattttgaatttttgtcatttttcctagttttgcaagaatccatttctttcccaaatgggttctgcagtcagagctatttccagtcagaacttctagacgtgttcccttttaaattagatgttttaaaggggatgaagtactgtgattttggatctgtggaaagcaatctttatagtaatctcaaaagctacttctgactacctataacaagaccgtctaaaatgcaaaatttgtttcttaaaatatatgcaatttgcattgcaagttgtaaaataattaacactaaatatagcaacaaactccaatgacttagggcatcacatagtatgtaatatatattacatgttcaacaaaggttggcaggatgtgaggagagatgtcttcccaacaaaataactcagaaacttggactagtggatgcctccatcttgtagcagcattacctggaaacgtgtttctgaagttgcaatggcaggggagtagagagacagaggttgagagagacatgggcttttaactgcctctgccccaaagtgactaacatcactttctctcacaaatcattggcctaaaccagccacatggtcccagcttagctacaaggaatgagaaatgtaggggagtataaggaatatttgatgagaactctctctgccacacacaatttgcacatcagctttgggcactgacatgataaattaaacttcaaagttgacatgattttaataaaaccacattttgaatgtgtccagatattctgaaggcataagcaaagaaaaaaaaatacatcaataagaaaataatcttcaaatatcatattaaaattatggaaacagagcttctctgacaagttagcttttctggtgctattcaaatatcttctaaatgacaccattaacttgagcaagagcaaattcatctcctagcttccctattgaccatttgatgcatccataaaccaaactacatagagctcattcatcttttgtcaactcatgctaattcatttctttgattattgttcctaagagatgtgttctttcagatttctctcccttggacatgattatgagatatttacttatttctctagataaatgaatataattagaatgattaatgttttgtatattaaatattgcaatggtagggacttttcccttaacttttctaagcaggaaaaaaaaaacagattcgaaagtcattaagttttttaaaaatcaacttagtattttagaatagttttagatttaaaaaaagttgtaaacatagaacagagtttccatatactccccaagtatgttttttctgttgttaacatcttacattattatagtatgcttgcctcaattaatgaaccaatattgatacattaccattaactaaatcacacattttgcttagttttctgtcatttttacctatgtcctttttctgtttcaaggtcccattcaacatgccatattgcatttgtttgtcattatctctttacactccttttgtctgtgacagtttctcagactttccttgtgtttgatgacttaatacagtgttaaggagtgctggtcagatattttgcagaacgtcccccaagagggacttgtctaatatttttctcacgattaaactgaagttaagggttctgaggagaaagaccatggaggtggaggaccattcttatcacatcacatcatctcatgatatttcctatcaacataactcatcattgctgatggatgtttccctcgatcacctggctgaggtaatgtttgtcacgtttctccactgtaaagatattccccctcctctaaccttttcatgttgaactttttggaaggacgtcactaagcacaatccacacttagggagtgggggtttatgctccacctccttgaggacaaagactgtaaagtatgtggaatccttctacacaggaggcttgcctactctcccccctttacttattttatgcaatcatttatttatatctgtatgaactcatggacatttatattttggattataatccaaaactactttattttttgctcaaattattccagctttggccattgggagctgtttcagttggttcctttatccttctgatacaccccatcattgtgtttctgtgtgtggtggggcgggggtggagttggataattctttacttttcagcactgtgttttgtatatttaacatgtgtattttctgcccctgtcctagtatcaatcatttctcaaggagctctgattcctttaagtggagaatagtagaaattaagatctgggtgctagaggtgctcactgctactaggtattacctctagaccctgtcagctgacaagacaaagagagatatgtgtttttcattcagttttgatggaggtcaacctcaggcttactgggatttcctacattccttgtctagaataaaagactttttcttcttatatgagttatgttgacagttgtggaaacctacaagaggataaagaatcaccaattctgaaaaatgaatgtgggagctttgtcccagaggctgacatcattcgtcagaggtataggtggccctatgttaattaaagacagtgtgaaaagtctgatctcttactatacatatatatgcatacccactataaatatatatatatgctttcagatgtgtgtgtacacacacacacacacacatatgctttctaataaaagttaggaggtttgaattgtattccatatttttcattttgacaattgagtactgctatagtttccccagggtttcttcaccattgactttcctcttcattttgttgtttttattactgaccctcatgatgatccacttgtgtggggtaactgagactgaaactcctcaaccatgaaaatagaacagtagagcacattttctattgtaccattttgagccacttcagtaattggacttcatggaagagagtaagaacaatagctatttatatcaggaggtaagcccaagaaccaaagagagatcaggaagaatgaacactgatgtgccagtcagcaggactgaaacatctgggtgactaccagcctcagcattttgcatttttctgctattactaaaattggcaaccaaggaccctattcagccttaattgattctgcagctgcatcaaacaaagtcattccataaaatttatctcacttcacaaccttagagccagcttttaatgcatatgaaagttctatgccaccaggcagccttcttcatcgacacagtgggaaattcctctaataaaccacagagcacagagcctgtagtgggcatcttgaacctgttcttcagagagagctctagaggcccaaagtcctctgtagacgattctatgttaagagttgaactagaaagttagaattgagaaaataacatgaataagtgcacacatcttgacaatgctctcttatggaaaataaataaatgggcaagctctaaggaattctgaaattgtgttacattttaaagttaggtcactgtacagagaaatattgagctctttctttacaaaaggaatcctgaagaatttacaattctcttacataaaattatataatttagggtcagtgtcaatgtaaaatcagactttgtagctaattccatgcacagaaagggaagataaagtcctgggtggtaaatgagagaaaaggtagaaaaatagcaaagtatcattataaatatttaagatgttgtatctattaaaaataaaatgtttaattcaacaaatatttattaaatatcaaattaggctgctggtactgtggcatgctttaaggatacaaacattaatgaaatggactctgccttgaatgacatgataatctggtatgattgtaagaagtatggtaagtattgttaataagggtatattatcagaacactcagaaatgccattctacctctaaattgaattccaatgagccaatggtagttagccaagaggagtaaagaatggaccttccaggcacaaagagtaagatgagcagaggctaaaggtgagagagaatgtgatgaatctgaaaaacttcaagtaactttaatagcatttaaataggtatgtgacatatgacaggagaatttgcaagaaataaggtcatagaagtaagcttgaagtcatattagcaaattagtgccttgccctcaaggcaatggagaatattaaaggggtttatgcagggtagtggcatgatagtaatcaaaacttagaacatcctagccacaggatggagaacgttgtcagggaacatcaaacgcaagagatccattagatgactgcttctgaggagctgaactgaggtagtgacagaggggaaggagggaagcagtccagccagagaggcattaaggtaacaggacaacaggtcatggtgggtggattggtgtggggatggaagggacagaaggcttctggcttaagtgtctaagtaaataaatggtggggctcctaactggtacagtgaatgaaggggaaggaggagatctgagggagaaatatgagctcaatttaggacagattgagttgaaatacttatttcatatctaaatgtagatgctagtaggcagttctgggctgcaagtagaggtatagtggatatagtagagatagtgggaatggaaggggaaccttaacagagcacagtttaaaagaattaattttgaaaaaccataagatatttcatagcattttgtattcattgttatgaaatgctcaagctctgaaactatactgcccgattttctggatttgaatactacttgacggtttttattcttgagagataggtacttaccatctttagtctttcgtgtcctctgtaaaatggtaataatagttaagaggattaaaaaaatagtatatgcagtttgctttaaatagtgcctggtatttgtagataaccagtaaatgtgtgtgtgtgtttgtgtgtgtgtgtgtgtgagagagagagagagagagagagagacagacagacagagagagagagaagcagtgtgtgaatgtgtgtgtgtacagatccaactgatttaatactcctcagtaagccggttttccttatagtcaatgtatcagtcgagaaattttagcatatggtatgctggtaaaagctatgtgaggagcataaaacatgcaaagtaaccaggaaactcaccatttacaagggttgcaaaaagagtgtgtaaaactatagtgaataataaaacattctcccagtcttccctcagcttcagccatttggacctcccttggctcatccaatatctccatgatctcccttttcttaggtatgggccttaggatgttcacccctgtttcctaaaatttttgctaaccctttacacttggtcaatttccaccatccatatctcagcttaaacatcactttctctgaccccagattacattagttcccctgttaggttttccatagcatcctattctctctcaaagcacttttgttttcatagttattcaagaactctagagaaggaaaaaaaaatcagtgggaacaagagtgaccaggaaaatctttcaagagcagagcccttcaaaggacatacacacttatggacagattaggaacacttcccagagattgtagaagtgattaattagagccagcaggttttgttgatctgtgattccaatggacagcagcctttttaaatattggacaatgtgctgaagagctgaatgcagttgtgtgaccctatggtaaagtgagatcacaatgtacctcaagagtgattaaagtttgcatgtggagtgagtgtttgcattccaaagacctgatgctgggaatgctcttgtgcatgaccaaacagaagcaagtgtgtgcggaaaataaaagcatttcaaatgaatagcaatagtcaggtcctagatactttctaaaaagatgcttcagttttctaaagggtggggcaaacttgtagatggaaagtttacccaagtgcttataagggtgctttattatacctctcctctagctattgagtttgggtgctgttgatatttgtacaatttaccttttgcattttagttaaatcaaaagatgccccctttggagactttaaataagtataatactatgataacctcattcatggttaaacataatttttattatgacaaatggatttaacttgaattgatactaggaaggccatatctgttactgattaaattatttttttccttatcattgctcaggttattactataaactttcatttgtctttggagcatgaggggcaaacattttcttgcatccttgctatgttccaggaaatatgctattcaccatgcacatgccattttatttactgttcaaaaaatagtgatgaggtattattatctcaattttacagataaagctcacatcttttcttaaataatatagtatttatactggaaagattaactatttcaagtaaaaaatgacttagtagaccatgaatcaatagaatccatgaatcaacagaagaaaacaagaaacagcaccagagtgagttgaacatgtgggctacatgttcctactcaactcagagaaattctgcaagtacagaactcctgctcctttatgttcatggttgtatcctgagtatttagaaccacgtctggcacagagtagactctcagtacatatttgctaaatgaatggatgaaaattcgaaagctgagtagaagcctattgaaatgtatttcagtgagcataagagaggatagaaacaccaatgacatcaggacatatactacataccccccaatcagaagaagaatgtgcaatatgcttttctagtaaatattacaaaattggcaaaaatacaacttatattagtgagagggggctacgtttatccagatatcattgggaacctgctcctttaaaagtaacacaggatatagtcttactttaccttgtagaaaattcatctctcagaagtttgaacgaataagaataagtaaacttaattttggattattaactttggatcttgacaataatcaaacaaatgataaacataatccaataataaacacaaaccaataaaattttaactttccacacaataagaagacatcagatcttttataaagaaatgaagttttataatgttatgcgatgagataatatttaaaaagaacatgcagagaagattacaggaatagtgaccaagccagtatggccaaatataaacaaaaagtcatgatgtgagtctacgtttgttccaccttgtgttggcacgtaatagatactttgaaagatctgttgttatattacttaatcctatgtttgggaaaatattaaagccgagcagagaaagttctttacctatgtttagaattagaataataaagaatggccaggtatcctgcatgaagtagtcatgcactaatattagcagacggcaaaatgcagacgccttttgtttccatccctcctgaaatgaagcatattcaaactagaaaagtcaaaggaacatgaaggatttgaaaaccgagatggattaaagactatctcactcttttaaatgagtccaagtttgcagcctcagtcatattacatatctggtcattaaaacatagggactactcctggtgatcttcaagaaataatggacatttgaaagctgccaagttagataaatacctttatttcccgaaaacagatgaaagatctgccttaaacctatggaataacaaatttaataccaatccccgctgaaattctagaaggtcatgtggtttatgaatacttaggagagaagagccatttaacaataaactcattctatataaaattagaaatgtaaagcaatgcattttctttattttcttttatgatgaacttagtagtttggtagacattctatgagttgggcatttttttctccaattacattttgggcaaagagaagtaagtcataaatgaaagaaaacctggctcaacactcacaggacagatttgagataccatactcacctgaggactaagcatttctgcaatgtgcttgagtatttgtggagaaatgtgtcctaaatttatgatctcagtaaattctgaatattcattagggttttacattttctcaaatgtaggtgtactctaaagagaaccctataaaaattaaggactggtttcaggggaagtgagagagggttgtgtttgaagaagttgtaaatatatatatatatatatatatatatatgtatatgtattatgtattatattcttcatcatattcaggagtgacactcttcatctggtaaaggattgaattgatcagtgtatgaaacctgggatgcccatgagtctagaaactctcatgggcacccaagataacttaactgaagaatacatcatttaattgaatttattaaagatgtctgataggttcaagtagaaacatagaagcttgaagtctaatttactagatctccagatggtattattttacattatctttccatgtgcactttagattcagtgtttgcaaatttattctttatgattcattaattcagcccataaaccaataaaatataatccataagattaaattatgaatatccaaagaaatatatataattatgttaatatccagtcttctgaataatcccactgacctttgttctccaaattattttcttttacccctaccaactgaaattgtaagaatttcaagtttagtcatgttcacttatcattctccttcattacaacaaatgaatcaatcatataaaatatttttgaaaaattcatttctccctttctgtaagggattttctttgaaaatctcctgagactgatgtaaatttacaactactatattttctaagcaacagttcttttcttctcaggattattcatccctttttaaacatgaatatgtccttaatatatgctatgtactggaaataatcacaactattgtaattctattgttaattttgacactgcaatttaacatgttaaataaaacaatgaatgtatgtcatttgttactttaataagtgtacttggtttttaagaaatcctgttatgaacattttgcaaggaaaagagcagagtatgagactagccctacaaaagaggaagatcacataatttttaaattgtagtaattgtgggggtggctaccaccagactgacactcaaggctacctgaatttgtacagtgatgctattggtgtcatgctcagatgttatttccctggcctgtgcaccatcctcagccaaatttcctgtgaattagaacttcctttctcaggaggttaaataatcatgtaacaggttgcaaaatttcctaattgacactcagatctgcaaataatacatttgatttagattttatcttctttacaatggcttcatcctaaagggcaaagaagggagttatttattgtagtctaaaaatcaaagcaataattttaggaaactcagtctctgtgaatgactctgttttttatattttctccccaccctttttcttctatctaaaatggcatttcaaaatctgggaggtgctgtggatattgccttgtcacagtagaggtagactagagtcttagatccaaatatttttccctcaagtattactgtgagacctttaaattaatccctatgggtatgctactaatgtgtaagaaacatcccaaaatgtagtagcttaaagcaaaaatcacttgttatttttatgagttcttgggtcctgctgaacagagctttgccatcctgtattggtatctgacacaggaggaaaaatagtaatatttgccttgcctttatttaaaattttgatattttgttaatcatggatgacttgttgcattaatttttatttttatgaatttctaccttaaaatattgtttattcttatttctgagtttgtgggtgaccccttaaattttgcaagtgcctcatttgtctcaccttggtcctggtcctgtcgctgaggcttgggcttgctcttatttctgtggccagctgacaggtcagctgggatctggcttgtttaggatggtttcaagatgaccctaggatgacgtggctctgctctatgcaatctctcatatacatgtagctcctgtatcttcccagcaagctaaacaagcatattctcatcctaacctggacatgttatcttgaagaacacagagaagcaaaaaagaaagcaaagatatgcaaactctttttcaaacctctgctttgccagtgaactgtggccaaaccaatacacaaggacagaatcagtatgagaggggactacaaagttacaagacaaaagacagggatatcgggatgccttaattagaaccctaatgcagtcaatctaagatactctctaagccttgacttcctcaaatgtaaaatgagaatactactagaacccactacttaacattgctgggcgcacttaatgaaatattacgtaaagctcttagtataattcctggcatgtggtaagttttcaataaaactattattttattgtgtatgtaaatatatgttaaactctgaaataatgttttgaacaacagagaacagaattatcccttagtatgggaaaagaacatactatgcctctattttcttatctacatgaaaaagtaataaatgtacaagatcaacatgttagatttaaaaatataggataaacgtacaggaaaatgttcatcagagtgcctctcattacacaagcactcagtgttaattgaaattgagcctaaatttctttatcaataagtacatgtcacttatcaaagttacattctagagaaaataaaagagtaagaatataacccataggagaagccttgacctatctaagatgacattgtctcaagagcatcttattggtttaactatgggcaaggatgcctataaactacatttagtttaaggaagtaaggggtgtgtgtgtgtgtgtgtgtgtgtgtgtgtgtgtgtgtgtgtgcgcgtgcgcgcgcatgtgcctacacaaatgagaccctaagaaatatcatttctggtgcttctcagattgctgagctccttgcctctatatgacctaattgataaagttagctgaaggatatgactggctggatctgctggtagaggttttctattattattctgtttctactttcttgcagtagtagctctaaaatatataagccacacaagacaggcaattactattaaatttaagaaagatgattgttacaatatacactgtgggtaaacgtttgaagagtaaagtaagaggtactatttgcatataaaagctctatgcaaattcctgagattccacagatttaaagagaactaagatctaaatgaataaaattcttgagaatggaaattatccagtgagtcctatcaccatttggaacatcactcccagctgagtgcttcactcaggaaggagaccattgtctttgcatgaattttcaaatgctctttctttgaaaaccaaatatttccaaatttacttaattacagtttcatattgggaaaaattcataacaaacataaagtttaaaaaacgtgagttccactcttaaatgtaagctgtacataatgacttcctttcaaagagtaaagtttgaagggagtggtggagaccaccttcacagtggaaaacctgacaaacactacctcagccaggtgatcaaagataagatgaggaatgatgagtcatgttgataatatgtaacattgatttgatgtgatgtgatgtgttaaaaatggtggctccaccattgaggtcttccgccccaaaactcataacctcagtctaatcatgagaaaaacattaagtctctctggtcagacaatacctgaccagcagtccttaacactgtgaaagtcatcaaagacaaagaaactgtcgcagacaagaagatcttaaaaagacatgacaaccaaatgtaatgtagtatcctggatggaaccttggaacagaaaaaggccattaggtaaaaactaaggaaatctgagtaaaatatggatgttagttaacagtaatgtatcattattgctttgctcagcattacaaaggtactgtatttatgtaagatgctaataatgggggaaactgggtgtgaaatataaggaactctctgcattatctttacaaattttctgtgaatcttaaattagtctaaaattaaaaggttatttttaaaaacctaatctaacttactgctttgttaagaacttagagcttttttaaaaaacagaggaaatgtctttttataaaaatatgtacaattttatattcaataatcatgttgtttttctattcaaggaccattttcaaaaactttagcccaaacaccagtttacagggaaaagttagagataactaaaaacagttgctttaacaattaacactgaaagctgaaatactttataactgcattgttattccacaataccttgaacaaaatctcaaacatttttgtaattcaaaggatcttagattagactgtttctttgtaagaaaaacaaatccttagatttactcatatatataatgcggatgtttatggactacaatgagaaattaaacaaaaatgttggtttttacattttttaaaaaatttgtttttgctctgataaacccaaaactgcatatgaagcaatagaattaaacctataaatattttgggggagtttccttcagccatgtagcttaaattaaataactatcaatataaataattttgatttttagtttttattttttgtactcagaacccatttagatttataaaacaaaaaaaataaagaatgtgtgctcataagtagaaaaatttgaaacttgtttaatcatccttgagctcagttatagcaagcaaatggccacatgctgttttactatattttctttgataataaaatgtgtgcctgatggatgattttaagtaactatctggttgctaggtcatgtactcatggcttttacctattaataaataaataaatgcataaataaataaataaattgcagaaataaatgaagtattagagtaagtcttcacttgatgttgttgataggtatttggaaactgtgactttaagcaaaatgatgtacagcaggtccttgaataatgtcattttgttcaatgttttgttgtaacattgttgagaaaaaaataaaaatggcttggttatatgttttttcgcttaaagtagcaatttccaagacccttttgacaacattgagaacttattgtaaatcaaatctaagtaagcctttgtgtactagaaatgttctaattactgtgactacctgtgtttatcttaagagtgaagttttctaaagacaagaaccatctcatgcatgcaatagattctctgctgtcaatggaaaataaaacttaagcgaaaggacatttatatttagtaattcaataattgttacaatgatcatagttataacaatagaaataacatttattgagtgcttggcatatgattataatttggtaaaacatccattatattgtagactccaagaagacagaaatttaacctaaaacattggctcataataggtacttagtaagcatttgtcaaataaatcaatgccagaccttgattacggcaaatccatgaggcaggagtcgtatgctgggcatattagcaaaagaggcatgagagctgttaataaactttttcacagttaagaaatggcaaagtagattttcaaatccaagacttgagtctgcgcccttaccacactccagcattgccatgtccctttcatgccaggagatagtaggatataattaatgaaacaaaaccagtaattttgacattaccagctttttttctgtcgtaataaccaacggaaaataacaaatacccttgcagtaatgattaacgatcagtgagaagaactagacaagggcttttgccgacatctgcaccaatagaggacaccctacacctatgtgaacaggtgaaatggtaagggtagaggcgagtcaaggttaattcttacaccaaggctgagatgatggaaatgaaatgaaaaaagaaattgtattacttgaaactttgccatgtgcaagaaccctggaggtgatcgtgctctttcatccataaacttgatgtttatttagctgacagcaaagatagcataaataataggtaagtagtggacgaaatgttcccaactgttttttctccatcttttgtcatatttctagataatgccttctacagaacacttaatgttgaaacagtgaacaaaaagcaattttcccacaactgaggcatctctgttcttgatcagtaaatatcaaaattagtagatggcagaattgcatggagagaacagactgtcttgaagaaatatgtagaacaaattatgctagtacttggaaattttgcagcagacttgcaacactgtatcattgcttgttttctggatctatttagtaaaaaaaaaaaaatcaagtgtttcaaagtagggtgcacaaaaaattatgatgctaagtatctttctgctagcacgattacctccctccctgacttgatgctcacttcactgatagttcaattttcatatgaatttgtaagttgtgacttttctattaagtgcagaaattgccttctggaaatctcatggtctcagtgatattttaactaaaaccccactgagtcatgagcctaaattttattgtcagttgatatgttttgtgaatgataagatagtacatatattgcatattgtgcgtaatatttcttgtacctccatttatcttgtacctcttgccttctgtatttgttttctagggctgttgtagcaaattaccacaaactgggtagctaaaagcaacagaaatttgttttttcatagtactgcaggctagaagtctgaaatcaaggtgtgtctgcagagtttgttctttctggagacccgaggaagaatctattccttgcctctctcctagcttccggtggttgccagtaattcttgacattccttgaattccagctgcattgcctcggtcttcacaatatgttttccctgtgtgtatctctgtgtccgtgtcttcacaaggctctcttaaaaggacatcagtcaatgaactcagcacattctcatctggtatgacctcatcttcatttgattacatctgcaaagactctatcttcaaataaggttacattcagaggtaccaggaattaggactccagcataccttttaggaagagacagttcaactcacaacatgttggtcaggaaacctcacttagtagaaataatcaaggtgatttttatattctggaatagttagtgttcatttgtggagtcctgctcttcacatttagcaagaagatcaaatctaaacgaagccaggtaaacattagtaggcctagaaaaggtggtagtaaaccccatggtaccagaactctcttttgttaagcagtcagccagtgaggtgattggattgatgagggaagagacatgacaagcacttggagggctggcatgctgacaaaaaaaatgtaccaagataatagtagggaaaaatatatacccaggagcttatagtcatggaattttgtggattgttctaagttgattgttaccacagtttgccaacatgccatcatttttgtaagtagaatttttgaaaaccatgtgcaattactgaaacataagtattttatgtaatgctacacacattgaaattacaaagggaagaaaatttgtggttcaccaaaaaggaatcttttactgctagatgagacagcagttttgagcaccttaggaacattttccaaatttttgttcgtttttctcagagagcaaggtatggcttgtagaggcaaacattagaaatataaaggtcagtgataggtaagcatgagttaaattaattaatgaaaagaaaaaaacctttcttaatgaaagattatgttcatgtgttagttctgtgggcataagctgtgcagtcctcatttacaactcataaaagctacagtgacaggtgctgtagaaaggggatgatagattagctgttgctcatgcgagcaatgaagcagcaagagagagcacattagaccaagcgagcagccagaaacagcaataaaatcattactaaaagagatgatacggttaacatgggaatatatatctttctggcactggcattgtatttactggtgtactacacattcaaatagattgttcaaaagattcatttctggattgagataagaaaaaagaaatttatcaggtcttagactagatctctttcttgtctctcagtgttgctgacataacttgattttcatttcctagtgcagtttagatgcccttccttctatctataatactgccacatagttagagccagtgtctttttttttcctttgatgccatgaattttgccacttaagttgttattccatcatataaaacaagacaaatgatgtcctgtatattattctaccatcaacctcttgaaagataatgcagcatagttatgtaacaggaatttgatactcggtttcttgctcaggggaaaattgtctctttaatgattgtttccttggttaaaattattgatataagatcattgacatttttgagttgtaaaattctccaaaagtcccatgtaaaaacctatatttaatgaaaaataagctacaaatttgtttcatagtaacttaactttatgattatgagtctgtgcttacatccaagttccatcaattagccataaatgtttcctgaggcacagcactgttttttactctgtaaaacgagcacagtagtgtagtgcttatttatatcttgttgtggaggttaaatgaaataattggaaataattgatgtagaacatacagcacaatatttgtatagtgactactcagtaactttcaacccaaaaagaaaaataaaatatttccaaaataagtgttttcagaataactcctatagatttttttagaaaatgccactacccttttcattaaacgtaagattattttaaaatagagttttctatgtgatcttttggaaatacaaaaaaaatataatttgggactcaaaacaaggaagactgctccttgactatgttttttgtcactggattgtttgagcaaaggcaggcagccacctgttggactcctgcatggaaaaaaagtgaactaagtgacctctacttcctcaaggctctatcctgtatttccatggaaaccgggcatatcattttgtttcttatcatgtctttgccttcagaaaattcccactatgcaggcaattgtaatactaccccattttgtgttttgttttttattcttttaaattgtggttgcaaactcagagcagagagttaaaataaaagatcctcgctcatccaaaagtcctagacatcatctatttcaggcagtttaggcagtccccttggtaataccctaacctctaaaagcacatcacactggtaacagatctagaatgtagcacttgaggatgatatccagacttggagaagcggcaggctaacaatgaagcttaaactctctgcttatctggagaggaaaccaagaacatttcagcactcatcccttatcctcagttcccaccttgctctgccttcctgccaatgtagaacaaagagaataaaaaaaatgctcccttgaaatttgtaatgaaactgattgatcattttgtttgtttgttttttctcctcttaggcatagaattatatagaagggagaaagctcagggtcctcatagtacagatagaaaattgacaatttaaggaatgcaagtgaattactcaacatcagataatttaaaaatagggtccttgccagaacccagttttcatatcttgatcttgcccaggccttgctgccgctcagtacaaaaagattatgcccatcatctccttcctaagttcctacgaccatttttattttcctatgatagtatagcgagtgaatccattcccttctatcagttataagcttaatttcaccagaacacatactaatgagaagatacagaatctcctttagttaacgcaagaaatgcctttgctgatctaacctgtctaagctatatctctgcattttacctttctttaggttaagtagtatggctaccttggtctcagctgttcatcctttccctccttcagtctcatagccactctttcaggattccatagactgggaatattactacttagctgtcttacctatcttcctatggcccctagctcctgttacctaccattgaaacaggctttattcttctaagaagcaaactactgtcttgtgattatttggggcctaccagacactatcctctctcagaagaagccactatttgggtaacacacagccttttctcgattgagttctcgtctatgagtccacaaagactcacaagcttaggggaagtttatacatcatcaagaaaatactggttggactcatcctggaaacttagaagggaaaactcttgggacactgaccttccactttttgaatatttccaaattatatgaaaaatttgaaagtgtttgcattttccacttaaagagagaaaaagtcttgaattttatttaatgtattaagctttggtttgaagatcctgatgctgtaagcataactggaaacacaaactttgaagccaaacttctttctccactctgtgtttgtgaaaactatctttaggtttgttgttgttgtgtttttgttttttgttttttgttttttgcttttttttttttttttttgagacggagtctcgctctgtcgcccaggctggaatgcagtggcctgatctcagctcactgaaagctccgcctcccaggttcacaccattctcctgcctcagcctcccgagtagctgggactataggtgcctgccaccacgtctggctaattttgtttgtatttttagtagagacagggcttcaccgtgttagccaggatggtctcgctctcctgaccccgtgatctgcccacctcggcctcccaaagtgctgggattacaggtgtgagccaccgctcctggcctaggtttgttatttaggcgtcaatgtttgtttatacttaaccatctatttattatctgatatgtgctggacactaggctaggtgtttgatttactgaatccttacagtaattctgcaagaaagacactaccatccccattttatagatatttttttaaattgagactcaaagttgctacacagttttccaaaatggaatagtaaattaaatagctgggatttaaaaacaagtctgagattaaaacccatgccctttttactgtcatgctacaaacactttttttttttttgtctttgctttgcagactgccccccatgctttttttttttttttttttcttaaaatatttcttgctgtttgtgatagttggatgccagcttggcccatctgctgctatttttccagaatttcaaaggactacttttctattcaaagacatacttcatcatttccttaaaacatttattgtgctcacctggcagtgatcactctactatggccaccttgccgcaaaatgaattctgatgagctaagcatgtggacataaggatgtcagcaggatcccatgcaattgtgtggataatggatactgacatccatcctctctacacatgctcttctcggcagagttcttgatgcagcaagtgctgctttgctgctagcacagtggctgcagtccaaaactctagtggtagactgaatgacagtgcaggtattttgggaaactcttacacctcaactagctgagaatatagatgatcaagtatttgagaggattatgtgaaagctttacgtgtgttgataatttcactttggtgtaaaaaacttgcggatggtcctgtaaaatcagctctcccatatggattcatgattatagcaagaaagttgaaggcagacactatgcaccaggaaaaccttatttccagctgaagatgtttactttcagtactaaaaactattattattctgcttcctagagagtagtttgtttgtttttgttttttttttgagacagagtctcactctgtcgcccaggctgctggagtgcaatggcgcaatttcagctcactgcaacctccacctcctgggttcaagcaattcttatgcctcggcctcccaagtagctgggattacaggtgcctgccaccacgcccggctaatttttgtatttttagtagagaagacatttcaccatattggccaggctggtctcaaactcctgatcttgtgatctgccctcctcggcctcccaaagtgctgggattacaggcgtgagccaccatgcctggccctagagagtagatttctgaggttctgatgtatacagacaaggaaaattgagataggacatctatttggaatttgaaaaattcaactatagcatgaaaatgccaaggcaaggctaaaagtataacgaatagtggcaatatccatgcaaagattataaaagtatcataagtaatttctctaatatattcacctgtgttatctgcaagcacctttagcaataattggaaaggcagtcttactggtgagttaatcaaatgtggtcagtcagtctacagaatagaagtgatgcctgctctcccagggtttctttgatcaaggctggaggagcagagattcatctgtcatgagctacgttgacgagaagaaattgtttgtggctaaactgctatataatttttttaaaaaatcatgaattatggtttaagttgtcagagaatttaaagttctatatcctctgtcccaagtagcactcagtgtcatttttagaaaatgtggtcattaccttccctgatctcatcctcaagcgtcaggattctgacattgacccatttacgttagaacaagaagggacttgagaaatgggtgggtgcactccttcactttatggaagaaaacatgaagtccagatgaatgattataggcagatctagaaataaaacctccaattctcatttatcattccttttatttaaaaaactaggagggcatttttactggaaatcaccaaattaccatagtctaaaaatgcaagtggaatttattaagggacccctgggtgcacagcactatattcacttgtaaggaaaatggatgaaaaaggttgggtcatcatggcccttctgcttaaggaccttattctatactcaaggtagatgtagataatttacagtcatatacaagttaaaaattgataacgtaagattaaaggccaaaaacagtaagaatgactgggccactgagagacttttgtcacttggttaagaatgctagaagtcacaatgaattctttattgatgtgtgtttttaacccacaagtagagtgtttgacaattatgcagctaattatttagtgggtagtggggaactagaaagatctgaagtggctacaagctgagataacatgcaatggagaacttagtagcgggcaagcagaaggaaagggaaattgtttttaactgtggtgaaagaacatggagatggttagtggcatctgtcttcctcatttgattcaaagctttcttttcgttgtttcgtcttgctttgctcagacgtaccaaaacttcatgaatcagtaagcaattttaaaagcataactatgtgctattaagtcaccaacaagttaagtaactgttcaattaatccatatatgtaaggagcaaagactgagagtaaagcagcaggatttttagctccgcctcttctactaacaagttctctgattctaggtaagtcacctctcaggttctcaatttttccaagatggaaggaattaactagatgatcacaaaagcctttttttaaaaccaacttacctccatctttctgacttgagaagcaagagaaaaggagttaatattagtcagatgctgaaaatatgtaaggggaggaaatgatgtcccctctaaaatctcctttcccagtttttgatcactgatttaggattacatggaaaaacattattggccagtaaatgcaaataaaagtattgagtggaagatatccagagatgaagctaaaatcttacataatgaacagaattatattgagattctatcatcagtgtacaatatttaaggaagttttgattagtggacacacatgtttaataaaatggtgacagtgacatcattcttgtgagaaggaaaagttagcgtcagccatgtccagactctcatgttactgactgagcctattatgctgagttgcatccttattagcttactcagccactccagggagtctcacacatgaagggccactggcactaagctgccaacttggaaaggacttgacagattcaattctctgatgagtgaaatcatatttgttttggtcattctcctttcatttaactgagaacatttccacttttcttagaatcttaatcctcctcattgtcagtttccctgtttttcttgtggtcacattggttttactgtcaaactattattttttagtcgtttattttaaggcaattctacagcaaataaatgaaattttgaaagtcagcttgctttaggtgaagaaggaaaccaaaggtttcaaatagattagagaaatgtatctcatatcatttatgttctttactaaagagagaaagtaaatacagccctttcagtgctatttaaaatattgtcatcctttgccttacccttcatctctcaactctgtccaatggggtcccttaaggatggggagcaaattaccctgctaagtgttatattgaagtgtttactgaacacattagaaaatgtttaggtaggcctgtaagtgcttgcttatataagttcagtcaccaggaataatttcactgtcactgccgtttcattcttctaatttcagttcatttttttcgtgcctccctggtgaaataattagaaaggttacaaagcaagttggagatataaatcaaatgtatagtggggtgctatcacccactcctttgtaatctgtcttttcttatcacacattcctggagattgttctctcacaaattatcaataactctatgtcaatcacctttgctcagatttccttctgaagaacttctttccttaccaagtgacatggttcaaccccttcagactctccatcttagccccacggcatcatgcagaccaagttttcccccattgactctgattctctgagtctttattctttcctgccattctcttcttgcctaaacacaggcattgtcaaatcttttgcctttgggcaatatttcttttctgttttcccttccactggaagctcttccactgtgatcaaactctcatctttatgtagatgaccccaaatattcatgtttcccaaaatctccactgaccaacaattctctttcaaccacctgcttaacaaattcatcagtctgttctattgacattttaaaatgtagttcatcatcttcaagccaactgcttgctcccctttccttctttcttttactagttctgctattttccctgtcatctgaagttgaatggttacttttgaactgtctttgattcttgtgtatttccacactagccttaaccaattaaaaccatgctgtaaggaatattctgcgatatacattcgtttctatttaaatatatggtcaatatatttttaaaatatattttagtggttgtatagtgttctagtatggcacttcctttaatctcttgttggtatatattacatggtttccagacattttttaattaaaagcaatgctacaattaggtcatcattgatatatgtatttgaaattgctgcatctaaagctattaagagttaaattgtgagcatactctcaaattaagcctcaaaatgtacaaatttgctcttgttccaacagtgcatttgttatatatacattctctggtaatttaaaatatcattttgtgtcccaacatatatgatgattttttaattgttttggacttgcggtatatttccattgatctttactaagattttcaccagtgccatacaatcttatttactgaattttatagcattttgatatccacttaggcatatcccctcctattagtctttctttccaaaagcttcatggctattctcacacttctattctcccaataaaagttgggcatttctaagactgtataagttctcctgcacttacaactaccaattaatatttgtatttacctgtattaaatttacatattttggacatcattacaaaatgaaatctctccatttggaaacaagatatttatctctccaattattttacttgttttaacatccctgaataatatgtataattttcttcatttcggccttggacacttaacagaatcctctctagcaacatagttgtttacacatatgccatttttattatattttctaactgggtattagtagccagcttttgatattgcctgtttaattttagattaaagattggttgtgtggatctaccactcaaccaaagtgtactatttattcattaattcatttaggcttccatattttgcattataagatttctgtgttattttagtttgagatacaatgcttttcaaaccataagcacaacagaaacaattttcacttcgaaagaaacacatcttcagccaaatcatttacccgaggccttttctcgcacctggtactcaattgaccctcctgtatctgtgcactccatccacctgaaaggcctttccttcactttttcatttcagtctgccaacaatctgtccatccttcaatttctatctcttccaaaactacttttctgataatcttaacatcattttagtttttcctccacagaaacctcctcctacattgacagctccaatagcatttttttgtgtgtgtgcaaatcatttgatgtgaactgttaagactgtatatgaattggaagtgggaactatcattttgtcatctttatatcttctgcagcatgtagtgctgcttcttcatatgttgttgaagagctcaatatatatgcttttattcaatcgaatatatcaagtctggagcctagaatcttagctaaggggtttcattttctattcattgcattgctctgtattaataatggatggactaaagtttggtgggccatccgtcactgatggggtcaacagaacatgggggaattggcttcttatgtgcttataaaacatgctatttcatttcttcctgacgaatagtactgccactttgccctaaacatgcaccatcccacagccccacagaaacaacagaattctgaaaaaaaccgtaactgatctatagaactggagttgtaatttctttcttttctggctgttagaatgtcctactttgggaaaaaaagtgttcattttatttttataatttaattttatattttataggtacataatgttactttatattacagttttaactagcatgtacctttaagttcaattatgaaacttacaaaatccatttatattaaaagctataacagggtgtcatttttcacaaaggctccttattaaatgacttctttactgaaatgactttttcttcctccttagggatggagaagctcagctattttttccattaaagatgagattaacttaaaataaattaaagagaagtattcttttttattattattattatactctaagttttagggtacatgtgcacaatgtgcaggttagttacatatgtatacatgtgccatgctggtgtgctgcacccactaacttgtcatctagcattaggtatatctcccaatgcgatccctcccccctccccccgccccacaacagtccccagagtgtgatgttccccttcctgtgtccatgtgttctcattgttcaattcccacctatgagtgagaatatgcggtgtttggttttttgttcttgcgatagtttactgagaatgatgatttccaatttcatccatgtccctacaaaggacatgaactcatcattttttatggttgcatagtattccatggtgtatatgtgccacataaagaacagacacacaaaatactgacctattcctatgtctaatatttgaaatccctctaccttttgatctgcacttttactcaaaaacagaaagaattttcgatctgaaatgataggcactttgaagtccagaagaaactaaatgccttttaccactctccattgcaatatgtctgcatttataaccacctaaataaaaaaaaaaaaacagtgacacaaaactagtatacaaactactaggcctggactcaagcaaatgcgacatgcagtgttataaaccctggataatgttaaagcctgtgtcttcttaattaaagagtacagtaccattagaaaaaagtttatctgatatctaaagagtatttcaaactggttttatttctcgtaaccttttgttacaaaacagcatcttggctaagacactgaaaaaactaggcatacatctctgtgaagccacacacaatgcctataaagccacagtctttatggtgtgtgaacctcaagtctcagaaagtagttcctattataccatagtattgtggaacttctctgcaaaaaccacagctctcatattagttggacattcactgaggtaggcctagatgcttgggtaccactgagttttctgtttgccaatatgtcatatatattccagtaattcccagttgttgtactgatgtagcctttcttcaggaattttcatttgataatagtgtgaaacatgctaaactaggcactttgaactaattcatagccttatgatattcaggaagctttgataatcctcttgtccccatgggcaatgtctgttcactttgtggcttgctgcttaaccaaacccaaatgaagttatcaacataaaatgccatgagaacatttgttttatcagaagcctttcctaacataaggttactgttcttactcatttgttcttctgttctattagattggcttattgatttttaaaaaacaaatttattttttgtgaaccacttcaaggaggctattcaaacacagtatctgtaaccatttccttaatggcttatgctacttttcctttttctaacaaacattttctccatcttcccctcctcttccttcttcctttttgcaaaatagaggacaagatttagggaagcttttaaaaaatacctgattttggttttagaaaatttttattaagcctcctttcaatgccagggagcaaggcattggtttgttatctatgaaaataatagttggaccacaagtgtgtcatttgattgtcaataataataataataaattattgaatctggttgtgatagacatcttggagagtagttaatatagagtatggttagtgcaatttttgagtttttacaggcttctaaaagggtaaagaggaaaaaagcaagtagcttgccatttgtttatcaaggacttatgccttttaattcaaagataattaattagactttgatttagaaatagattggaaccttaaattatcgttgactattgctgctctcaggcacatttcaaactatcagccacctcatgccttggctcccaagtgagaataaatcacataaagacaacttcaaggataagaaatatttaccattggccaggatgagagacttgggatttgtgggcttaagacccatagtcagctcaggaagcagcatatcttagcctaatgttggtaacacctggatttcagtacatctgactcccacccaaggaggctgctgaatacacagcttttctgtgacaaactttctctaaatcagaataacagtgcttattcatccagaagggaaattattaaaagttgtcacaaggaaaacaaacatttcccaagtgtcctaaatgaaccagaaagcattcaagatagttttactcgttagtccaatttattaatcgttaattgagcacttactgtattcaaggtaatacgcgtactgcttttaggagaaataaatgagtggaactgaaatgttgccatcaaaggggtcgcagttaaatgggagtcatgttttctaagcaattactgtgtgtgacactgttttgtcttttgcatgtgtcaactaatttattctaacaatagtcatatgacatcagtactattgcaattctcattttatagatgagggaactgagacatagacagtccaagaaaattgcaaaggatattaaaaaatttagatccaggattcatgcccaagtttatggctccagaatccacatcacagtctgttctgtctctagagaaagaattataatgggatggtgtctgtgtagaaaacttgaaaggtacagagcagcacataaaagagaataatagatttaaacaaattgagaaagggggtgtggaataggtatttagagaaaataaatatatgggaagttcagacaaaattacattcaattcaataaacccaccaggtctctgtaatttatactaactttgtcgcttttttttactgaaaaaacgatgctctgaaggatttaaggtcacacagctcatatatagcagaatcaggtttcatatcccagactttgtgaattccactcttacatgcttcttcttttggattaaaccttaacttaattattactcccaagaaaggaccaatctgaagtagcaagtataaaaggtaacatgggaaataaaaagaagaagagtattagaagaagtgaggttgaaattaaacagccatatggaaacaaaggacttttaggatgactcagaataagattcaacagcataaaacttaactgttttcaatcaaccaactgcagtaacatagaattagaagaaacaagagatgggaaaactctgaccaagtcttggcatagaaggaacaggaatctctagtaagtgagggaaagcatattggtctctgaaggagggaagaaaatgtgcacagaaaagtgaacaatgatttcttatccatggaaggtacccacagatgataagaagaaatgcccacacaggaggctacagaggggagagggcggggcattagttactcattgagtcttacgtcaaaagatttatttactgtaatttagattgtcagcaagaaatagcttgatttaacctttgggaagggaatgttatatgacaaatgttaaaataaatatataaggaagccacaaaattgctgggaggcatttgcagagaaactgttaaacagccacaggacaaaaatggcatattcaatgtaggcatagaagataaagaacattgtgatatgtctgctgaaatggcactctaatatttcagactgtccaaaggaagtttcagatagatttgggtctacatagaaaaattcaagtgtgaagtagagttgtacagaaaacttttttttttctagtgtctgaaatgtggtctcaaagggaggtgtagagaggagagtaacaatgccccgttggttgcagttagaggggcagacaagtaagaaggtgatgggtggggctctgctcccagagaacgaaagtacaagggcactgctgaagaaggaaatgaggccaattgaaatgtgaaatgaaatgttttaaaactgcaggggactacagagaaaaagataaaaattagcaagaattcttccctcatgtatcatacaaatgttagaaaatttcttatgcaggaggtggagagagggaaatccaaacaaatagataccttactcctgagaagaaaacagaaaagttgactgcaaaataatgaaagactattttgaacatgatgtgatgctaaaatgttattgagaatgggaacacccaaaggtgatggtggtaatacagtctagatgagaaaccatgtccctttcccagacctttgttagtttcgggtttcagaaaacaaagaatgctgttgtgagataatggctgagatctgagctcattggaaggagagtcgtctctaccatagactcttctcagtatgctttagtatgacttggagcttcttgtatttgataaagattggatgctgtgcctcctctgggaatcagatcaaaacacagagaacagggtcagaccagagtcctgaactatagctttctctatacctgaccttgaagaaatggaaaagcaaagatcttttttttaaaaaaatcaaactagaaagcgaagtcatctgaaatacttaaggagttcatactataccattagctattataagtgaaatgggaaggaaattgtgtctctggctaatgaaaatgcctaggcaactaattatgaattagtttaaaagtttgcataatgagaaacacttgataaaagtgaagtttcagatattatttgattaatgtgcatagccaaaagagtcttgataaatgttacataaactaagaaaaattttggttagttattaaaagttttggtaattttataacaacacactgccttccattccaaagtaaaatatttccaaatccctaaaagtttctttgtaaaaaaaaaagtttactgaggaaaatatttatttgaataaaaaatgaccctctcactaaatttgctgtccaaatgtatttgggataagtatacatgtgcagatgatgtctagagaattataggatgaatgaaatggacaccctatttgttactatggatagactggaaaccaatcttcctcagcagggagagtagtggtgttcccccgctccacaccagcaaagcaaatggtaggagaccatttcagatttcctcttttcaggctaattttcaaataaaattaatataatcagagatcagtaaaattatttattattttccaatgaaggcttcctatagggagtgtgtatttaggacccattatttgtacagaatggttttcaatgccacaatagtttcaatcaataagatacctgttttgcctctgcaaagtcagtaagacagtcttgagttttaaaggattttaccagctgcttgatcttgggtaagttatttcacctctctaatcctctgtttcctcctctaagttcccatcattccagctgactctaggttgaactttttattgaattccttctgcgtgtcaggcactgttatcccagaggactgttgtgaagattcgaggcgctggcgcatagtacggattcaataggtagctactattaccatggatattgttatagttaagcaattgagacgagtgtcagagtaatgcagacaataaatggaaagttgaggaaagaaagtttggcaattgcataatgaactatggtttgaatatttaggaattacctgtaagaatcagaagtgggaaagttaaagtaactgtgaaaaagtttcagaaatgagaaatccccaatttctttcatcaatttctttcattttattctgtctttgtcctatcaccaccactctcctggaggggagaggaagcaacaacaaccaaacagcaaacaagcttggacgtaagatactcttaactttgtttcagatgaacattcactttaggaaagtcgtgttagcctgcacagcttggcatgataattaaatagaaaatgagaaaggctgcagtggatgtcagctcactcactcatagccttccagccagtctccacagtccccactgggaaatctgtcatgaccctgtcatgctccccagatagatgtttgcttagagaaaaccaaacatctgataagggaagatcagtagaatctggttttatgttccctagggtcaacccagagtgaaatataagaagtaaacatgatttccttaggatttcagctatgatcatttaaaaattttctgtttagcaggattctaaacatacagccccaagtaactggcccgttgtttgtcacacttgtgtcatagcgtgcaggcgtgtaatgaggcttcacagatgtgctgccaaagatgaatgaccaggtggaatgttgggatgaactcttcatgcaacataatttgaactgtactatgaattaagaaaaggaaatagcaagaaatatagcataacttaaaggtgttacctgataaacttcgagctttctcagtatacagatcactctctgggcaataaataatgctaaaggacaattaaatatattagggtgaaaactagatgcatttataaactccaggggatactgaggtattttgtggcttttaatcaagtgtgtctccaaatattctattaagaaaatgtgtaaaaaacagaaaaataagtgagaatctatttggtggaaattctgataacagcatagacatatggtaagacttgagatacagccagaaatcattctctcataaaaaacaataagatgaacatagctagtattttcacatctaaaactatcctaggtcatctctccacacttaattatttcctttgctgtgcagaacctgtttagtttgatgtgattctgtttgtctatttatgcttatgttgcctgtgttttgggggtcaaatccaaaaaagtcattgcccaaatcaatgtcatgtagttttcccctggcagtttacagtttctggttttacatttaagtatttataatccactttgagttgatttttgtatatagtatgagatatttcattcttctgcatgtagctgcatccagttttcccaaaaccatttattgaaatgactgttcttttcccattatgtattcttggcagctttgttgaaaatcaattgaccatacttgcatgggttcacttctgggctatctgttctgttccattcgttgatacctttctttttcttgccagtgccgtgctgtttaattaccacagatttgtagtataatttgaagtcaggtagtgtgatacttttactttgttctttttgtacaatattgccttggctatttggggttctttgtgttttcatgttaactttaggatcgttttttctactcctatgaaaaatgacaataattttgataggaatggtattgaatctgtaaattgctttgaatagtatggacattttaacaatattaattatttaaacccgtgaacgtgggatgtctcaatttatttgtcttcctcagttgtttttgtgaatctttgatagttttcagtatataggtctttcacctttttgattaaatttattcctaagtcttttcttatagctattgtagttaggattcttcccttgatttctcttttggatagttcattgaataaacgtattcattggctagttcctttttggatagtttattctataaatacatttgtatagaaatgctacagatttttgtgtgttgatattgtatcctgcaactttactgtatttgtttattggttctaacagagagtctttactctaaagaccttattattgaaactgcaaacatgtaatatactaacacctgagccctcttaattacactcattgccacctcactaaaagctgtccacagtactagaattattgtctttgcattcttaggacaacctagcttcacaatcctattcatcatcaatgaaaatcatcccccttctaatcaactcaattaaatgtttagcagtcagtagtattcctgcccgatctcttatctccagcaacattactgtcatatctattccccagatatgcccttatacctaaaattcacagctcttgtcataactcatctagaatttacagaggcaatagaacttaaccttataacaaataatctcaaatttgagtccccctcacgtgcacataaagtaggattgccagcaatggactgataattacaaacttccactgtgacaaataattctgtgttttgtttgttgtaaggtaacagaaataagccaagcaccaaaagacaaatactgcatgttctcacatgtggagagagtagaatagtggttatgcaggatgtgggttggggaaaagggcagctgatggtcacatgatgatcacaaggtacaaaatctcagacaggaggaatctgtggtggttttttttttagctctattacccaacgtggtaaatatagttaataatagagtattgtacattccaaattttctaagagactaaatttcaaatgctctcaccacaaccaatgtcaagtatttgaggtgatggatatgttaactagtttaatttaattattccacattgtattaataattcataataccactttgtgccttataaatttacataattatatattatctatttataattaaaaactacagccatcatagatttttactttatttatacaaataacattcaaaaaaacttagagtagattttatgatctttattttacagaataggaaacttcagcttatattaagtaagttgctcaaagccatacagtcaatatgttgcatagttgaaatgtaaacatgactgagtccagagctttcttcctgagcctctaaattctactgccttagtcactaaactttcctgcctgaagtatttttataggaatagaagatcagtaaataaactattttatgatgtggaaattccaggaaatgctaaattttcctctaatggtggaaaatagtcattttgcattactttcataagtttttgagttccctggctctttttcacattatgaaaaaatccccagagtcacatataatataactcatttcggggttgttaatgttatgaaatgttgagttttataaatggaaacaaaagtaatattatcttttgcatataaaacatttctacatagtctatgaaatagaaaagacaatcatattatagttggtcctttttttaaatggcaaaattgagtgagagggctcattgacttccctaatcctaactagctactgaatttcagaccaatgctctgttaaaaagtgatattccaattattattaatcatttaacactgaaaggttttaacaacatagctttttacctggtattaattattattgttgtgttaattgaacccagtacctggcgtagggtgggtgttcagtaaatacttattgtctcaaggagaaaaagaatgtattattaaatgaatttaaataataaatattcctatttagaaatatttaaatactttctctgcttcttttccatgtaataatcttgttttatgtcaaaaaacctaactgagtggagacaattgaactgaaacaactatttgtttattcttctattcttcagttatggagggcagcatttagctattagccgctttcactccttttactttaatcatttccctctcaaaatcataaacatgtttgtaaacaacctgcctaaatactataaaatttctgccacattggataaaaagcagagagaggagttgtaatgttcataatacctcctaccttttcatcagtttaatcactagagcagtgcaagtttatctcatgtcatcactagcttcttagattgaaagtaagattgccagcaatggactgataataacaaccttccactgtgccaaataattccatggtctccaatagtttgttgtgcagtaacagatttttgccagtaatgttatatggccctaaatctaatacattttaaactgtagctcttgtgttatgtcttattgagattctactctaccctttgtgatactgactttttcattatgagtttcatcttgagaacatagctctatacctgatgtcaggagttcgagaccagcctggccaacatggtgaaaccccatctttactaaaaatacaaaaaaaaaaaaaattagctgggcacggtggcaggtgcctgtaatcccagctactcgggaggctgaggcaggagaatcacttgaacctgggaagtggaggttgcagtgagccaagatcatgccgttgcactccagcctgagcaacaagagtgaaactccgtctcagaataaataaataaactgaaacatttaggtgcagtgtgctcattgtaacctacaagccaaactaataaacatggcttcccaattgcttaacaaaagagagagagggactgggggaaaaaaatctgctttattctaaagccattttcagagatgtcagtggaaaaattctccaaaatccttagaaggaagaactgacttcacaagtagtttcttctatgataggagagttcatctaagcttgttttaaataaatcatataagcagatttggagataacatttagattgtcattaaacacatttagctaactcttttttccttttattcagactgagagcaatgatataaattatttaacttcatcagatctccagttaaagatgagttgttcatgtaagtctagactatctaaattatgcccatcataaaggcttactgctttttatatttcctctggtcttgaagccattacagttcattagagagattgtagaatatggtggttagagcatggaatgtgcaggcagacttctttggttcaaaactttgctctgcctctttctagttatttgtccagagacagttctctctgtgtctgtttcctcatctgtaaaatggcagtgctaataataaaatcaccaccttcataagattattgcaaggactaaatgagttaatgcattaaaagtggttttattagtggctagcaataacactcaatgttagctggaattattatcatttgttttatttgctggattttctgataagctgaaatctttttgagtgctgtttctgctctttatccttagtaatgagcacagatcaaggatgtggcaaatgatcaatcactttattaaatgaataaataaatgaatattcatattgttataatgagaatggaaccagtgactgattataaccaccaatagtgtttgataacttccgtcctttctctgtgcgaatttccgcattcagatatgctatcctttcttttagactctcaaaggtcttttctcaaagaccttttcctacaacatatcctccccaaaccaggggaagaagctgattagaaattaattcattcagtaaataattttcagcaccttgtatgtgtataaactagcgctgaaaggcatttaaagaaacatctcaggtttccagtttgtccaaagatctgaagttcctgtggtcataagcagtgaattagagatattgctctttgttgcctcttttcagtattctaaatacagcttggctgtctctggatctatacttcaatgccacagggaaaatcgatagtaataacacaagatgctgagagtaggggttaggtttctccattttctaaactaatcttctaagtctgagactttcctgtgaagtgggaaagtattgaactatccaggattctgattaatgctggcaaagaatacacaaaaataatacacaaaaagatggctgaagagattttgagttattttaatggcatatttaattcagagagtacatgtagaattggcatcctgacattttctttaattttctagccagagtaaagtattgattagacaattttctgctttgagcattaatatatctaaatggaaattttggataataaagagtccaggtttgctcccttcacatgccagataaacatcatattttaatttgcaattataaatttcatttgattatcactagaatgccatatgcttcctatgaatatcataaaatttatctgagtttagtcagttttataactggtgcttctgaaaatcttattctttagaacaacaatgttaagaaaataaatcatctgcaaacttagtcaaaacaggcatgtcatgtgggcaacttgtaaaagatttaaaagtatcagagattttgtatgcaagctgaatcttacggtggaatattcaggtagcattattttacaggatgcagtattcaatttatttctattataacaaaagtaataatatgaatcagcaaatattatgaattagaaagtaaaattactttagtgttgtgaaagtcatccagattttgtgcatctaattaagtctgatgcatgtagtcagggatgaagaaagtccctgaattccaagagatgctgtttcagtcaggataggctagctgcaataacagaaaacacagaattctcagtggctaaagatgacactcatttacactgcacattgaaagcagttcagcttggggcttctgctcatcataatcactaaggacccagcctggcagacttcatcattactcatatttccatgcttcttgcagcataaggaagggaatgtggtgaatcacacactggttcttaaagcttcctgacaaagccaggcacatggccaagcctaactcaaggaggagagagaagtgtagtccaactttatgatgtgcccaaaagaggagcatcaaaatattttaaacagcactaatgacgcagattagccccaaaattgttcttgtcactgtggtcgttaaatgtgactatttgtatctttttcatcataaactgtgttgttatttattaaatcaagatattcctgtgatgtggcccattcttccactttattggctattaacttaattggagcatcaggaccacaattcttaagaatacaattatttccagacaaatgtagtctctgagttcttctaatttctttctttcatgtattttctgaccttatatcaataagattacatgaattaccatcctgagtgagatccatggtcattccagccaaaaatcctatctttaacaaaaaatgagtcacttatattatttctccattgttcttaaagacaaaaatgatagaactattacaagaattgctattttaaaaatacctgattctatttagtgtgcatgaagatgtatactcaccacaaatcaaatatttcttcctcaaatttcaacaaataccaatgaaaattagtattaaatgttttaaaatttaggggttttgtttgtttgtttgtttgtttgtttgttttttgagacggagtctcaccctgtctcccaggctggagtgcaatggtgcaatcttggctcactgcaacctctgcctcccaggttcaagcaattctcctgccttagcctcccgtgtagctgggagtattttccaaaacatttttgaaagtaataataaaaaagtaggtacttaaaaaaaaaaagaaaaaaagaaaacaatgaaactctaatgatttcatttactcaattttgtaattccagatcagaaaatgatgaactttatttttagaatcacagtattttaaagcagttcttcaaagatcatacaactcaacctgatcattttataaatggggaaactgaaacctgagaagtatactaataaacagagagactaaattcttgtctctgtaatattaaattctgtagagggagatattaaacaatttaattgcaataatatatatgatgtacctggaaggtagtaagtactcaataaacattagttgctattattacaattatcgtttgaaggtagtcccctattccaatttttctcccaatatttaattaccaggcattcttaatacgtacatttagctcttgatcaaatagttccagatctatagagcttttcaagacacttagaaagctttcttgttgtgtttctgaaatatgttaggaaaacttaggtatcagtgaccgaccgtaatttgtcatagtttctttccattgaaaaaaaaagaattgtggcttgaccacaataatagttttgattgattttcttatttaatgccacagatttttgcttaaaatatctttcccattgaaatacagacttaaatacaatatattccgtagaaacaccaaatttatgtcacacttaactaacatcaccaaatttcaaaaattaagatactgtgatatttgtttttatcaatgtaatgatacatcctttaaggtttagctttcctacttgtatttaaaattggtagatgtcatttgccaaagaggctggctgataattagatttggaataacacatgacttttgcatcttattatctttattataaattgtcaaagagtataggacatgcataaagaagcagtaatgcaaatgttaggcacaatccattttataaaataaagatccaatatacctgtgaaatataagatgagaagaaataaatttaagataaagtttgcaagataatacctgatgtaatgttctattctctgaaaagaatggtagcattgttatatttcactgcagcaaaggctttcttaagaaaaaaaacagactgcctctggtagtgtttaaaattgtataacattagtttttgaccataaaaaattaatttgtataaattattccagtggaaaccaataaagctgtgaatataatccagaaagagaaagaacagtaaacaacctgttattgttctgagtagaaaaactccctgtttcttattgaaatgttgcaaatgactcacaatactattaaatgtttccttttcattgagtcaatattcaacatttttttgagaataagttgttttcagaaagacatataaactgagagaaaatcataaagggttaataaattatatgaaatttgctatttcagttagatcactaaaacaaaatcgtgactatctatgtctatctctctatatgtatgattttgattctcacattcttaaggactgctaacatacatttacatatgtgtatatgtaagaaatttagatttgtgtaagtatataaataaatatgtatattttgatagggactgccaagttgccctcctaggtggtgaaccaattcacacttttacaaattaatgaagattagtgcccaatttcttggctataaattgtcaaacatagaattttgccattttttatgggagtaaattggtatctgacttctcttagtattactcagatgaaacatattttcctattgtttcaaactatttgtattactttttctataaacacttgatattccttgcccaattttgtggttgttttgttgacttgttagtcctttacttcttcattttgaaaaattctctagattttggggagattaccactttataagtggcaaaagtttttttcttatttttcttttgagtttgattgcattaagtttcttcttgtgaagaaatttatcatttttgtgttgccaagttcattaactattttttgtggtttatagatttctgtgtcaatgttagaaaattactcaagagactctaaagaattctgctaggtttttcataattttgttttcatttttaacatttaaatcgtttatccattttgaatttatcttggttgagtaagtgaggattggattttatttttttcctgagtatcaattgtcccaaaaattgctagttttattttttcccagtgattttctgtgtcattatttttacataataaaatgccatatatatttgagttattttttttttactttctcttgttctgttgttctctttttctgttcataaatgagtcgtgacagtgtgttttaatctgataaggctgctcccctcctcccgttgctcttcttttgcagaagctttttggatattcttatttatattgtcttgacattcaaactttagaaaaaccttgtgtatttatgaaaaataaaatgttactgggattgcttttatttataaattaaattgaaacagtttatgtccttgtgatgttgagtctttctctccaaagaaacagtatgtcatcccacttaccttcatcttctttcatgtttgcaaagatggttttacattcttctttcttttttcttctctttctttgagcatttttgttaagtttatttctctgcatttgattatttgttgctatcatgaattggtcttcatcaggatcttctaacagattattgtttacatgtaatcaaggctattaatttaagtgtgctgctactggcatcttactaaataactttgatggttgtattaaatttgtacttgattttcatgagcttcccaagcatatgagacatcatctgcaaatatagtgatagtttctcctcttctttccaattttaatatctctaattttgtcctcttgtgaattgtaactattcactgagtgaagtgttatttaatagttgatagtgggcatccttgccttgtttccaactttagtgaaaatgcctctattattctcccattgagcctgatactctctctgtgactgaaatagatgtgtttatcaggttatataacttttcattgattactattctgagaattaatttttatttgtcaagaatgcatgttgaatttggtcaaataccattttagtgtcaatggagagaggaatattctttttctctttagactaattaatataataaagtagttgaatagatttaataatattgacctgattttgtgttctaggaataaattccccttggtcatgatatatttttctcgtaatgtgctgacggcttctgattaataaattttattattttaacattgaaatgcatgagttaaaatgttctgtagcatatgtttttctgaaatcattgatgattttagctatacatgtttcaaataggatttggatatacttttttatatgccttggcacattttagtaacactggaattatatatttaaatatttatcctgatctatggcagagggttcctggtgggagttccctcatcggttaaaatgttctgctttcttcatcattttttctttctataccttttctaagctactatactagttctttcattaatacatgatattcagtgagtcagctttgaagatatccatctactgtcaaaggagccaggttgttttacaggttcaccaagttttggctgccacaaaataagaaggcttcctgaaagcactgctgcttggcatacttcttgtagtaaccctgtcaccgtctgctttttgaagctaaactaggtatgtggtagggtgtgtgtgggtagggattgtggttctgctcccactcagttcccccatgcctctcttattaccagcaaggctttaaccccctggatgggccccttgccatgaggaagtgtacttgtgctcttcctccctgggtctgctgcagctgcactctctttgcagggatctcttctaagcttccctcattttccttctgttggctcctataatgaattagtagcagctttggcaaccttttatattttatggtgtcttttttctagtttcattaacaatattttaaatattttaaagatattttaatctatataataaaaacatattttaataataatattttaagacagaactttaacaacccatataaattggcattgatggtctatgactctgacattggtcaatctttttgtagaaataaaaattattaggcctattagtggcctgaaatgcctatcattatgaagtttagtagagaattctttttctatttattgtgctatttatcatacctaaggaatacttcagctaagtaggtatacatttgtttgacaataagcaaatatgatttatttaaatattagattctctttaacacatattgtaggcaatcaataactttttaaagcacttttttattcggcaaaagtacttactatagtacttactataacactcataacatatacagctcctatcacacctttggattatcatatattttactatatctgatttgtttctgattatgtcaagaatacatcattattatgtaaagagagcagcagttgtatcatatttcattccattgacaaatatattcaatgaatataatcattaagtataatttaaaaatgccgcccaaccaatgcatcaagttaaaccggttttacatatttaataattttattctaaggctatatatatatatgtatatacgcatggaatttcaccaagattatgtagaagctttccctaaattccctaaaatttaatctctttaagtaatgaaaatttgtccttgaagaattttctgataacaatttttaaagatttattttactttatttttatgctatcatttcccaaggcgcagtataactatcccctaacaaattgtagtttggttaggcttcaagtttagttttaggtttgcttttcttcttatgcctaataagtaatggaaatatttatctttaaaattttctgtatgtgaagcgcaaagccaagttatggataaaatgaagttaatatttaaattttaaaatacacatttatgacttactctcaaatacagcactgacatttagccatattatatgctagaggaaaatgtatggaaatcttttagaagttattagcaatttagtgcagtgttcaaaagatcagactctgggatcatactacctggacttgaatcttgtctttaccacgtagtagctgttgtgactttaagcaaattattaaagttctgctccttaatttcctcatccataaaacagtctcttccacaatttgttcaaaacaaactgttgtgaggataaagtgagttaatgtaataaagtgcttacaacaatgcctggcagccattataatttcagtacagccccttcagaaaattgttggaagacaagattatgaataactgacctatttgaagtgtagcatagtattcacagatatttaaaagctaaccataagattaaaagaaacaaatggacctgattaaagacttcctatcacaaaggattttttggaagaagggagaaaagatgttccagatatttaacacagagcaaaattatttagctgaaagcattagatttgtcagtgcttcaaagcctccccaaattagcttatttactttcaatattattttaattaatttgtcaaaaagtaatccaaataacatattggatagcattaatgctttggcaagggcataatagcaaagaatagtactgagaggataatatgaaagcctgaagtgcacaagaaaaaaaattccagagccaatcataatatgttctgactgtattaaatcacaatgtttacatagataagagaggggaatgtataactagctcaagacatgctgatatcagatatgaaatgcatctagtgtagataagcagagaatttcatttatattacaagaaactaaacatttattagtcacaattttactaaaatactatgtaaggcttaagttgccacacttccaaaaggacataaaagacctaagaaagctcgaaaaagaggaatgaaaagttaagaaacctttagtaaagaagccctgggaagaaagttaaggattagggtagttagcctaaaaagtagaggccaagatcaatattatcctcccttttagaatatggtgggattttatgaaaatgacactaagtagttattctctttatagaaaagatagctagcttcagctttaagaccactaacttaccaggaaaagctttttgttttgatgaagattttctatccagaaaataaggatattatctcatttaccattgacctctcagaattattatacacataacatgcaatttgcaataaaagtgctaagtagttttgaagtaaaagcactaagggatgttatcattgctgtcattgatagtgttatggaataacagtaattcttagggaaccaacttaattaaagacagaatttcaattagatctaagaacaaacttgctgattatcactgtgataaatgtgaaaatgagattctgtggggaggaataaatgccatcttcattctcagagacctttcaaaacaaaaagaaaaccatcatcctaggttattttaaatagctatctgcataagaaaaagggggcaggtagaacaaaatcctttgagtctttttggcagttctgagataatgtaatcacgaatgcgacctgaagtgacaactactaggaaaagataaaagcctataacaatcattgatcctatgaagagtggagcaggatatttaaccatgtatacaatctgtattagattaggttctccagagaacagaaccaataggagatttcaacaagagagagagagagattgatttactatgaggaattggctcacattattatgaaggatgcagtcagcaagctagagacccaggagagttgctagtgtggttccagtccaaatctgaaggtctgagaaccaggagagccaatggtgtaagttccaattcgagtccaagtttaaagagaagatcaacatcccaactcagaaacagacaggcaagacaaagaatactttcttgttcagccttttattctattcaggtctcaacagattggatgtggttcacacacgttggaggagggtaatttgctttactcagtttaccaattcaaatgttaatttcatccaaaaacgccttcacagatccatccagaaataatgttaaccaactatctgggcaccatgtggcctaggcaagttgatacataaaattaacaatcactaaatctggttttttttaatttagttttcaaaatttattactacttaatagttattaaatccccatagtaggatttcataatattgggtaaagggtgttaaattttaacttgtgttctagaaatgagtgctacttgctaatgttattatttaattgctgcagtattcattgacttgctttataccttggaaacatttttcaagttgatgcatgtaaaaatattgcatgttcaatcatgtttccatttatgtctgttataatcagtgtaaactttcttccaaaatgaaaataacatgaaattaaaaaaaataaaaatctacattcaacatctaatagatttccaatgtcagatttctgacattaattataaataacatctacctctagcaaaatgagtctttgtttactttatgcatttattgaagatttatattttgtcagatttcaaaggatttgagagaatccttagtaagctaagaatcaaggaaacatttaaggataaaagagaactgcattccgaaagcattaattcacttactccattcagaaaatatgtatttaatgtctaccaatcattgtaatgggatcttaggaatatgaaggtgaataaagcatagttcttcccttggagaaactcaaaactctcttactgatccataaacaagtaatttaaagtgctccagtgaatatttgtgtaagggctaatgtatgtgagaaaggcaccaataaatgtgcatataaagtgctatgggacctttgagacaggtattttaggcattcaagacacacatgttcctaaaatagagcttaagtattagacaacagaaacatacagttttaatgcatggaatagaccttcttaattacattcctgctaactccctagataccaaatggctcaagcaaaccaggttgctcactgtttctgtcttactccttactttcctccctcttcatgaaataacatgaatgaaaaaactcactgccttctggggtcagacaaaataggattcaaattacatggatcttgctgagcttcagtttccttactttaaaaatatggatgataatttatctctttgaattttttcgatgacaagaaatagtaagagtaaatgtacttggcatttttaagcattcagtaattggtaattattattattattcagatgctctcatgccatactctgaactgggctaccctatcaccaataccacctcataaaattatttctgcttttgaagctctatatttcatgtcaaacttatttctcatttactctttcttctaatgtgattgatcctctgctacataggaaggttttaaattatatatgtgtgtatatatatgtgtatatatatgtatatatatgtgtatatatatgtatatatatgtgtatatatatgtatatatatatgtgtgtatgtgtgtgtgtgtgtgtgtgtgtgtgtatatatatatatatatatatatatatatatagtaggcttgccagtaaatatattttttaagttaagtaacctcaacttgtctagaaagaacaaaagaaaaaaaaaaaggaaagaaaagctatgtcaagaaaatattgtgatctaccagaagttgcccaaccaattagagacaaaagtatgaggctggagctgggcttcctgatgtttagtatacatgctgttgtctttaggaaagatggttgcttatctttacaaacaaaattggtcctcaatccttcactttcccagtccatgtaaggaattagccaaatgggtaatcagtccagttaattatagaaaacacttattataatatttactagggattactaagtgttctgtgtgtgtgtactcattcagtcttcaaagaatctcataagtgaggtggacattaatactataccctcatttataagtgaggaaactgagtcacagagagtttatgttacattttcaaggtcttgctgataataagtggcagaaccaggattcaaacccagccttgatggctttaaccacccagtatactccctcttatttttcatatattttgatatactcatttaaagcatataaatactaaaatattccataccaattaccaattaagcttatctcattgggaattgttcttcctcaacaaccttggcaggagtgtatctttgtatgatcagtccatgccacttgttcaagtaattctgagaactttctaaatgcaaagaagctcctctgttcatgacaaatattaaaaaaagagcagaaatcttattctacctctgttatcttactttcatttgcatctgatacaggtttgtgagagtcattagacatctttatcaaaaatgtccaatcctctttctgaacctatggtatcattatacttcctgtatcctgatgttggtatggacaccagggttggtttgggcaacgaaacatgagtagcagtcatgtgcgttgcctgtgggagaaagcatgaaaagccagtgcaagattctccacatccccttcccactgcagaagtgatcatagaagcactggttgagctaaagcctgagtcccagaataaccatgaagagcagaggcctggtgcacatcacagtgacacattgagtgagcaaggaataaatacttcttgagttaagcccctgagatgtttgtggttgctaccaaaaccgagctgtttctgtgtctttcaaggatcagttatcattagagatccttcatatggtttatgtttaacgaaaatagtttaattttagaatagttctcaaatcccgtggtattgtttgactcaaattttatgctttgtgagttttcacaatatatgttttctataaatgtaaagcatgaaaatatttcctaggtgttaaaacagcttttagagttctaattagcactgaaattgcctataatttcgcttgtagggatgctccctgagaaatttgaagttattcataattacacatatggtagtgtcattaatgttctgtttttgttattgttgctttgagttgttgtgaatgttttgttcactcttctcttttatttgtagactgctggacataatgtgcctcaacaaagtatttttgaaaatattttagtacaactcttcattaagttttcaactacaacatttccttcccactattatattagctgttcactatagaggttacagataatatgtgtatgtgttcatcacagtctctaaataattgtattttgaccagtccttaggaaacttttccaaggactgtattagtctttgaatcattctagcttggattattcttgaatttcatttttataatgatcaagcccttgattattcaaactcacagaagaaaacagcatggtacataaattcaaaactagaactgatccaagatattaattggctctgaaaattattatgtaacgttttattaaggaagcatcttacatttcagacttacagaaagttacaaaaatatactaagaaattaccatataccctcacctagctttactgaaaggttaacatcttatataacattctttatataacattatataacattccttatataacattatataacagtttccaaaaccaagaaagtagctggccacaatggcacccacctgaagttccagctgttcaggaagctgaggcagaaggactgcttgagccagcctgggccaacatagcaagaaccccctgtttcttataaagctcttcttggccaggcactgtggctcatgcctgtaatcccagcactttgggaggccgaggcgggcggatgacaaggtcaggagttcgagaccagcctggtcaacatggcaataccccgtctctattaaaaatacaaaaatgtggtgagcacctgtaatcccagctactcaggaggctgaggcaggagaatcgcttgaacccaggaggcagaggttgcagtgagccgagatcatgccattgcactccagcctggggtacaagagcaagactccgtctcaaaaaaaaaaaaaaaaaaaaaagcttttcttgaatttaaaaaccagaaaagccagaaaagtaatattgatacactattattaattaatctaaagaacttatttcaattttgtcaattcctgctaatatactttttgggggccaagattcaaactggacagaatacatttagcgtcgtgtctcctgagtctcatttcatctgggacagcttttttttttctctgtctctctttcatgactgacacttttgaaaatagttactctgtatagacagcctctccatttggggctgtctgacattttcctcatgattaaatccaggttatgtattttttataagaatgccagagacgtgatgtcatgcctttctaagtgcattatatcaagagacatgatgttgttatatctcattactgttgatgtgaactttgatcactaaaacaacacactgtcttctagatttctccactacacagttgttcttattcaaccaaagatacttttaaatggtttcacatgccttctctcctacctttctttttttccctctttcccaaatatcatgtgaagtggtgatagtagaaaattagaaagacactaattaagctgatggattcccagtattaattctccaatccattttgtatttttcagactgtaataattaatgactgcactagtgaaaaagcaaaatgtttgactatgactttagagaatattggcatataatcaaaaagcatctgaggtactatttggatatacaagacaaatctaattattttccttgttcagcttataaaaaacaaaacaagcaaaacagcaaacaaaagcaatactctggctctaactgtgaattagcatgaatgactttatgattatacatttttctcatgtaaagaatttttgttttgatgtccctaaatgcttcaaaatatattgcattctgtggttactctgcaaatctaataaacaagaagcctttcccctatgacttccaagataccttccttaattttcaccatggtcacgttaaaacttattgctattgtattcttcacagaacaagcattgtcatttgcaaactttctggaaaatgaattgtcatttgcaaactgttttgacatgtgaaagatggagtacatttttccttataaatctttttcttaggagaattttaggagctgcagaagcagtctacctgtggtaaagcaaggaagatctatatccaaaaatcccatgtttgaatcctggccttacttcctacaaactgctgttatacctctatcagcttttacaaagtagatcatagaatgcaatatattttgaaacattcaacatcatcaaaatataagttctttatgcagaaaatttaggcaaattatttatctttgcctccattttctcatacataaaattgagatgatgatggtatttaactcataccgttttgtgaggataataagttaaatcacgtaaagtgctttaacagtgcttggcatgcagtaggtattcaataaaattaactaaaaatgctgtctctaataatagcttccatatgttgaagacttcctcaatgtaaggtaccatgctgggagttttcatgtattaggccattaatctttattacaatcattagttaaaaagtattatccccgttttgtatatgagaaaatgaaggcttacaatagtcatgtaactcaccaaaccccacacagctggtgaaggactgagttgggatttgaatcctgttctctgagactccaaagtcaattctcttaagccctgtgctatacttgccttccttagggtgtgaacccataagaacccttctcatttagaacttcaaagaaaacaaacctagagttgattatagtagcttttaaaactgtagttgattacaagttaaagtatgaataacttgcaagataaatactactagcaggcaagcctgctcacactgtctcaaataagctctttatattcctgggtggataagttgtttttgtttttgttttgtttgttttttactttttacatgagtagatttaattgggtaagggttaaaaagatatagagataaagttgaaaatgtcttctacattccacaggattatcatttttttgacactctgactttaaaaatgagcccaggaggtggtttaattagcctatggacaagtgaccttgtggaactgtatctaattcatacaagcctcatgccataaggccctgttagcctttccaagcattccacatgtgcattacacaaaacaattccatgtatatctgggggcagtgggggtggggaagaaccagcaagtagaacttttcaaagatgaacagaaactatggatttgtctatgtgtatgtttgtgtttgtacacatacgtgtgtatttgcacatacatgtacatgtctggttgggtcatctctttctcatcgcagacctagtctttaagggatacacagagagaaggtttccatgaaatactcaccaccacctacaaacatgtaaaattctgcctgaagcctgagagcaaatgaaccactgccttttggttcatgtgggtatgtaggacataagaaatgctttcaacccatgttacggaaacccttcaatttgcagatgaaaaataggaggctcagggatgtttagaggcttgttaaaattatttggctagtagattgtcatgctaaaaattgaactcagtttttattatcactctaatcatgtgcttttcttactgaaccatgttgacattttagttcaatgggaagaacaaagaacaatgacttttaaaactataaatcaacaagaatgtttgtgaaatcatgcattgatgaccagtggatttctcaataaaatcaactatgaatataattttaaaaagaagggctacaaaataatgtagatatttgtaagtaaaacctcccaaccaaaatcacaaaatcatggcataggaaatatgggcacaataatatttttttgttcagacaaaaatatcttggattatgtacttttaaattcaaaatttttttaccattatcttaccagtctttttatacagcttgtgtttagacataagcgtgatgtgtgcagcagttcatagaaaccatgttagaaaagttcatagaaaccatgttagaaaagcacatagaaacattattcaggatttttctttttacatatctctttggagtatgactaattctgcacacaacttctccccacctggcttcatttaaattgcaaataaataaagaacaagatgatacatttcccaaagttcataacatatgctagatgacctgctaaacatcaaaagataatggaagtaaatatctattacttaagcttcaagcatgtttttattttgtgtcaaaatattatctgattcctcaaatactcggagatctaaaaaaggtacttaagaagcaccaccaccacaatggtgaaccaactatctctgtcgcccagaactgagggttttcctaggattcaggactttcagagctaaaatttagacagtctcaggtcgatcaccctacagtcgtcctaaatgtgtaggttcacaagccctttaggaactgttgttgatcccctggacagctaatccagaccactcttaacggcacagttggctctcatggagaccataagttattttccatctttctgggtcaggattttatgtaatctgttaactgtgaatctagtcattgattctgtactggacctgcctaagtgagtggctgtaagtatgcatgtctgcatgctctagttttgaaagaaatgggaagtaattctaaaacaggaggcctaaaacagctggaaaaagttgtacatcgttttctcatactttctggttaggctttcaccagcagtagcaatcatcagtagctttttggcaatttactttcttctctcctgaactactagcctagtgaatctccatgaaaccctttcatttttctgattctagaatgctttgttacagaaagcaacagcaagagggaagtacagcttagggagtaaatgtggtaaactggggcgtggaggtatacagactttcagggcctgacatttttaaatacattgccaaagctgaccaagcatatttcctttccagcattaataattacttggcactgaagaaatgcatgctgatagagcactttatggtatgatattttattatctctgtcttgaaaaattgtagccactgataatctaatagagagaagaaactcacttcattaatttattatagcccagaatcctgggcagggcgtttgattacggagaatattcctttatttctgccaaattaaaaagctggcacaacacagtagatgatgtaaagcttttggctaaatgccttccagattccattttccaaaagatctaccaagaatttgcagtttaagcttttcttaccaattttatatttgcttggtttctcctgatttatttttactttaataacaagctcacactggctctattagatattgttgtctttgtctacatggtgccatacagtcagaggcctaggccctgaccctgtcagtactgctaatccttgagtctgtgaccttgtgcatagcacctcatcgcactgggcttctgtttctttatctgtgagatggagcatttggactaaggtctcctccaggcttaatatcttatgattcattttggattaaaagttgaggaaaaataagtatgacgtatttttttcagagactttaacaaaaggaacatatctaagttttgttaaattccaattaaagaatgagttatctgatccagtcttcagtttgcagtgtacagtatttagagcccaggagctattatgatggatgctacagaaatgcttattgtattcacagactattcctgatggaaacaaaacatctggaggatttctgcaaggcgaggattcactcataaatgacccttttgcttttggacagggttgtacattattttgtctgccctactttgagagagtttcaccatctgtctaatgttagcaattatttgttttcctaattaattgatagaatctgtttttttaaaaaatataattgcatcatgtcaatttaagaaaaaggaagtggctacatgctgttgtacatggtgcatgaaaatggaatcagaaaagcagtatgttagggctgataggggccttagagatcaattattccaactccctcattttgtagatgaggaaaaacactcagctcattgttagcaaagcaggaaacctgtatcttttgattcctatcgtatctttctcattcatggtagtacatttcttgtgatatttaaaattcttcaatttcaaaatgagagtgaaactagaaaaatcactttattgcacagagaagtttcatggggtcacagctgagaagccaatcattttacaaggtttataacaacaacaaaaaaagttgtctctttttttatcccaacttttgaattcttattgtcataatttactttttgatattgcctcttttttaaaattatactttaagttttgggagacatgtgcagaacgtgccagtttgttgcataggtatacatgtgccatggtggtttgctgcacccatcaacccgtcatctacattaggtatttctcctaatgctatccttcccctaaccccccaccacctgacaggccctggtgtgtgatgttcccctccctgtgtccatgcgttctgattcagctccctcttatgagtgagaacatgtggtatttggttttctgttcctgtgttagtttgctgagaatgatggtttccaacttcacctatgtccctgcaaaggacatgaactcattcttctttatggctgcatagtactccatgttgtatatgtgtcacatttgctttatccagtctatcattaatgggcattttggttggttacaaatctttgctattataaatagtgctgcaataaacatgtatgtgcatgtgtctttatagtagaattatttataatactttgggtatatacccagtaatgggattgctgggtcaaatggtatttccagttctagatccctgaggaatcgccacactgacttccacaatggttgaactagtttacagtcccaccaacagtgtaaaagtgttcctatttctccacatcctctccagcatcgttgtttcctgactttttaatgatctccattctaactagcatgagatggtatctcattgtgattttggtttgcatttctctaatgaccagtgatgatgagctttttttcatatgttttttggccacataaatgtcttcctttgtgaagtgtctgttcatatccttcacccactttttgatggggttgtttgtttcattcttttaaatttgtttaagttccttgtagattctggatattagccctttgtcagatggatagattgcaaaaattttctcccattctgtaggtttccttttcactctgatgatagtttttttgctgtgcagaagtttagtttagtttaattagatcccatttgtcacttttggcttttgttgccattgcttttggtgttttagtcacgaagtctttgcccatacctatgtcctgcagggtattgcctaggttttcttctggggttacatttaagtctttaatccatcttgtataatttttgtataaggtgtaaggaaggggtccagtttcagttttctgcatatggctagccagttttcccaacaccatttattaaatagggaatcctttccccattgcttattttttcgaggtttgtcaaagatcagatggttgtagatgtgtagtgttatttctgaggcctctgttctgttccattggtccatatatctgtttggtacaagtaccatgctgttttggttcctgtagccttgtagtatagtttgaattcaggtagcatgatgcctccagctttgttctttttgcttaggattgtcttagctatatgggctcttttttgatttcacatgaaatttaaagtagtgtttttctaattctgtgaagaaagtcaatggtagcttgatggggatagcatcggatctataaattactttgggcagtatgaccattttcattatattgattcttcctttctatgagcatggaatgtttttccatttgtttgtgtgctcccttatttccttgagcagtgttttgtagttctccttgaagagaggtccttcacatcccttgtaagttgtattcctaggtattttattctctttgtagcaatcgtgaatgggagttcactcatgattttgctctctgtttgtctgttcttagtgtataggaatgcttgtgatttttgcacattgattttgtatcctgacactttactaagttgcttatcagcttaaggagattttgggctgagacgatggggttttctaaatatacaatcatgtcatctgcaaacagagacaatttgacttcctcttttcctatttgaataccctttttttctttctcttgcttgattgccctggccagaacttccaatactatattgaataggagtggtgagagagggcatccttgtcttttgcctgttttcaaagggaatgcttccagcttttgcccattcagtatgaaaatggctgtgtgtttgtcataaatagctcttattattttgagatacattccatcaatacctagttttttgagagtttttaccatgaaagggtgttgaatttttttgaaggtcctttctgcgtctattgagataatcaagtggttcttgtcattggttctgtttatgtgatggattatgtttattgatttccatatattgaaccagtcttgcatcccagtgacgaagccgacttgttcgtggtggataagctttttgatgtactgctggattcagtttgccagtattttattgagaattattgcactgatgttcatcagtgatattggcctgaaattttctttttttgttgtgtctctgccaggttttggtatcaggatcatgttggcctcataaaatgagttagggaggactccctctttttctattgtgtggaatagtttcggaaggaatggtaccagctcctcttgtagaatttagctgtgaatccatctggtactaggctttttttttattgttaggctattaattactgcctcaatttcagaacttgttattgatctattcagggattcgacttcttcctggtttagtcttgggatggtgtatgtgtccaggaatttatcaattgcttctagattttctagtttatttgcatagaggtgtttatagtattctctgatggtagtttgtatttctgtgggatcagtggtaatatcccctttgtcatttttgattgtgtctatttgattcttctctcttttcttcttaattattctggctagtagtctattttgctaattttttaaaaaaaccagctcctggattcattgatttttgaaagtttttttgtgcctctatctccttcagttctgctctgatcttagttatttcttgtcttctgctagcttttgaatttgtttgcttttgtttctctagttctgttaattgcgatgtaagagtggcgattttagatctttcccactttctcctgtggacatttggtgctaaaaattcccctgtaaacactgctttacttgtttcccagacattttggtacattgtttctttgttcccattggtttcaaataatttatttatttatgccttaatttcgttatttacccagtagtcattcaggagcacattgttccatttccatatagttgtgtggttttgagtgagtttcttaatcctgagttctaatttgactgcactattttctgagagacggtttgttattatttctgttctttttcatttgctgaggagtgttttgcttccaattatgtgatcaattttagaataagtgcggtgtggtgctgagaagaatgtatattctgttgatttccagtggagagttctgtagatgtctattaggtccgtttggtccagagccctcaagtcctgaatatccttgttaactatctgtcttgttgatctgtctactattgacagtggagtgttaaattttcccactatttttgtgtgggagtttaagtgtctttgtaggtttctaagaacttgttttatgaatctgggtgctcctgtagtgggtgcatgtatatttaggattgttagttcttcttgttgcattgatccctttaccattatatagtgcccttgtcttttttgatctttgttggtctaaagtccattttatcagagaatcctctctttttctactttttacttatattgtgatgccacaaaagcacacacattcaattctttagctgttctttttgctatttgctttcacaatggtaaataaatattttatagtattggcccttgattattagttgtctctctggtgtttgaattctctgtttcctgggtcccatgtcctactgcctcctagtttacttttgtatttggatgtctgcttgctttattaacagcctgataaagggtgcaaagaacatagaatattttgaaaaacataagactgaaaatacattctgagctcacctttgcttgatagtttggctgaacataaaaatctagtttggaaatcttttttgcctagaaattttatgacattttccccattgtcttctaccttctggtggtcttccagatttcactgtgaaatgctgtggtttgtatctttacttgtcacttttactgcacactcagttgaatactctcaatattaaagctcatgccctccagtttgggcatattttgatgaattattttgtgaaaattccttgccttttccaacttctagaagctgcctctacactttgattctttggctcttttctttttttctccaccttcaaagccagcagcatagcacttccaaatttctctctgcttctgccctagtactaatattaagtgaggtctccttgtttcaaagaaaatggatgtcaataaagcactgatgcatcagcaaatagttttaaactccctggatgtatatctagtcttccagaatacctctcttctctactagagtttagatttattcatttactcatcactcaatcatttaaaaaacattttctaagaaactgctttgcctttgggactgccctaggcactggaatataatagtgagcatgacattgtttgaacttttaaagcagcttacagttaaataggtgaaacaaaccaatatacaaggacttgccatatataacaaatacttttgtagagctaagtatagaatgtaaaagaaaggaaatagctcagtcttggagggggaaaggagatttctcagtgacctgggacacttgaagaataagtaggagtcatccaaacaaagaacaggcaaagctattgatatagcatgtacaaagacccagaagtgaaagaaggtatagtattttcagagaaattactcatgtaatctgagacttagacaagtagagacagagatgaatctggagaggcaaagtaatgaaggaccttatgaattgggtgaccatagaatatactatccaaacctatacacttttgaaaatgaaagagatacccgggtgcagtggctcatgcctgtaatcccagcactttgggaggccaagcaagacaggccgatcatctgaggtcaggagtttgagaccagcctgaccaacatggtgaaaccccatcactactaacattacaaaattagccaggcatggtagctcacacctgtattcccagctactcaggaggctgaggtagtagaatcgcttgaacccgggaagtggaagttgcagtgagccaagattgtgccattgcactctagcctgggtggcagagcgaaactctgtctcaaaaaaaaaaaaaaaaaaaaaaaacagtgaaagagattatattaataattgtcacataaggaagcaaattgggaattgcaacaaattgggactgtcctaggcaagccaagacatatgactaccctacctataaaccatgtaaatcttttctttatcctgttgaagatactgaggaaaatggaaagatcttcagtaagagggtgggaaggtgacatagttagacattcatttaacaaatattacttttgctgtggtatggattgcttgcagattgggaagtgggtatgcaaaaggagaaaaagaaaaaaggaaactgatacatgtgttgcaataattcaggtaagcaattaggcttcttctaaactagcaatgtagtaatggaggtggcaaaaagctgatgaattctatacatatttaggaagtagaattaattagatgtgctgattgagtatagtgaagaaataagttgcaaacaccaagcacagtttccatgttttcaccttgtgcaaatcgattggactataggatccaacacataatagagcatcccctgatggtgttgcttataagtgacctgcactgtgttttgtgtataggttttttgagggccagggtagtggagttttttctgttgttgttccaaagtattaaactaagctctaaatgatctgagccgtcacagcgaatggctacagtgagtgctggaatgggaaagacaaagaccaaatccaattggtggactgcaaagcccatgaagaacactaaaaataagggcatgcagcagcagcagtgtgtatggtcacaggctggtttctagaatatcaaaggagcaacactgaagtctatgtgaataaaggctgtacgttcatttccctggcatggggacacttcaggtaatttgagcaaaatcttagacaacatatactgaagtcccttaagaaagcccaaagtgttttattctgttaccacttcctctcttaaaaattaaagacacctgggctgggcgcagtggctcacgactgtaatcccagtgttttgggaggccgagatgggcggatcacgaggtcaagagatccagaccatcttggccaacgtggtgaaacccagtctctactaagaatacaaaaattagctgggcatggtggcacacgcctgtagtcccagctgcttgggaggctgaggcaggagaattgcttgaacccgggaggcggaggttgcagtgagccgagattgtgccactgcactccagcctggcacagataacatagaggtgtagataacagaacaggtttcaagaaaccataacaatgaaaaaaattaaaaatcagagtgaagggcgcagtcaaccacagctgatcatcatgagcctccaatgaggttgaggcagacaatacagagttaaaaatcataaacagagaattgtggccagattgcctcagaagccaggacctgcaggggtaaaataggagccagcagggacaaaaaaattgggcagcattcatcatgaaatcagtctaggtgatagggtgccacaggctgataccagcccaaagccaaggaaacagaatttggaagcttaacaatgttacttaagtaattcatacagtgtggtaaaaccaagataggaacactgtgcttcattcttggttctccaacccatctctgaagccctactcttcagagcaagaagactgcattgcggcagcctgtctcccaacacctccatgtttttggcttcatgccatataaacatagaactggcagtgcctgcagcacccaacatttccaaattctcatttcatttcctgtaacacgactgctcctcctatatgtaccatcttatcctgctgtcttgtctgtttccatgttttcagcactttacctctttcacacgtatgatcttattggatgtgacacatagtggttatgagacctgcctctgctagcagaaaggcttcgtttttaaatcccattccaatatttcatgtttgatcttgggcaagttacttaatctctttgtaagtcagtttcttcctttgtggaaaaaaaaaaagaggtaacaatagtaccaaagaaagtgtgtagttttgaagaaaaaaaatgtgtgaaaagcacatagtgcagtgcctactacatagtatgcactccaaaatattagtaatcattattattactattattaagcctcacaatttttgatggtagacaatattaatacaaatacacacacacacacacacacacacacacacacacacacacacacatatatatatacctactcatatacaaaaagatttttaaaggtaaaatgacttgctcaagatatacacctataactcacagagcttcaatccacagctttcggcctcagaatcagtgtctcactggacaaacctggacagagaactcaaattcagggaaactattcagatcatctgtcaggattcaatctaacagagccatcaaagcaggtaactctagtaaaatgggccatactagagtgcagtggtgcagtcttggctaactgcaacctctgcctcctaggttcaagtgattctcatgtccagcttcccaagtagctgggattataggcatgtgccaccatgcccagctaattttggtattttatgtagagatgggggccacactggtctcaaactcctggcctcaagtgatccgcccacctcggcctcccaaagtactgggattacaggtgtgagctaccgtgcccagcctgctagtgttcttagtagctaaggtcggcagcacagtggtccctttttcaagacacccaagttagtttcaagttgtttatttgtcatctcatcctgaaaattggaaggaatacactaagtagaggtttaaccaaaccagttacacctagttgtatgtattgcccaggctatatattgttgtgtaaaaaagccatcctaaaactcagtggattaaaaccatgacagtgattgagttttactcataatcatgcaatttgagcaggatttagcaggggaggctcatctttgctccagctgacttcagttagggcagctcaaaagagaactggaggattacactttaaaaatggattattcccatgtctggcaattggaggtctgggctgaggtcagctgggactgtgaaccagggactctatttctctccatgtggtgaggctgtaccttttcctggactacctcacagcatggtggctgggttctaagggtgaacattcagagagagggagaccaggcaaaattgtatcatttctgtgacctagttgcagaagtcatattgaggcacttgtgccctttttttagtcaaggtgatcacaaaggtccaccctttctcaaggagagagaacataaatatttgctattggtgggaagtagcaaggctctggaagagcatgttgaaggagaagtagagggcatgggaaatatacatatgcatacacacagatataaatatgtaaatatatatttcacatgcatatatatatttacttatgtatatatatatgcctatttcatatttaaatatatttcatgttcatatatgtatatacatatatgtgtgtatatatgtatgtatacatatatgtatatgtgtatatacgtatatatacacacatatatgtgtatacatctatatacatacacatatacatatatgtatatataacctatttgagctatgtaaaatgacaaccccagtctggcactgcctattcctttttttttccacagcaactataatcacctggcctgttatatatttgtttatcatctatctgccctccactagaatgaattaccacagaggcaggaactttatcatattttatatactgctatatccttattaccaagagcattgcctggcacatagtaggtgcccaatttatttgttgaatgaatgaatgtatgtgtgaatagatacaacctataatatctaggactataaattcaccagcataaatgctggctctcaggctagactctgaggcatcaggtaaatgaggggttcatgacattctcttccatacatagcacaatttgcacatgacaaagaaagaatgtcactgagactcctgacatctgcatttccaatcacgtcaaaaatataacttctataaccacttttcttctgcattttatttattttttcatcgaccagccattgctaggatctttggcagagagaatttttggatggcagctgtgaagtattatgaaaaactcagtgccagatgtaaggattttatttgccttccacaagatggaatctgtgaagcctcataaagtcatagttaataagttgcctgctttgccttaaggtggttttagtagctcataatagcatttatttcagaaagtatgagagttgttactcccaaatatcttttggcacattaagggtcaagtaaaaatcatgagaaaataccttgtgtggctttagaaaaattaaagccctcacagcatagaaagcaataaaagattattatgtgccttttgtcaggtatgagatacattatatgaatccctgtgacaagtacctccactgctttagttgtaaataccttatattgaatgctacgtgtaatattcagcagatccttgacactaatatgtgatctcctacatagacatcattttggctctgataaaacactacctaatagctagagtgggaataaaaaaattagaaaagtcatgaattacacaatgtttctgtggcacggcatttaaaaaatcttaaattttgattatagaagaagccaaaagaataatattaaatgctaaaatagatgttcaatggtctctggggaaaagaaaacttctctgttcttaaaatgttatcaagaatatttctattgaagtcttaaaaagaggcttttgtataagaatttcaacatgacaataatctatgaattctcttaatttttttctgttatcaacatcaatctgtgatcatgtataagcatatgataaatgattaaaaaattataaaataaatgcatgaacaaagaagatgctacttgttaaccatcaataggacatgtttttcaatccatttttaagaagtggttatggatatgaatcattaattccaaaggttctgtgaactagcagaaaagagagatgtaaaccttgcccttgaaaactttatacttcacagttggttctagtggacacagtgtgggagaacagctaagaaggatggaaagaactggttagcgcattgttagattgttttcattcatggaaaatagacatcattggttgaaacatcagtaaatgagttcgctaacaccattattattatttgcattatgatagaaaatatttattgagcatttacaatgagcaaggaatatattaagtgctttatatatattaatgcattcactcatgacaacattctttttcttttgaggcaggtactgttaataccccattttacagataagcaaactgagggacagataatttaagtgtttgcacaatgtcacagaattaaccaattgcactgtcaggaattaaacttggctgctggctccagaattcattctctcaaccacactgttgtatttcttcaaaaaggcacaatattgcgtataaagaaaaaatttaagtaagttttaattgagtatataataatggaaatctggaatgccatcaggtattggggcacaagaactacaatgcagtttcagagattagcatacactactacactttacctgcacacgaaatggcttttcccccattgtataatactaatgatatctaatctatgccaagaactagttcatctaatccttgaaacaacccaaagaaacagatgaaaactagttctgagaaagattaaataacttgttcatcatcagtcatcaggagccactttgaatttaggatatctgaccttaagtatttgtttttaatctctgttctcatgtttctccctcatggatgcacagtagaattcccagcagagttattaataaatgccagtgactgggtcccacttctagagattctaacttaattggttttgagtggggcttgggaataggtagtttataaaagctccccacataaatttaatgtgcattcagggcaaagaaccactacactatctgatgctgttcctcatcttaaaattgtctttggtatcaacctcctaaagcaccacaatctagattattctttccaggatggtgtaaagtatgaacagaaaacttaagtgattggaaaccttacatgttttcttatttggggggttttaagacacaaggcatggatgttaaatgtgaaatagctttctttacccattcacaaacaattagatagttctggataggatttcataatttttaattccatttttttctcaccttcatgacagacaatctttcataagatacgatctatttaatttgctggcccttactgtaattttatctttagtaaacctggcccacacttgtttagctagtgcagttctgattcacaaaagtataacataggggtaactggaatcatgccacatgtgtctcatcaatctacagtgtggatggcaatgaagatttgtcaacttgttatgtaaaagaacatctttctgtggcctgtatttatttttttaaagtaaaaaaaaagaaaggaagcattgagctagtgagcaagtcagaaaaagaatactatcttaatggtaaatatatatatatataaaatatataattttatatatatataaatatatatataatatatttatatatatataaatatatattttatatatatataaaaaatatattttatatatatatatatatatatataaaatccctaaaatagaatgcctgacatctggatcacaatgtgttaggtacctgaaaaaaaatgaaaatgtatatctggacagatttgttgaccaggtaaaacgaattagaagaaacaagcacagatcaacaactctgttttagcaaatgagcatcagtaggctttgtgctagaggagttatactgattacaaacatttgtcaaatagcaactgggtattaggttcaagagacaaatcagtgctaaaagtttaaattctttggccgtttttgaaatgttggctaaaaattcagaaaataagaaagaaaggatatgaaatttgctatgttaatagggggccagggaaacaaggtaatctgaagccacaaattaaaatgagttttaacttttctgtcacaaaacgtagacaaatgtaaaaataatatgtggaattttgcttttccctttttagtacatctatcagaaaatagctaaattctacctgataaaaaatgtttctcctctgaaaacggtaacatgttctagaaaattcaactgctgtaaataaagacagtgaaataaagaattttctatatttctattgatcaggaatattcagaatcatattttaatgtccttgaagtcatagtggtcatccttcatcctgaactgtatcacacaattttaaatgattactaaattttgttgaattaattccataattttctccattattcaaactctgtagaatataacactattagtcaaagctagaggatatgaagttcaaatatgcttttaccaccaacataaatttttaaactttcattttcatttatagagtagaagaactttaaactgtagtcaaatatgattccttcattgagtaagaagtttcatttcccaatatctattatcttttatgtctcttatgtgtcatctgcccacagtgcagatggttttgacagggaaagatagcaccatgttgtagtacaaagagatgtggacttagattagagacatatgaatcccaatgccctaaattatcttagatttgaatctctgctttatatactgcaaactgtagacaaaccaacatctcttcatcttaatgtcttcatctgtaggatgaaggccagtgcctgccttgctggattcatatgaggatcacgatatcggtgaaactcctttgaaaaacatgaattgttttataaataaacagaactgtaatcaaggtctcacatcatgaatctgcatctctcatttaacagcaaaacagagagtactgctgctagctgcatagcacatatatcttagaaaggagttgtaaataaaattgtaattacaacaaactcaatttcatctagtgaccatgaacaaatcatttatctgttatcccatttgtgatatgagtatagtgaaaggtaattgggtatattgcgttaggtagatttagaaggaatagccaggcacattttagttctgtcctaccaaggagaaacagcccattaagttatcaaactatattactgtgaaacttatattttcttacttgtaacattttcagcttacaacatttttttttgaaagactgggcctaaagcaacattctcgggttataacatatctccattcaccccattttttatttctcagaacaaaagaaacatttctaagatacttttaccatatttgtatccaagccagatgtcaaaatgtagctgtctcctgtttctcaaaaaacacatagctcttgtgcaagcaagttcagcggagaaaaacgaacagggaagcctgaagtcatgtttcctgaagttcacttgttttctctggcccctggccccagtagcttcatcagcactcctctgttggcatccatatgacatggttttataatgtcttacttgtgctttcaaatgccaggattgctgtgttgcccatctcttctttggggattgagagtaggccttctgttgtttttcataattcagacaacagtcaatacggtacttatccccatgtgtgctccataggcagctttgacagacatcctggctcctgctgcccaacttgagtgttggaaagtggtgaggaaagaactatacaactggggtttccccgtgccctgtaggcagatatctattgcccctaccctctagtcaatctggccgacttgtttcccaactgagcatggcctatactctcccacgtccacattttgattattttaattatgttgctttgactgcccagatgccctacctctgcctctactcctgcttttgaatattttattgtctttcaaagatgtctcaaatgctgccaccctgaggcttgcacattcttgcaaaatgttgtcagctgtctctcttatgaacatgattcttgatttatagtaattgttaggtgacttgccacattcctccttgtaaatgcttgcttacttattttccttattgtttggccactccactaaaagatactagctgtataaccttggacaagttatttaaccccattgtgccttttttcggttcattaaatgaggattaaaaatagtaaacctacctcataaaattgttttaaaattaaatgttaacataagtacagaacttagatcggtgactggtaaatagtaaatgttatgtaagttattgtttttatattattattatgtatatcatataaattatacatatggatgtgcatgtctgtgttttctaagagaaaattaacttatccttccttatattctcatttgcctaacctactctctgatattgagaagattctgagtaaatgtttttgaataagtaagttaaaaattgaagtctgtggctgggtgccgtggctcacgcctgtaatcccagcactttgggaggctaaggtgggcagatcacgaagtcaggagatcgagaccatcctggctaacacggtgaaacccgtctctactaaaaatacaaaaaattagccaggtgtggtggcgggcgcctgtagtcccagctactcgggaggctgaggcaggagaatggcgtgaacccgggaggcagagcttgcagtgagcagagatccagccactgcactccagcctgggcgacagagtgaaactccatctcaaaaacaaacaaacaagcaaacaaagaaacaaacaaaacaattgaagtccttttaccagtgctgccgttctcaagagattgagctttgcctgaacagagttgacattgctttagtttgattaatttcttttttttttttttttttgggacggagtttcacttttgtcagccaggctggagtgcaatggcgccatctgggctcactgcagcttccgcctcccgggttccagcaactctcctgcctcagcctcccaagtagctgagattacaagcagccaccaccacgcccggctaatttttgtgtttttagtagagacagggtttcaccatgttggccaggctggtctcgaactcctgaactcaggtgatccatccactttggcctcccaaaggcctgggattacaggcatgagccaccacacctggcaactttttagtgagaaacaaatcattataaaaccaaaatgtctacaaatacagggcataataattacttttttattcattcacttagtttatcacttagttcatgttattcattcacttagttaataaatgcaaattccagaaaaagtaactgaatccttactttactgttttaattacatgattcataacaatgtaaaattgttcaaatatctaaacagaatgttagtagagtatgataagaaactagataacccagtgtttcaatattatgtttatatgtgcaattttaccttaaacagtttcagaagcactttcaaacaaactaaatagcatgaaatcctctcttaggaattttgtttttaatttaaagcaattgttttaaacttacacatatcttactatgaaatcatccttccatcaaatgcctccaccttaccttcgggaaatgaatagccttctacatttggaacaaggaaaatttccccaaaggtatgtaaagctaaagctgaaggaatactgtagtagacaaatttcttcaaagtttgcttaaggcattcacaggagttgcttctaaattaaaataaatatcagatactccctgatttcgatttgaccagtcctgatttcttttaggcaatgtctatgaagattagaaattattttcacaagtgaccgaaatctacctaataaatcacttgaagttttaaatgctaacctatcacttcacaacaaggaggtatgcaattctcaggggcagaatgaagtcagatgaggctcattgtgcagtactgatagaatatgaatagcaacacccttcgcgccttgggtagggcctcacaaaataaaatttatttcattattataagctaaaaacttttggatttctgggatgaagaaaaggaagtttaccttccaacatgagcttattagttttattgattcccttctattttgatcttacgtcccgatgtggggggaagtatgtttctttaataacaatattgtttcttctaccagaaaagttttccattttatttcaccttaaatacactgcaaatttatattttaagaggttcattttttatcaacttatcacatttattctactacagattttcactggtttgggttcatgaaatgtatttcttgtctagaaataatttttaataggtctgtatttaggtaagatctaagtgtgtacctcctgctgataaactcatcgaagttcagtgaaacataaaggccttctgataactgatatgaatggaatctggcaaactgagaagagatgaatatgatggcttttaataaggaaaattattcatgaaggatatgtatgtatgtctcctagttttctttatttttttaaatgagatacttctctgcttaatgatacatgcattcttacaagttaaatttcataatttaaatgtaaaattgtaaaaggaaaagaaatacttagggtactatggtgtgttgcattgtatcaaatataatattgaatacccttatgaaggtacatttgtatacttttatctatcttgacttactccacaggaacaacctgcactggatgttacctgccctcaagttgaagccgtcaggctaaaaattgtatttattttcccaccatgttttcactgaatttacaattcacattttccgtttttaggtcttttatgttgtaaacactttggtcaataaaaaataactctcttaattctgtacttggaagggagggattattccagccatatgaacacctactggaaatagatttgcaacaatataaactttaagactctgtttaatttgtcaaataacacttattttctgatagtaataatagaaacttaaaaggtcttttgtttcatttgtcaaataacacttatctaacaacaaaagagtataatctgtgtgggaaattgctaggtgttcaagtagtattatatgtttgcttctagcttggatttcagaagttgcttgctcctctgtgtttagataaatgcaatgtccaacaacttgtggtgatgacaattctagtcttttattactcagcttgtttttgtttgtttgtttgttttaccatttggttttctttgacccgtaatcaaattatcaaagacttggaagaaagaacaaaaaaaaaattgcctcttagttttataaatgtaaacctgggttcctgttcactaacttcaatctgccaacctggaaacatgtaaattcattcattatttagtttctatgtagtttttttccaaattaaagcaactttttgaacaattatattgaggtattcaaagcagcaagatgatttgtactgtggacatagtgttactttgcatttcctctatagacttttattaacatgattttgaaactaaaactgatttcaagattttagaatgctcaaaagcaaagttttttgctactatctggtacaccccgttgttatagggatagaaaacctgagttaggttctgaatgcagcaattatagattcgtgtattgagccaagttccttaatcaattattcgctattctcttatatactctgtatctcatccatagccaacttctttttccctactcttggtgctcctggaatgaaacacccttctgagtcagcactggtcctctcttatatcattttatgctgggagaaggccagctagttttaatgttagcctaaagaagttcttgttataatatcaacattataaaatcaaatataagccatttgggaattaaaccgcttgtagaatcatctgagagtcttctgtccccaaccctgctgacattcagctcttagagtaccttacatatcatagtctataggaatggtggccccaggagaatttccatttatagccctccttaatttctgctagttcaaatggtccactattgacccatcatcacatctgtcaggtgtgatttctcgcacctgaaaatagggattttttttaaatcatagtaagctatgaaaaggaggaggtctttttttttaatcttttgaagatttggaggtctttatttttaatctttatattccaatttgaacacatctgatcttcactcaacattataattgaatataaattttcacataaacacaatttggtcatattaaaaaatagggcaacataaaaattattttttaacaaaacgacaattttaaggcagataatagagataattttcgagtgttttctatgtacaaagttctgtgctaagcacttgataggtcttatttaattttcacaaaaaccctgcgagataaggtacatttatggtcattttcacatccagagaggccaagagagaaggatgtccttcagttcatgtaattaataaggcaaagagtaagaattgaatccaagtctgacaatatccctaatctcaaactcttaacctatacaacctaaagatgtttaaatgggatatttaacagcaatatcagttatgattatcatcattatcataattgagatacgtctaatactccacaactagagtatagtaaaaattgttgacttcactcttcctatcaaaatgtacatcttctcccaaaatccacctgcttctttgattgggtaactttgctctttgccatttgcatatggcctgctcaactttgcttttgcttgctccattctccttaccaagaaaacccacattgttccctcctccaccaactcatgtactgtctgttcatctgttagataaataaacatgcgttagctattggaaccagattcagaaattatctcttagattctactcatccttctaaactcaggcctaattattccaagtagaattattacaagtttactctctattgcactatttagtcaaatgagtcaaatttagtcaaaattaaaggactataatttcttcgtggttgtcactttgattttcccagctaaatattcagcatcctgggagtatttcacatctcttgtatacccctggaaacttgcctagtattatagtattatacacacaggaaacatttacaaggtattttcgactaatttagcagtattggtgttgtcatgcctaaatatgttagatggaatgtctgaagtacatactaagaatttcccagggctcagtttttgcatgttttggtaaagttatctacaccagaaattcactcttaatatcttattcaaggtgttttatctgagttctgaataccattctgaaatcaaggaaggcaaattcaggatgattctgtcttttagcttcaacctttgacttatgtaattatgtcatctttctgactatctctgacatttttctatctttcttgttttcttttttgctaaaccccttctttttcctatcttctcaccatccaacttcatttataaatggtagacataactatgtggcttttgtttgattttagtgtattgtttaggagtgtctgatacccaattaattagtttgattccatgtcaggcttatttaaattttttttaatttttataaaggaatatagcaatatttgaataaatataatttatagtttgaaattcagtttcttctatctatgctttttttggtatctttttgacttaattttgactttgtactttgttattctgcaatttaattcttactgatcaaattaatagtttacttggtcatcatacaactaactaccttctgcccttctgccttccaagttggtaaataccatgacttcataaagaaattgaaagagtcaccattttatagttacatccccactccaaatttaatttcaaatattccagaaagcaatgcaaaaagacttaagatgtagattaaattgacctcaaacttctcatcaaattgcatagaaaatgtgattttaatcagtgtctttatctctaaataacaaaagttctttggaggagtgtcctggaaaagacggttgtaaacaatagtactggttaccagacagtgagctgagcagaaacttacatgccatgtttgacccctttcctccagcctttggcatcaaagctgtgaaaaatcgtgttcatactctctcctggttatttcttatatttgcattctccagtaaatattttcttccactaatcctcattaccctttgctttgactatcaatatagcccttctccctcttacccactgttactagaattatttttctaaaatacgggcaggaacatgctactttccacttcttaagaaacaattacatacaccaaagtcgtttgaactttataaaataaaaccttaatgcaccaacatatcttcacactcaaatatatccttccatgcaacctaaccaaaccaactaaaaccatccacgaagtattcttgctgttttgttcatggtcccccattggccgctaatatttcatccttttctttgcagattaaaactgaacatattttaagactcagatttaatatcatctattctttgaaattgtctatcccacccactcagtggaaatgattgcatgtttctatcttatagtattttgcaagcatatgcatattttaaatgtatgtttcattttgcctaatctatattgtttgtcttctccactaattataaaatattggaagttggggatcatgaaaccttcatatgtgggtatcctgtatttcctggtatagtgttttgtgcatgtgacctccggatattatcaccttccatctccatagcccttgcctgtaatgaagcactctccaacattttttattcatttttgaaaaatcaaatctgaagcaaaattgtcctataccccctcttcacattatggctcctgaaaagaaactctatacatgatgcattggattcatcaccctcgtttaacttttttaagcttcatcaatccagtatgaattcacacaattccattgtaatttccatcatcagggtcaccggtgacttggactggaagacctgattaactattttcaggactttgctttttcacacttggtgatgcagttaacatttgtgatttacttaaaaccttctctcctgatttttctgacatatctcccttctggtttttccctttgcttccataactgttttcttctaatatccttttctgaatcctagaatctagacctcagaaaagccaggagctaaagacacgcccacgaataataaggttagagatataaattaagggcagcagagaggataagatgactcttatccactgtggataagaatggatacagggagagtgcattctgtaaaaagaaaggagggacaaagatgaaacccaggaaaagcaaatttataaagatagttggccagtgcagaccatagactacatttaaaaacaactttttcctggaaaaatattcaaattattacaagttttagtgtgatacattgttttaatattatatcactgtatgaaaaatagaataaacaagttgttatctacaggttattttcagacttggggttccatcattttaaacgaaggtagttatcttttacatttatagttacagtcttaacaaagaactggattttaatttttcattccattttagtgacagagatggtcagaggcatttggcccaataaaggtgctgacacctcacagatacagccacaactatggtgggcttgaaacaaagagtattaaaatagggctagaatatcttttaaaaggacaggtcctcaagcctgatattcataactgtagttaaagctgaatcatgggcaaagattaaggccaagagctttcagcactgggaccaggggtcctatgggtcaccaccaccagaggtcagctggaatgtggcctcagagggagagagaagcctggggtgagcacaggtcagaatgagagatgtgccagtcacagaagccaaccctccatcgacattttgaaagctaaccattttcaattctgccttcctaagattgagagacaaggtcacaatatgcctactgcttctttctccatttctacaaagcaggggatcaaaccacaattagaaaattgcatttcctgttgtgctgaatgagactttgttcacctgatcacaatatcttttcataactttagttttctataataagatcctgtctgaaaaatagtgtatgtatactcaggttattctaatgaaattttaacccatacaaagaaaatttctacttttattttccttgagtttaacagctttatttctattttattccttttcattcctctctcaactgtggatggagttcctccttaattttacactcagcatttcaattcctgtaatataaaaagaaactttcatgggaaattatatgaatgtgcttttaggtcatatccatagatagcctaaggaaaaacattaaaagatgtaattagaactaagacattactctcctataatgtgcccttcaagttttgtttttgaaaatgtgttttctgttatttatggttttagtataacattgatcattacttttaatatttagtaagaataatatatatttttctattcaaatattatctctaattcttcagcctagtacatttatttggggtaatacatagaatgttacaaggtcaacttgtcactcttcaaacatatatttgtcttcatattctcatcccatgggcttcaatgtgctttataaaagctggtaaaaatcactcataaccaacactgtggaaagttgtgcaagagttggggcaattacaatatcttcagaatctcataaaatgatttggaaaccaactgccatgtgaagattgtttttattcacttcctcgaaatcagaatattatgatcaatttgtacaggaccagatgtcaaagccatgtggaacttcatatacctcagtcaacaagatattctctttttaatttatctttgataatgaatgattttaatttattacattaaacattctgtgctacaaggactatctgtgggttgaaatattacattaagcatgttcagctaatagattctgtcatttaatcttaatctttcatttagagaagtgagaatcaatgtgtgtgtcaagataattttttaatccaatctccaaacccaaaagcaaatgaataaaacttttgctctgatcatctatttcttttctttctttctttccttttttttttttttttgagacagagtctcgctctgtcggccaggctggagtgcagtggtgcgatctcggctcactgcaacctctgcctccgggctcaagcaattctcctgcctcagcctcccgagtagctgggattacacaggtgtgccaccatgcccaactaatttttgtatttttagtagagacagagtttcaccatgttggccaggctggtcttgaactcctgacctcaggtaatccaccatgcctggcctgctctgatcatctgtttcttaattctctatttcacctctaaggactgagtttgttgttgtgaaataaataaaatattgtattctaataattttttatttatcttcctcttccaataaaaatgtgattatttttaaaatgggaaatatatctctttttctattttcaatttactttccccaatagttaacagagtatttagcagatagtaggcctacaaaaatatttgacgaatgaatgaataaaagaaacatgcttgcttaaaagtaggcgtatagcttagatgaaggaagatcaaatatgcagattacatttattgagcagttactatgtggtagatgtgatatgtgtcttgcttacattattctgatttaattctcccatcaaactgatgacatagatattactatccacattttgcaggatataatattgaggcttagagttaagtgtctggcctaatgtcacacagctaatatatgatagagctgcgatttgtacttaaattgactccaaagtctatgttctgtctactccatcacacagccaaggattaaaatgattagatgtcagaatgtcttcagactcatctttgaagccatcattgattttattgaagaatcattaatatattattagatctggcatgtttttcaaaataaatatgattgtaagtgtagggaacctaagtaagaagcattggttttttagcataaatatttctacagagcattttattctggagaaaacaattactccctgcatagtctgattatataaaatatcaattgtacataatatttatgaaagttttcaaatcaacctagacttttttcttaatttagaggcagattcttttgagacattattgggttcagggtatttggctttttgtacaaatgtcatatggcttcagttatgacacaaaaacaattccattaggtttcagcctcagtacatacacatccatccacatacttgcctaatgtcagtttattaattcacagtgattttgagctcataatgcccaagcttgtgaataatatataggaatttttgcataattctcaaaatctttgtaaaccattgctactaataaattagtaaaaaaaaatccttgaagtggttttgggagtactatgggttttcaaaatatatttttgacctaccttatgaaatatataggtgaagctaattggaaacaaagattagctatattaaacaatgattttaataccaaagcatacaaatatcaatcaaaatgtcaaacctcctactaaaactacacaatttttcatattagaatttagtggagtccatcaaagggaaaatataattgaaatataaaatgagttattgcatcaggctcagtaaaaaatactgaaaatatttcattttcaaaattccatgggaaattagggactgttttgcttctctggatgacattagtgtttaaaaaaaaattaatgagttccattgggctctctttggccaaagtgggtgataaacttaattgatgaagtcaaaatgcaggtgaaatacctttgcatatcaaagctactataaatttcaaaatgctttaatatggatgcttctaatttttgaagggacatttcaaatgcagaacaaatggcctaaattatttcaattaattttttaagaacagaaacgtaagtcatttgaataatcccttggagttcctggtaacaaaacacatcctatgtgaaatccagtcaatctccatccctttccctagatgcttttgcacaaatagaaccatcactagtattagctttctctctgagcaccagtatgcaccacaactgtaaactccatgtctctttagagattataaacaaagactagcaattctggagataagaggtttctgtcatttctcagttaattctgcctttgaagtacatatagtggaactgttttcagaaagacaaataaagagaagtacccttactggatttatttcttttttgtaaagatggagaataaaccactttataatttcattgtctttcactgtattacagtaattgtaattaagaatatcttttgaactgtaaaagatatagaatgttcaaaaggaagaaaagctcatagttttcaagagaaatagttgtgttcaattttattcagaacttctttattacacttaaacttaacgattattgcctcctttgcatcttaaagctatttcaataggttttatttttaaagcaattcattgtttattataaatgtactatttccctcgttatacttttagtactatgtgccattgagcatttatagatggcacaaatatattatccaagatctgtaatataatatttaaataaaaacaaaaactatttcttatttgcacaggcatccagtgcatatttattaagattaatgcatattattaaaaattacatttttttcagatccaagaaattgacataaataatgagcaagaaaatgattatgaagaggatattgcctcattttccacatatattccttgtaagtttttccatgttatatatatatatgacatattcatatatatatcacatatatatgtgacttatggaagatgtaactgaaaaagcaagactgaagagaatgtggcacggtatttaattaactgattggcttttaatttgtaatagagacactactacatcatattcctaatttaaatacttttaataagttcaagttttaaaaatcaaatactgatttttcctacccagagggaatacacaaataactctgttatgactatgtggactatttgacaactacatttttaaagttttttaaaaactcataaccacattatttgcagaccttagttttctcagctatgaaatgagaatattgaactagaatactctctaaggtcctccctggccctaatatctgtgattctacattctaatgtctgaagaataattcaggatgttcctacatgtatataaacgtatatgtgtatataaatgtatatatatacacatatatacatgtatatataaacgtgtatatatacgcgtttatatgtgtacgtaaactccacccattatgccaggctttattggcatacagctcaacagcttcaccagcatgtttggtaggaatctcacatccaacatttttgaaagttcggattcctgccattgccaaacctctccacctgctgacttccccatctcagtaagtgaaaactccttccctcctttgttcaagtcagttaaaaaatgcttgaaagtcatccttggcatttttactttctctcctaccccatatgcaatcagtcttacaatactgttgactctgccttcaaaacattcccagcattcagccatttctctcccctttcattatcctagtccacaccatcatcagttctccccttgtttactgcaataacacagtggagaactggagggtcattgtcacttcctacattgcaagcttggcaatgaacggaaattgttctattgttatgactcaggagggaggattgctactggtatttattgggtagagatagaaggactgctgctaaataatgtataggacgccttcaatagcaacttccacatttgttgcctctgatattctacacttcatgaaaggactaaacacctttcatgaaggactaaacactcttctgctccaaatcctccaatatctccccattgtactcataacctttctcatcccctacaaggccctaatctttgtgttcccatctctcaccattatcttactcattcacaaaccaataatgtgcctgcctcagggcatttgcactttctattccttctgtacactttctccttatatgctcaatagttgcttcatcacttctttcttcgttttatgacaccctactcttcatttcactttacctgctccttttcttcattgcacttatcaacatttaatatgatatattatttatctggttgttgtttattgcctgtattctctttctaaatcacatgctcaaagggattagggctttttattcactgttttgattgtatccccagtacctgtaacagaacatagtctatgcccaatgaaacattattgaccacaagtttttcaaatgatggggacctgcaaatcaaataaagttaaatacaagtaaatgccttcactagcatactttggcaaaattagtaaactcttcaagttattgcaggacacaaaaaatgctaaatattaaattaatggattaatgcaccaagctttaaagttatacatcttatcatttaaattataataaaagtgattataaaggccatgattgaaaatgaccatatatttatcatgacgtttaattttcagaagaattgactgtaataataaaacattatttcaattctttataaagaaaaatttcacttttgcagtttgaaactacaaactctcttgtatatgaaactgtgtgtgactgggctcaagccagtctctttcatgagtgagagggtgaagcacagaaccctagctcagtggatttccattggtattaccattacaacaaagcatgctaaaacacaccaactcattaaatctgactttccggggctgaaacccaagtttgggcatatttgatgacaagtaccattcagattctgttgcttattcagtattaagaaacactgaatatataagcagaagtgtggctaagaataatttcctatagcgtgaatgtaattctgagttgatgactgatttgcccatacagaaataataaagttcctttgctagcctgagcaataattttttccatccattccatcatctactccatcagcatttctagagactacttcatttcaggcttagtgttttgtgttaaggatagaaaaatgaatgagatctgtgcagatagattgtacaaaaacaaataactatccactctgcccatgctggtaattaaagaatcttggtttagttttagtactggaaactgtatctttcttctttctcacatgaaagaatagaaaaacaaaaaaagaaaattccatataataatatgggctaccatcatgggcatgatttttctacattctacagtgtaattcttcattttaaagaagtctttcttctctacattgtgctgtttgggattttaagctatattttagcttagcaacattttaatacagcaatatcttgccttgacaaggaaaacaattcacatattcaaaggtctgttacagaggttccaaagtctgtttagaaattccaaaagactgttttaaattttttgaatcctttatttagagaatatttttataaagaaaatttaataaaagttttttctgaagatttaaagtcattgcattataatttctttttttctgctttcttcctgagtgtttaaagagcatttactgtatataatataaaaacaaataatggtatggttgtcagagtagagggaatttggatcatttggttaaatttctgggtagaatgcatttataggtaaagaactgatcctcagaaagatttacctactgttggtgatttacatgcctttttcaccaaaaaaaaattaacttttcccaagtaatagctccaaagttaatacagtatctgtaaatgatttactataaggaattataaaattattatagttatctgtaaagatcaatatatattaaaataactaaataagagtcagattcatttctatttattatttacaagcaagtaaaggtttgtgtcttttttctttacgttttccatcatttattattttattgggtcagttatattgttttctaataaaaatgcaaggatgctatcaaatatatgaatttgttcaaacaataactctaaagaatcagaatatcgttatctgcatgagtgtgtcatatacacagatagcaagacataatggagctttgactgttcatttggtaagtattttaaaaacccagaaataaatgactgttcactaaaagttacacatttgacagcttttcactatatcaggtcataaaagttttattagcagtactactatttctgtacaattttataaaatatgaaatgccttcagatggtgtgtttaaatgaaatcatgcaatcttcatcataaacagccacacagaacccagcatttcatcatgaaagcaggaagacatacgggcagagtgcagatggagctgaggcaaatgaaatggaaggggaaggaaaacagaatggatcaggcatggagaccaaacacagcccactagaggttggcagtgagagttctgaagaccagtatgatgacttgtatgtgttcattcctggtgctgatccagaaaataattcacaagagccactcatgagcagcagacctcctctccccccgccgcgacctgtagctaatgccttccaactggaaagacctcacttcaccttaccaggtaagtttaaggttagaaaaaaacaaaacaaaacaaagacaaatctttgacaggcttacatagcaaatagtgcagtggcaaatctatacagagcagatcagcttttgaaaccaatagcaacattcttcctattctttaaaaactaaggcctgggaaatgaggcaagagatacctacctctaccttgttcttttgtttcttatttccttgcttccttccttccttcctccctccctccctccttccctttcttccttccttctcccactttttctctgtttctctctttctttcttccttgtcttattacaaagctttaagagaataaaacttggaaggagtctgtagttcttcacataaaatgaacctcaggcattctgtggaaaaggaaatacaacattgcttttaaaacatactctcagtcttcagacaaaaagtgaaatgctaatgatcgacaattttcagatgaacttgggtactttaatcacttggtagctgtgggagaattaagcgttaaagggtttgtcgcacactgcactgacaccaaagtttaaaaacactctatacactacccaagtggaagaagagtcaacatagctatcactggcatttgttcccagacgaaggaattggggtgtggaaagtgggtgtggggaatctgtccttgcggagggcatgaagaggagcttccacattaggtttatctgcctggagtgttcaacagcctgacaaactcccagctccaggctcactcttacagtcacaaattatcatctactttttgatcattatttcatatgtactttccaaatttatatttattttccaaataaaatgttcttaagaagacaatttagttaaaaaaaaaaaactccttatcaaaaccccattttcactataatttagttgttgggtcctagaaggctacaaaccccattttcactataatttagttgttgggtcctagaaggctacaaagtacaaaaacatgaccttgtttcaaaaagtaaatttttacgcaatgaaatttagtatttgggctgggcacagtggctcatgcctgtaatcccagcactttgggaggccgaggcaggcgattcacctgaggtcaggagttcgagaccagtctgaccaacatggtgaaacccccatctctactaaaaatacaaaaattagctgggcgtgcacctgtaatgccagcaactggggaggctgaggcaggagaatcgcttgagcccgggaggcggaggttgcagtgagccaagatcatgccgctgcaccccagcctgggcaacaagagtgagactccatctcaaaaaaaaaaaaaaaaaaaggaatttagcatttgtgtcattgaaggctctctatgaagacccaagtttaccaacataagctttattaagcttatgcactgtatttagagatggaaagtactgcttaattgaaagctctgaagcctagtggatattcctctgattcattcattcattcaacagatatttattacctactatatttgaaggtcttgtggaccctcaacatttatccatgaagtagatatattaatatttagctatgaggggagaaaacatcataagttagtagtacactgactacaaaattctggcatatttttctcattttttcagatctgaataatttgttataacaaaattaattgtcaagaaggtaaaattgtcttgtgtcagattatttctcttaaaagtgctaatattaaatcatatttttcctaatgttaatttctatatatggtatgttggttagcaggtctaaaacgactctatcaagggtcttcatgagttgtctaagatcagaaatgtaatcttggataacatgtctcctgaaaactagcaaatataaaaagcaaaataaaataaaaactcacttatttaatttaaaaaccctatttttacattttatattcagtgttacttttatcttttgatagtactgatattagaaatggataataaaatgccggtattttttcttaaaaatgttttattggcctttaaatgcaaggctgtaagctatcacttatttgtttgccagagactttgtatgtctttgactttggctagtgataccttcaggagttgttctttatgagtagcttccatctgccatcaagttactgaaggaaaaaaaaaaaaaagccttctcctcagtgctgtaggcatcaaattcctcacagtggatttacggacttcttcattggagaaactaataacatataatactatagagcactttacagtttataaagaacccatggtttctttttaacccaagaatcctggaaagtaattatcggatccctccttgactcagttccaagaagccctataattagaatgtgtcagttgcttctattaacaggtctcctaggctattaggatttttctcttttttatacagtcttgacccaattacttcaaaagttggaattatggaagtgatttgttttaatctttctttattgatataccacctgaattcagaaagcttaggtcccactcttaactgaaaagtattatctgatactttggaaaataaaaagtaaaatgtattatttctagtgcaagcccaactttagaaatgttgggaagggaggtgggtggggaaacaaagagagttaagagctcaggaaatcggttcataaacgtaagatggttgacacattccgctaaaaatgaaacactgaaaaagtggttcccacacacttaatctgttttcacctgtgttgctgtcagtgaaccagaagtcataaagtcaaaatcttaaaaccatattattcataggataaaaggcaagccgtggtgaattgaaagttagtgctaggcacatcggtaattaatacttcttaagttaaactaaatgaaactataagagttaagactctgttgggagattatcttaatctcgcctcataatcttacccaaggcaattgctgaatctttctataatatccttttattctgctctgctacttgtctttccccttttaagtttttccactaaaatcttcataagtaaactaattttaggagtatcagattctcgaagggcaaattcaaaaaagaatgaaaatgaaagaaaaagccttcattggccttgtagagagccattaaaattctttttaatttacttgttaatcaaagcatattatatctgttattaataactgctacaaaaatattttaacatattcttataaaaatatgtcaagatattactgtatggaaaaatcatcaaagactctgaaacctataattttattcttttcatgtgaattcattctcacaccattgatcatccatgctgtcttttatgtcatgaactctactttcagtgtctttcatctgttttttatttgttttttttttgtttgtttttatttttgaggcacgatcttgctctgttgcccagtctggagtgcaatggcatgcctatagctcactatagcctcaaactcttgggctaaagcaatcctttctcctcaatttctggagtagctaggagtactcgccacctagctaattcttttatttttgtagatactaggtctcactaggctgctctcaaattcctggcctccagctatcctcttacctcagcctcccaaagcattgggattaggcacagaagccattggccagtgtcctttatctatgaataaggcccatgttggcttgtagaaaacaaaagctgcatttctgaaggtcagtttgtcatagtcaaagaccgactgctatgaaaccaactaatggtgcctttggctatttctccctgtcattttcagagaaattaaattttaggtgaaatatccagtgcaagcaatatgaaacatgaaacaacttcaaatgaaaaaaaaaatctaagaatattatgcttgaaaaacacaagttttcaaagctgtggagtttcagacatagatttataacttgattttctgatatgaaatcattctttatatgtaaaagtatatataatatataaaataatatataaaggtatatttaatacatataattatattttatacattaaatatttatatatgaaataatatataaaaataatatatatatattgctctctctctacacaaaataatatggaaagtatttaaatgttttaaaaaattccatgtcttaagcacatggatttttttactacacgtatttgtcttaatacaatttaaactacaaagtgcaggatgatttattagtaagttacacagctcactttttctgcatttagggggtgacatataaattattctcctggagtcacgagctcttctctaatactgtttcctacggcacttgactaagccaccttgggaagctcaaaaaagtgacagatggacaccaataatgttgcatgtaacagaagagtaaacaccatgtaaatatttcataaacagggacaatggtggaaggccaaatggaaagaagtcaaaactggggtcatcctggtgttagacaagaaacaggagatgaacccaaaggagaaaaagagaagaaagaagaggaaaaagagcaggaggaggaagaagacccatatacttttgctgagattgatgacagtgaatatgacatgatattggccaatctgagtataaagaaaaaaactgggagtcggtctttcattataaatagacctcctgcccccacaccccgacccacaagtatacctccaaaagaggaaactacaccttacatagctcaaggtaattatcattgttgtttgtttacttgttaattttttttgtccaaaattttgaggatgggaggaggggataaggtgatgcaattaatgctctaaaactccaaagagtaaacattttttttcaagtcacagctaagctatactggctcattttttttccactaagagtatttttttattattattatactttaagttctggggtacatgtgcagaacgtgcagtcttgttactaggtatgtgcatgccatggtagtctgctgtacccatcaacccgtcacctacattgggtatttctcctaatgttatctctcccccagccccccaccccgcaacaggccccagtgtgtgatattcatattccccaccctgtgtccatgtgttctcatctttcaactcccacttatgagtgagaacatgcagtgtttggttttctgttctcgtgatagtttgctgagaatgatggtttccagcatcatccatgtccctgcaaaggacatgaactcatccttttttatggctgcatagtattccatggtgtatatatgccacattttctttatccagtctactattgatggacatttgggttggttccaagtctttgctattatgaatagtgccacaataaacatacatgtgcatgtgtctttatagtagaatgatttataatactttgggtatatacccagtaatgggattgctgggtcaaatggtatttctagttctagatccttgaggaatcgccacactgtcttccacaatgattgaactaatttacactcccaccaacagtgtaaaagcatccctgtttctccacatcctcaccagcatctgttgtttcctgactttttaatggttgccattctaactggtgtgagatggtatctcactgtggtttcgatttgcatttctctgatgaccagtgatgatgagcattttttcaagtgtccgttggctgcataaatgtcttcttttgagaagtatctgttcatatcctttgcccacttttttgatggggggttgttttttcttgtaaatttgtttaagttctttgtagattctggatattagccctttgtcaggtggataaattgccaaaattttctcccactctgtaggttgcgtgttcactctgatgatagtttcttttgctgtgcagaagcgctttagtttaattagatcccatttgtcaattttgtcttttgttgtcattgcttttggtgttttagacatgaagtccttgcccatgtactggctcatttttaaatttagaaacatagtgagtaaagaaaataagaatgatggattgagttccggtttctacttcctcattaaaaaggataatgacaagtctttcagggaacatgaaaccataggatatatgtagaaattctccttgatacttccttcctaattctataagaaagatgctcaactcctataaataatatgcaacacaagaacatttaaatatataccacagatccacctaagagaaacataattactcatatatacttaatattttcaaaagaaaccattctgttccttaagctgcatgtatgtattaagagattcatataagaaaatttagcaagcacgtataaagtatttatcagtataaaatacacttatttaatgatgatcttctcttgatattgttcaagaaactataacaaattaggaaactatagcaaattaatcaactgtttcagctgaaataaaacatgaattggaacagttgtctagattatagattataaagtcagggaatgaacttttgctagaaattctcaggttgtctctcatagtttaatatctctagggtattactatctccttgacaaagttgctaaataccagtaaatacttttaaaagagaaagtggatatagcttgatacaaaaagttagttatactctagaaatttttgaagaaatacctcatcttctatattccaatgcctagggagtttctcaggacaagaatggaatcccatgttgtgttcgtctaccgtttggccgttatcttcccatccttctattgatggtcatattcttgttctccaagatctctgtcttgttctctgttgttcttttttgtagaattcttttctcttttaggtgggtacagagagatataattcaatatctttgttactgattttgcttcattgtgttttgatttgtttttaaatttcttttgttcttacttttccttctgctctcatattgtctctgttgtctttacttgtttgttctgcctgtaacatttgatacttccatcaaatatggctattcttagctatgttttcatgtttaacaatgaagcaccggccgggcatggtggatcatgtctgtaatcccagcactttgggaggccgaggcaggtggatcacctgaggtcaggaattcaagaccagcctggctaacatgatgaaaccccgtctctactaaaaatacaaaaaagttacccaggcatggtggcaggtacctgtaatgtcagctactcaggaggctgaggcaggagaatagcttgaacccaggagtcggaggttgtagtgagccaacatcgcaccactccactccagcctgagcgacagagtgagactccatcaaaaaatataaaaataaaaaaaaaaaatgaagcaccaaatgcctcaatggaaactctactttttaacttatggacagcattgtagggtaattaggaagtaggtaaccagctttttcattggatggccccaaaatattatttatgtaagtctattcacctatgcttttaactttttctagaatactcttcaactaactgtagtctgcacttacatatccagttcccagcatgctgagattagaatgcgggaaaaagactgggaaatttcaccattcagaatgcacaatttaacttgttctccctgttttccgtctcgtatgtaattcctgccacccagtgtgccttgtgtaccatgtccaaaactacttctgttcaatttctctaatgaagaaccctcccattatgggtgagtgcttcaattcacaggactggagaaagaacttggggccatgactggtttaggctttcaacccatccctaagtaaaataagtacatttggatggttttcctttcattgatttatttattagttacataaacatcgattgagtgccaatgataaaacctgtgtactaagtttatttattagttacataaacatcgattgagtgccaatgataaaacctgtgtcctaagtatgtaaattttgtacatgcaatgttgcaatttgtcctgtaggtatatgcacacgtagaaacattaaagaatcttaaagatcttcagtttctaataaattttaaagtttacttatctcacccatcccaagactggcacccttcaatatttataagttgtcgttctaattcaatgataacaatataatttactctcattatatttgtattacatggagatgaaaactagtgctataattttttttggcaattaagtatataaaataggtatggttatttaccctgtatcccaaataagtagcaaaagctggactacaaataatgtcaccaaaatccttttccattttttatttccttttctctttcactgggatatacttgcctgcctttttcttttatgcaattgattgttgatcattctgttcccacattaggaagagattacctcatcagctaattcattcttggtgttctttgcatttcacagagtaagagcctttcctcacatctttccttttttttttcccctagcttgggcagatctattaagtcaagttgccaccatttcccagaaaaccattcactcaattagaagattaatttctggccccattgcttgccagagcccaaaaatggtatcagtatattggtgtattcagggtgtgttaatagccagaatggaaagattgggaatagaagatagaggaaaaatacaggaatgcagaatcccatcttactatttcagaaactgaagaagtaatggcaaaggaactaggcaaaggaaaaccatgctggctttgcagaaagacttgtgtccaaatttagctgatattacccaagcaagcaaattcacgtatctgagactgaatttcctcactgtaagctggggatacaaatatatatttcaaagatttttaatctctaaatgagataaaattagaaaatacccagcacaatacttgacatgtggtatatgttcaatgcattataattaaaacaattctactttttcttttctcagtttagtgtctgtttcttggattctggtggaatcagaagttagggaaaatagtagtgctggagtgtgtgagggaaggaagaccctgtattctaacagaacaagttggcttagtcatcttcttataataattatcattaggcagctttcatgataattgctaattcatgcaataaccccacatagttggcattgataacttcattttagagataaagaaactaatgctcagtaagtgccaacgtctttcccaaagtgataaaaccaggaagaggaagaggcaggatttggacccagattaatctggatctcatgcctgagtacatggcaccacaaatttccatcactgatatatttattcctggattacttgttaatatttatttcttccttctaacctataagatccatgaaggaagagaccaaactaatctgttttccccattgtatctctggtgccaagatcagtgctgaattcatagtagaaactctgaatatttggtgaatattaactgaatgaaatgatagaagtgacaagatccacatcagtgtgggtagaacagaagacttcattaacactctggaatcagaagactatatcagtctactgattcctaaatttatcctgctttaaaccatcttatgtccaaaacactaccaatttgaagggaagagcccacacagaactggacaaagctctaggttattcatatacagctaagcactctaactgcttccgcaaagcttaaaacatgaagctctatttcaccatcatcatcatccccttaccccagagacataacttattaatgcaaaactgaacccatgttggccaggcacggtggctcacgcctgtaatcccagtactttgggaggccgaggcgggcggatcacgaggtcaggagagtgagaccatcctggctaacacggtgaaaccccgtctctactaaaaatacaaaaaattagccgggcatggtggcgggtgcctgtagtcccagctacttgggaggctgaggcaggagaatggcatgaacccgggaggcagagcttgcagtgatccgagatcgcgccactgcactccagcctgggtgacagagcgagactccgtctcaaaaaaaaaaaaaaaaaactgaacccatgttgattttttttatcaagatatatgtttctgattttttatcccattgctgttgtactaagccagatcttaggttaacaatcacaagaataactcatttttcataagtaaaattttttgaagtctacctgttttcagatatattttcctctacttttttttttatccctgtaatattgaagaggatcgggttcattaagcttgaagaatacagaggaattaacatggatgtatggtctttagtgacagaattcttgatttaagacaaatcagggaaagaaaatgagcacttggcatggcatagatacattggtagtgaaactacgtccataaatcatgcaaagagatgaatgcctattgggtaaaatttttcagcatcaatgggcaattttctattttcctcacacacaattaatagaacaaagatctttcttcagaatccatgtgactgatttctggtagaatataatttccctttcaatttccaattgctactgagttgcccttggcattttgcagtgcaacaaagttgtatgtgacctttttgagagctactcagctacagggaacccaaaatgtcaagtgcaactcacttgctctcagaagttttccacttgcaattcacttgtacttgaaattgatcacatacaatgcaattgaaatgcaaaaagagaaaaaagaccttgtagaaactgttaggaaaatttattcatatcattgtaaacgtgacagagtataatggtctctgtcctcattagtaaaatacggtcaagtggattgaagtaggtcttagatcaactgccttggatcctcctccctggataggtgaccttgtccaaaccatttagtttaaggacatagtatgtatatcacaggtgctctcagaatagtgacatatttatcattatttgtaagcctcatgttcctgtttttctcccttgactctgcctcattcttttccatgagagagtgctggtgtagctctgcaaaggagaaattattctgacctgtgttcatactgtccattgaagagaagcaagtcagctcgtgtaacccaggtgttcttgtttgctctttctgtcattctcacagtagaacatcatgatcccctggcttcttcacagaaatactgaatgaaacctgagaagtgctttgcagaccatctgttagcatgttgacgtaatgacgatgaaattttccagcctcatcttccaagaattcaattcctttatattagtgaaaatgggaaggaggcagtaatcagctgtagcgtgaactgacattaaaagattttcattacacaagacaatgaatgcaaatattatcaagcacttagattttcattcgacagcacaatgaattctggtctttttccacttaacatatgatgttactatttgttaaaagcatctgtaggaagaagtttaattgacctataaaagtagttcttaactggcagtgatttgcttctcataagacatttgtcaatgtctggagacattttgattgtcaagactaagaacagtactagtgacatctgctaggcagagaccaagaatgctgctaaatgtcttacatgcactggacagccccataacaaagaattatccagtctaaagtgtcaacagtaacactgttaagaaactcttacttggattatttccattgttaagccagagtaaagaaatactttagagaatgattatttatagatgaaatcacaggtgcatcgaacaaccatatgaaacagctatccacaactactgtctttttagtcactttagatttcttgaattcagaatattttccaccaggacttttaacacgtgattctttgtaatctaaataagtagctcttcgagaaaaataagatgcttcctgaggttggaaaattgaaaagagtctcccctaacggaccagcagcattgtgtagtgaaattcatgaggattatgaagccagatggaacggaattttactgaagactgacacttacagttgtgtaactttgtgaaaattacataaccttgcttcatgtgtttttggttttggttttggttttaaagaaatgtaatacctacttcacagggttttcatgagaactaaaaccatatatgtacagtggcctgcacagggtagcatgtaggaaatgatagttcctgtgatggaaggtattctgtagacacagaggtgaaagtagacctggcatatcaccccagttaggatgccttttgcttcttcccttttgcatgggtttcatatgccaacacatcaccttgcatgactttttcaaagtatttattaacttccactattgaatactatctagaacaaaggggccagccctatcctttttgagagctttttggaatcctttttgaaatccttttggaattttcaatctgcatttatgtaatttgaatcttgttagcagaattaaactctaatgtttgttcaaagtgagcataatcaaatagctgatctttaaatttaagggagaacaaaatattagagtaccaagttttatcatcctgtgaaatataacagtgcaaatcatgatcccaatgctacttcttgggacagcaacatttcttgattgagggagagggaggcaagttacttttgataatcactaagcatgaaccaaaaagtaaactcattatagtttgcagagtcttccattggctgcccaaactacttctctttgaaacaaaagaaaattgctcagaatgttactagagttatgtccatacttataccatttccttattgaatacaaatgggtaataagagaattaaatagatgatcccaaatgaagtctcatgggaggagactaacccccagtccagtgctatacaagcaatagttgttcaatacatgctgcctcctgctaacaggagggaggaagactgctcacccagtggtgactggaggttttactaataaacgcattgccatggtctcaagctataattagagcaagctccacaaaccaattgtcatcactcagaatggctcaccttcctggattataaaagtttctagaatgtaaatatttgtgtttgtatcgaaagatgacatatgcaaatgaaaacaatttgtgttctactctggtaaaagttaggtcccttagtagtagaaaaaaagatttatagtgggatttcccaaatcttcctttaggagatgctttcaatgataacacttctatcaaaccaagtttttgttacaacttgaaaggaaaattaatgttttctcctctggaaactaaagcagttattaataccaccactgaattagaatttttacgccattttccttcatgcagcagtgtgttttccacctttccatctctgcttatctgaatagtaagccgtaacccaagtcagtgatctcatatattctggctgaccatttacagattcttcttaaaaaaataatgccacaactccacctacatacgtctgccatgcagtaaactggtttcaggtgaaagatttttatactatgtggctgatgtggctgtctgtgtccacaccttgaatgtacccgttgaaatgtaatggcctgtatttgataaggtttctcaagttaataacctataaatactgctagcacaattaaatggtggctttgaactaactggagcactcagtctgtcttggtgaatttgcaaagaggctacctacatacatctttcctctaagcttcagattaatcaacatgactgcttatacggttaaaacattctgtgtttcctgtatttgctggctagacaaagggtttatttacactgtggttgcttgtttgtttgttttttactttattgagcctttttgtgattagatttaaacagtataaattgggaagctgggggaaacaaggcagggagaatagagagctacaaggattgagttatgattctgacccttcctgatggttcctcatccctatcccctcttatcagtaagcagtaatggcacatttgacctttatttaaatgaacacaccaaaacagaggacagtatgaaaactatgactgtgtcttatttacctttgcaccctcacgacttggccatgtagttagcaacctaatgaaaggtgttttggtgaaaaataaacacactgctaccatcctgtactgcatcatcccctgaaagcccagagcacaatacgaatctatgtattttattttatataaagtctctattttcaagcattatcatcaatgatagctgtacagctctaaataacatttcactgttcacatctaatggacaaccatcaagggggttgtggtttatcattcacaaaatgaatgttgttgttaattgcacagatttttatcactatagccacttatgaaataattcaaaataagatttatcagattttctaagaagggcagctatggaagggtccctttgcttgaaatagaccacaaatgaggttgacatgaagaatattctcgcagatgcagcctggaaagacaagtagtgcaagtgaactcattaaatttcaccttctcctcctcctctgctcttctgctagttctgctttacttaacattttgaatatttaatgatatgctaattttccattcaatgtcatattctagagaaaattttacagaagtcattctaccaatgtttaaaataaaaaagggtattatttgggaaatttgtattctttgggattattttaaaccgcaaaaattgttttgttttgtctgtggactttttatgtttaaaggtggtgacaacgactaataatgcattcatatttctttcttctcaaatttcagttttaggtaggaggagaaaaataagatttcactggggagagagtcagcaaagttgacatatatcctaattactttgatagcatgttttgaacatttatgaggtaaattttttaagaattcaaacacatagggaaaggattgtctcaatatatgataaaaaattaccactggcctatgatttaaaactttctcatttttatgttagtctaagccccccaggttataaataatattttcctcaaaacatagcattccacttaaattcatactcacttaagaatttttcccagcaccgttggacctggagtgtcttgggaaagaagaattggtaacatctcagaatgttagagctgagtgaaacattagagatcgtcacatctaagccctaactttattggcaagaaaataaaggccagaagggtgttggggagaaagagggaaaagccgtttttccatgtcactcatgtggttgatatgaagagaaaactatagcccatcttctgtgccaagttggctagtattctggtatacaactttttggttacaatacatttaaaacaaattctcgtctaactaaccacaactcttgctttacaaaataatgtacttttgtatataaatctgagtgacctataaccctacactcagttctcaccctgttatggattttatatctacctcttgtaaaggtggtgtggggtggctgaacatagtaaatataaagtacataaagtcttttagaacaaaggttttgctagttgaagcaattttaaatgtttcagctaataggaactataaagatagaaagatgaacagattctgaaattttacttgtatctattctaatggaatatgtgtccttgacaggtgtgtttgcttcagtgataattttgatgggctagtgctttcttcaggaaataagataggtcttttcccaaggttgcctcatatttaaaaatacctccccaactgaaagcgatgagaagacagtgtgtttggcaatatgctaattgctagttgttttctttttagaaagtgagactcatctgtaggtgggagaaagggaacctagaggtatgggtgcagctgcaagtgaattaaaagagaactcagaggtgggtaaagcaggtagagggaacctttaaactctgggcatgacctactacacgtctgcttttaaagagtcgtattatcagcattttcacaattaccccactcatagtatcctacagcctcatcccaatattctgcccttgtccccagctgttccgaatataagccctggtgaaatcgcgacaataaatatccttgtaacttcttaatctagtaactgaaagacagcatttatttgtttaacatttactgttatttcacacaggctgagcatttgttatcagcaaaaaggattccagtaacatataaggtgtaaagtgatttgtaacaaattaatgccaaaaagctggaaaaataatttcatttccaagtactttgtagcttcaaacctcagcagaattttaaaaacttatcaattaatgtaatttttatttgaagaatttattatctgaatagatctttggattcaggtcatttcccatatgaatgacgccagctttttcctcttaaccattctcagttatatcttaacaatattggcaaaaaagcatagagaccacgttattaaaatttttaaagcattgcattttaaagacttttaaaactagcaaatagaaaaaaatcaagtacctcttacaacatttattttaatatcctaacgtatagtcatacattatatattcctcaatatattttattttagaaaaaatgtaagtaagccacaaacccagaacttgccagttagttatatttagcatgttttccatgtactaacttgaagcagaaaactggttttcaaccaaaaatatgattttatgtgtatactttttctcaaacacgtcaaactttgaaacatattttgcctcttctgtttaaaagagcacagttgaagggagtactctttgtcttgacagcatctggcaaatcatacatttttaattactaatttttgatcagatggggggaaattttcatctaaaaaacgtctccggggttaatcacagatatgtccttgatcttatattggtttaaataatataaaaaccaaagacagaaatctaggataactgtcgggatgtttctgccaatcacagtggtccagcaccatccagttaaaacacgttcactcccacaggcctcagctcaattatcccaggaaattctgtcgaactgctaaaaggaacaagagatacaactgtgttggaaatgttctaatttcccttttaatcctctccctctatctccttctttacctttataagataatagttatggaggggaagtggcagtagtgctgtaaggaaccacgcaatagattgaagttcaaggcttctcggtttaaatcacatctctgctaacaacaactctgagatcattgcaaaattacttagcctttttacaagctagttacttccaactccctcatctataaacatatgaggttggactaaatctccaaagccttttccagttcccaaaccctgtaattcacactgcccataaaaaataaatgtaactctgggatgttcattttctaaagtaaagttgtaaagagtctggacttttttattaacaaatgccagaagctatatggaactttgtgggtcctcaataaatatcaaacaatcaactttatctttcatctgcaaaatggggtgagtaatgctgacttgtctcccagaatttcgtgtgagaaataataaatgagaacaaagcacttttcagataatgaagtaattcgaataagctgttttaataagtctgcggtctagatagatgatgcaagaataaagtgtcttttttattattacatctctgaaatacaagagtctttttacctatttaaggagaaacagtcattatccttgcttatcatcaaaaagtcagcatgggtaatttctgtgcaaatggaatttttcatatgattttaacatttatcgcttttaacacaatgcagcttttattcttacctgatatcaaaatggaatcatatcttgatttaaatagtttaatgaggcattgcatcagcattatactactctgctcaatgaaaatgctttctgaaatgactgataagctgcacaaatgagaaaattgtaaatttgataatcttcctactcaaaagtaatacaattcaggaactgatactcaggaaaatgatatattgcattctggcttcctggagacttctacagtatggattttttgaacgtttatgttcagtaaataatatgttctatactttttacagtgtttcaacaaaagacagccagaagacaatctgatgatgacaagttctgtggtcttcctaagaaacaaggtactaacactaacttcaatctatttagtaatctctaggtaaaatatcaagaaatcttatgaatacagagtaaagcctcctaggacagaagtatgtaattgtgtgctttataaatcttactcttttttttattattattatactttaagttttagggtacatgtgcacattgtgcaagttagttacatatgtatacatgtgccatactggtgtgctgcacccactaacttgtcatctagcattaggtatatctcccgatgctatccctccccactcccctcaccccacaacagtccccagagtgtgatattccccttcctgtgtccatgtgatctcattgttcaattcccacctatgagtgagaacatgcggtgtttggttttttgttcttgcgacagtttactgagaatgatgatttccaatttcatccatgtccctacagaggatatgaactcatcattttttatggctgcatagtattccactgtgtgtatgtgccacattttcttaatccagtctatcattgttggacatttgggttggttccaagtctttgctattgtgaataatgccgcaataaacatacgtgtgcatgtgtctttatagcagcatgatttatagtcctttgggtatatacccagtaatgggatggctgggtcaaatggtatttccagttctagatccctgaggaatcgccacactgacttccacaatggttgaactagtttacagtcccaccaacagtgtaaaagtgttcctatttctccacatcctctccagcacctgttgtttcctgactttttaatgattgccattctaactggtgtgagatggtatctcattgtggttttgatttgcatttctctgatggccagtgatggtgagcattttttcatgtgttttttggctgcataaatgtcttcttttgagaagtgtctgttcatgtccttcgcccactttttgatggggttgtttgtttttttcttgtaaatttgtttgagttcattgtagattctggatattagccctttgtcagatgagtaggttgcgaaaattttctcccattttgtaggttgcctgttcactctgatggtagtttcttttgctgtgcagaagctctttagtttaattagatcccatttgtcaattttggcttttgttgccattgctttggtgttttatacatgaagtccttgcccatgcctatgtcctgaatggtaatgcctaggttttcttctagggtttttatggttttaggtctaacgtttaagcctttaatccatcttgattatctcaatatttgcagaaaaagcctttgacaaaattcaacaacgcttcatgctaaaaaatctcagtaaattaggtattgatgggacatatctcaaaataataagagcgtatctatgacaaacccacagccaatatcatactgaatgggcaaaaactggaagcattccctttgaaaactggcacaagacagggatgccctctctcaccactcctattcaacatagtgttggaagttctggccaaggcaatgaggcaggagaaggaaataaagggtattcaattgggaaaaagaggaagtcaaattgtccctgtttgcagacgacatgattgtatatctagaaaaccccattgtctcagcccaaaatctccttaagctgataagcagcttcagcaaagtctcaggatacaaaatcaatgtacaaaaatcacaagcattcttatacaccaacatcagacaaacagagagccaaatcatgagtgaactcccattcacaattgcttcaaagagaataaaatacctaggaatccaacttacaagggatgtgaaggacctcttcaaggagaactacaaaccactgctcaaggaaataaaagaggatacaaacaaatggaagaacatttcatgctcatgggtaggaagaatcaatatcgtgaaaatggccgtactgcccaaggtaatttatacattcaatgccatccccatcaagctaccaatgactttcttcacagaattggaaaaaactactttaaagttcatatggaaccaaaaaagagcccgcattgccaagtcaatcctaagccaaaagaacaaagctggaggcatcacgctacctgacttcaaactatactacaaggctacagtaaccaaaacagcatggtactggtaccaaaacagagatatagatcaatggaacagaacagagccctcagaaataacgccgcatatctacaactatctgatctttgagaaacctgagaaaaacaagcaatggggaaaggattccctatttaataaatggtgctgggaaaactggccagccatatgtagaaagctgaaactggatcccttccttataccttatacaaaaatcaattcaagatggattaaagacataaatcttactcttaatctcacacaatataattttgccataatacaattaatacaagaaaattattttaattaacaaaggcatgaaataaccttatcagaatgtttgtgatagtgttgtcgatgttatcatgagggttccaggaaggtcaagtaagaaaaattatctaagatgcatcagaggctgtgttttcatagacctataagggaagcctctggaacctaacttggtaggagtggcaaatgatttgattcctccaaagaaaggggctagcatgagttttctatggtttgcactaaatgccaatcaaagactgcatcctttttaactgttctcttgccttcagcacttgatctaacatttcttgaacaattatttgttatgcagagaagagctgaaaactgtagccacagaaacatcttccacagacagaatattttctgcctccagttttccctaaaatgtttgtcttctgctgaaaagaaagactgtagcagatcatgtattatgattttttgtctgacaataaggccttattcaatgttcaaaaatgaaaaacattaaaggtggcagaggtagggggtaacattagctgcccatgataatgaatgtgtacatacaggcccatctttgaaataacttcagtccaaactaatatttccttgaaaatggtgccggtaaattgttgaaagagacactggaataaaaccaggaaattgtttcacagcaactactaaccactcccagtcaggctccttttttgccattgtgaagatggctgggaatggattgcaccaaattctaacacccactgaactattaaatacagaccttcaatggacctgctcctaggacattatgaatcatccttcaaacaagggtgcattcttaaatgagtgatcctcacccatcacttcaagtggcattttttcacaacagcaaggtggtacttagatcatcttccagttaatacacggtgtttgaatgcaacacatgatgaagctgaacttttattctctcatgaaacactttaatacactgcttgtaaatttacatgcaaaaaactctttatttgacagttttccatttttagtgatttcatatttaaggagaaagatagatcttttttaagtctactattatcctcccactgtgcctttagctctctcaagaaataaatgcaaagctacatgtaagatcattgtacaattaggatcagaacagctacgaaagaattaaacaaagtagataagattatttctacctggcctcccatacatacctcacagagctttggaaagaatgaagagaggagatttttgggagaaaaatccctgaagtgtttttcttataaattattcaattaccatgtttttaattaaattatgttagaattaaagggaaaatgcaaagaaggccacaggagatgaagagaaatgacgagtatcaagtgtaatgaagagatccttggaatgtttgatcttatcagttatcctggctgtcccacagagagcaatgcaaggaagggctgctagtatctgttaagcttagaagagccctgtcattattctaccatgtatagacaattagtacccatctgcccacagaaaaaggggaggagagggtggtaaagggaaacgaggacctaattatgcaatattgtattgattactatctgtccatatcttgttacctaatttgcataatcaaggtcaattacctctagatttttaaaaattctgtagggactcagatactaacattttaatcatattttgtctgtaatattttttctgtgtacatacttaaatacaacttattgatgatatttttgattagtcatcttagagcagtttctttagattcctttattcctgaacatcagtaatgtaccagaagggaacagcatattgttttatttgtaaggactaaggaaacatcaatccttatcaaatgtttctttaaaaacctccctgatgactatagtgtgcagggaaatcagcagttagcatgaaaacaagataatttggaatacttagtaataaaagaattaagtacctaaatagctaacaaggttgatttcatccaaccatatttctctaaactgttgcagatattatgatcattcagtccatgtaacatactatgcaatgaaaactgcttattacctaattaatgaatattcttcaaatatcctgggatttcatggtgtactaggaaaagcagtacatacttcaccagtgatactctctttatttggtagaacaataaaaagggccttttatataatgtttgtcagaggcaagattttctaaagggactagacaagttctctaaagaaggtaaaaaggaattattatttaactcttcctctatatgctggagggaaaagggatgatgagagccaactgttttcccattgaaagtataagcatttcaagtgcactaagtttaagactggcaagggattgccaggaagttacattattgctaagtcaaggaattttcctaaggaagaaaaaaataattaattggcaccatttccatggaaactcaacagattcttcaactcagtttccacattttgaaaaaatgtaaggaaaaatgctgaggactttggatcacagataaaattttccatcaaaacagttttaaagtcaattttcccaatttggatttgaaattagaaaatactagtgctagaaattagaaatttctagtcagaaaactgcatttgccagtgtgtttggaattgatcaggattttgaagtctggcttatgttatcgaagctcacagaggactgattcatacccccaattccaatcattaaacctataataagggaagatggctttccagtgactggattgcttgcattatttggtctctgccagataataaagtttctataaaatatacttagtcattagaagatttctaagtgaacatgatcaagtcaaaaatgttgaaagaatttaagggctccttattcaaagatggaaatatctggctaattttccttgttttacaaaatcatatatagtctagggtcaagtttgttcacatcttggactgtacagaagggccttttctatctatatcaagatcatccccatcttaccgtggatatgacacgtggcaactgatgaggttcaagcattcttaacaagctgcctccctgtaatcatagattacatccacagatctcctcagccatatagtcaaatgaaccttatcaagggtgtgttgttgctctcactcttagagggcaaaagggtagtgtaggcagctaggcagacacgagcagggcaggagagggccacccacccaggaatgtcagacgaccaccaggtgatggttaggtagttgttaaactgtctctttaaaaccgtaattggtcacagccagtgccagtgaaaggcagtctcttaatagacagaaaacacctgaagctggtcatcagcagcttcccagtaagatcgcaggagttgggcaagtgggcgcaagcatgtgcactaagaggcaaaatggtagggtttaactggtatgtgacttttctctaggaatgctcaactggtaagggaaaaacacctaaatgagcatatgcacaacttcagtaaacatactgcacatgggctcctcccaagtgctggcagggctctgcgtttgcagatagcccaccccaaggaaaaaccaagggaggagagacactaaccccataaccataccaatgtttaaaacctcatgtcaagtgttgaacagtgcacttggatctctcaagttgcccacttggccctcttccaagtgtaccttagttcctttcattcctgctctaaaaccttttaataaactttcaatactactctatctaaaacttgccttgctctctcctgtgccttatgcccctcagctgaattcttgcctccaaagaggcaagaatcaagttgctgcagatctgtacggattggctgttgctaacaaaaccatgtctttgaagggtaagtttctgtgggtaggaggagcacatccaccctaaccaactgcctataccagtcacttccaactctagatgagcataagaattatttgcagagcttttaaactttggttgcctaagccctatcttagatatggactaaaagtcgaatagatgagatagtaatcagcaataatctcaaaatcaacatgtgaaaaaatcccaccaaaagaaactatgtttcagagaccacatgtggtcaaatttagcccctaagtaaattatattttagcaataatccacacaatacaatttaaaacttttgccagcatttaagaccatgcttcctgaaatattcaaatttccaaccactccctattatataaatgtataacttgcaacaaatgactattaccatttgttatcatgctttctgtgttgttttcttatatttggaacacatttctctaaagtcataattctatcaaaagtgagtaaagggatatagagtcaggttatgaaaaaaatgaaagaacatttatttttgctaatgaaaactattcaaatgtatttaataagcaggtactaaatattatttgctcagtaattttatctgcatggcccctatagtttatgagcttgtaacccctagtatagtccctgcccaccaattcctcactcgagactacaaaatcattattggctggtcttttgtagggcaggagtgtgcctactcatgggaaagaggtagtcaggcaacatatcctttctgtgttctataagtgtgcattgctgtagcactttgataaatgttaaataataaaattgtctagaagcaggagacctggagaaatggggaagatattacccttacatggggaaaagagaatgctgatctctgaggtattttcatcaggctgtttttgccagtactggatatattaaacagaaaagagggaaaattgtcaaaatgtggtcatttgtactccataaaagaataatggcctcagttcccttttccagtatacttacatttccatttgtcatattgctcacaaaagttttttgttgttgttaaagtcataccttgaaaattttgtgtaatagctcagtttttgtctaagatagcaatatgttcgcaacccacagtgttgtctctcagaaatgaaatcaaagcacacacaaaaaagatgaaattcttaataatagggagaacaaagactggaaaataagcttactggaatctagaactaattctaattaattctaaggttgagaaaagttaattgagacaaattaaaaaatcagtagtctacccctactgtctatgaaacaaatcagtcctttgctcataataggaggtagaaagatatttaatccctcccttacctcctgaccccagctacctctctgctacataaatgttaatttttacaagtgctctgtgtcccagctctgatctttccatatacatgcagaaaatattccttccagttgaaagtgggggtaggagggtaatgctacacttggctggtcctgggactctaaagtaaagctctaaaatggagggatgggaaggtcaagaagtctgttagaaatttatgcatggacttagatacatagtgccagggaatcatgtcccgcctctatcgtggcagctgcattagacaaaacctgctaaatcctgggatcttgagttgcgaactgcacctattaaagttttctgcagtcccaggaatttgacctgaacacaaggaaagagccaaaggacacataaacaccaaaagccttggtgaacaatgattccatagatgtgttctttttttctttttttttttttttttttttttgagacagagtctcgctctgttgccaggctggaatagagtgacacgatcttggctcactgcagcctccgcctcccgtgttcatccgattctcctgcctcagcctcctgagtagctgggactacaggcgtgtgctaccacgaccagctaatttttgtatttttagtagagatagggtttcaccatgttggccaggatggtctggatctcttgacctcatgatccacccacctcggcctcccaaagtgctgggattacaggcatgagccaccacgccagaaggattaaagatgagaacaaacaagtaatatgaaaagttcataaactaaaactactccagaagaagggaaggagagttttttttgtaaagactcagaataattatacttctgttaatgatttatttatttaatgagtaaggttgccagatatcatatcaaaagcaccaagctatcaacatggaaataatgggaaatacacacacacacactaagcactgagcatttttcagctaacaattcataactgcttaaatatgaagctttttataaatattttaactttttcagaagttctaaggcggtatgtgttaatttgaacttaagtgtcccactttcaggttcagtactaggcagttggcaacaaaatgcaggggccaaaaaagaaaatgtcagaaaagtttgaactcataaacaaatggaaaatatggagaggaaatagcagcagaaatttgaggttaggctgagatgaaagcaaaatatgtgaaagacattttagatgagataccagaatgagattaaacatgcgacatgaagaaaaggtattgacaagaggaagtatgataaaaataaaataaactaagaagctaaagtttcaacagcaaattaaaatccacattggtcacaacaaaagggactcacactaggtgaaaataaatcagtgacgtagagaacatattgaagaagggtttgttctcagtacatggaaagaccgaaaacagtaataagatgtggagaacagagatacaactcaagtatgacaggtttttaaaaactagaatagaaaatacgatcaatgactttattaagctaatctttggagaagtgggaagctggaggatgaataatgcagattgagtgggctcactatgagacaggaaaaagtaaggagagttgctcatgtttaaaagcaccctagcaaatctttttgattataaggaaaaagaaacaatcttaaaagtattgagcaagtactttaacttacattttctactaaaataaatcagaatccattaaaaaattagagaatctgtgtgacagaaacttgagataatggactaccaagtttatttgagaaaaaacttcaacttaagaagtttatatttagtcaggtattttgctcatgtaagaagaaaataaatataagaatttttggatatccaaaattttagagaagatagccattctgtcattatgaaagtattaaccaaaacatattctaaccaatgaggaattaaacaaaataaaaagcttaaaaagaaattacattattaaaattactgaagtaaacttaaataattattgtaaatttatttataagacatgaatgtaaaatattggtaataaagaaaaatacgtaatgtaacataattattgctaatttagtagcaataatctggttacaatgaccaaataatataaaaatacttaggaactagaaaaaaatgttttttcattcattactttattaataaaaaaagataaaaaatctgaaattttaaaaagtaaccactactttcaaattccttcatatatatgtatatatgtatatacaaatacatatatatgtctttataaccacatacaaaacaagattatgtataacagcagtcatcacaataaattcatatcagttaaaacattctcacagagcagtaacagtcattgaggacaaatggtgctgtgttaatcatctgcataacgatagttcattaaaacctcaaagatatcttatgagatattattttcctttttaaaatggattgattatttgtaaccaaggacacagagctaagaaatggtagaggtgaaatttgaactcaattctgttatactctgaaggccaaacttgtaatcaccttctgtactattcacgtaatcgtattaacaactctcactacaactttcctgagctttaacagaagcctgaaacacgacaaagcacattacatatattagctcctttaactcttgcaacaactctgttagaaggggattatttaccttcattttatagacaaagaaactggagtttacaaaaatggaatgagaaagagctttgagccctcatctacctggctccaaataccatgttatacaatctccctcataaaaagatacagactgaaatgtggacaaaagactgtagcggcagaaaaactccacctctatcttcttaggataccagccaggactgagaattaaattgatgtaaaatagattaacaagagaaaagcataatagtttcacatggcactggagtcctcaaagaaaatgaagactcaaagaagcagttagtcggttacttacctactgaattagacaagaatagtaaactgtgaaaatggggaggcttaaaagataagagttattctaccaaggtctgtacagaattcttttagtctcaacttctcctctgtgaagataaggatattgcttttccttcttgtatagagtgagtgtctttaccgtgggaatttagtcttctgcttttgggaaacaactgaaaggtcagaatcatctttcttgcacctgctttttttcaatttaaatagttgatgtgccagagtggtatatttttaacttcttcaagccaaaataaaactatgttctgctttaaaaagatacatccccgaaaataccaaggaaatactcattaataaaattatgtcaagtgataaataaaaagtaaaaatatcactagactaatgaccaaggaatgtttgtatacatttttaactcaatagttaaccaggataagttttgccagtgagttatttcaaattcaaataagagaatttttatattatatgaaccatctcatggagtagaactattaatgtactagttattttattttaaaaaacatgatgatttcagttgatgaaaaagacaaaattatagttcaactattcataatttttaaaaaatcttataaaatagaaagagaataatttctcaacattatcagaaatttcttattagttcagaagtagaggtattcgtgttagggatagaaacaagataaggatgcctactattaatatttttacttaccattatcctggaagtttctagcaactgcaataacatgcatctaaaataaaacgtgtaattattgggaaggagatactttctccattatttttagatgatatacgtacatgccagaaaacctgaaaacatcaactataagactcttaaaaattattttaactagctggatataattaatacataattcacttttttatataccagaaatattagtttggcgacatcatgaaagaaaagaaattattcactgtaaattcaaaacatacacaaaaagtacctattaaaaagatagaataatgctattttcctaacgggaaattaaatcctctcaactctttctataataacttatacatgtaagggaatcccagtcattttgataatttacttttcctttagggagagagatgacagtttgaaagaatgtttctaaattgatagagaagataattaagaagaattgaaaggtaatcacttgggaaaaaaaaagattagggcaggactagtggccatatgtgatattaaagtctgttacttactcaatgctctaagctacaggactcagtgttataatgacacaagaatcactggcaatgagagaaaggtttagattataaaattattataaagcttgtgtacttatttgaattgaataatgcaaaatgctatcaaaagtgaaacagtacaaacactccctcatcctactggtgagactgtacatgacaacacattccaggaaaggagattgacactaagtatacatcaatagctttaaaagtgatcatactcaaaaattatatttttatgagtctatgccaaccaaataaataatgcagccagtgattcacataaaagacttagaagctccaacaacatataattgtggagaaaagtggaaacaataaaaaatcccttagtaagagaatgattaaatactttattgaatatacaaactttggaatataatgctcccattaaaaaccatttttcaaagaatatttaatgttatggaaagattcttaggctacatgactaagagaaaagagcaggaactatgtcagtataaccctaattcagaaaaaaggaaagaaatggatacttaaaaaggaccaccaagacgtttacgatacctgtttctgaagagtataataatgagtggcagttatttcagttttcagtactcttctgtattttctaagtggtggagaaaaaaaatcatgttctaaaatcacaatcattaaaataaaacatcaaataccaggtgtggtggctcacacctgtaatcccagcactttgggaggccaaggcaggcagatcacttgaggccaggagttcgagaccagcctggccaatattgcgagaccccatctttactaaaaatacaaaaactagccagttatggtggcgcacgcctgtaatccctctactcaagaggctgagacaggagaatcacttgaactcaggaggcggagattgcagtgagccgagatcacgccactgcactccagccagggagatggagactgcctcaaaacaaaaacaaaaacaaaatgaaacaaaacaaaacaaacaaacaaatctcaaagaatatatgcaaccctaaagttaaggggatgcagaggccttacttggaacttacaaataaatcgatagaccaagcatctcctaatggacctgagcttatatacctaccaagtcccaaattaaataacaaaaaataacttaagctttaaatctttgtcactagttctcgctctctctctctctctcttgctctctctctctttctctttctctctctctctcctgctctctctctctttctctctttctctctccctgtttctctatttctctctctctctctctttctctctctctcgctttctctctctctctctttttttttcttaagcaaggtctgctctgtcacctaggctggaattcagtggcgatctcagctcactgcagccttgatcttccaggctcaagcaatcctcccacctcagcctcccgagtagctgggactacaggctaatttttgtagagatgggatctctccatgttacccaggctggtctggaactccttggctcaaccaatccacctgcatcggcctcccaaagtgccggggttacaggtgtcagccactgcacctggaccctagttatttaagtcctattactgaaaagttctttccaagtgccataaactaatttggtatgatggtacagtatggtgtgacatcacattgatacttatagtatgacatagtacttacagcatggtatatctggcatggattgaaatggtatgcattccatgggaaagcctaattataaagtggcagaaattttttatattgtaaaagcaatatagtattattatagaaagttagagatcataagaaaataattacatatgtaatatggcatcacaatagaataacacatattttaaaatttcttttcatgctttattatatatacaactttgatactgctaaaattttaacgtgtatataattttgtatcctgcttttgtacttgttataatataataagcactttctatgttgccacaatctttattttttaaatgactacgtgatttttattaagtaaatattttctattttaattactttttgttgggcaatcaagttgttttctttcaaattttcaataaagtccttccagccagtctcctagtaaataattttaatgaaaagcccaatttacattcttacctactctgtagatttatatactcactacaatgggttggttgatgtttatatgaccaatatttgatcaaatgtaaatacttgtaaagagaaattttttaaaaggaattaattttaaaaactgtagtttaccttaaagcttttacactaaaagacaagagtctaccatacatacagttagctgtctgacaaatgctttttaatgaaaattatattaaattcatactaactcttctgaaggtaaactaaaaaaaatacaaaattaggaagacagaaaacctttcattacttctttttacccatcaaattcttatctaaatgcaataaagaaatcttgtaaaccctaccaaaaattacaggttgcatgttttggtttgacttgtatacccttagaataaaaggtagtaaagtgcctaaatcatttttctttgcagcttctcatgctaatcctaatttatcaagacaaatgctttaatctctttactcttaaaaaaaaaaaaggtaaaagcagatttatgtaaaaatagattctgaagagaaaagacaagtcaagaaagcctctctgttgaatggaaatggtgagaagggaaaaagtaaaaaaaaaataataataataaaaataaagaagaaagaaagaaagcccccgtgggaatcagaattattggccacagagaaattttctgtgcacgtgaatctttttggaaagaaaccctctccatgtccctgttccaagattcactgttacagtccttctcaaaactgagaggaacactacaggccattccagaacaatcccaaggctcaagtcctcttcagacatataacatttgctatcaaatacttgaaacctcttttccagaacaatcaatcctagttatatcaacaaattcttattactgtagaatttgaatgccctccccatttcccaaatccttgttaatatcgtctggatagtcaaattcatctgtttctttcttgaagaggcagtcccagaaatgggcatatccctccagggatagctcactggtatacagttaggtaggactggctattctctcctttcagactctgtgggcatatttagatttgatagtatattaagatgtgttacctacccctcctgaaataatacaaaaagtatgttgcacttaatggaaatatgtaaatgagaaggtacaaactcaaatgagttccagcagccaggcaggtagcagacatgtgttgtcatccaggaactctaacgtgtggcaaggattgcagtaacctagagagtacatagcatccttaaagtcatgcaggcctatttatgtctttaaacaccatggcagacaagggaaacactgagttcacccatggtctgccagtttgctaccactgtgcctcaagccaggccacaaattccttttgtgctgagcaaataatacatagcatgctccaaaataaactcttttgaaaaggaagcatttcactacaaaatgaccaattatttatttaaaatctttcagaaataaattttcaaatgatcctaagccttttgtgacatttggatgttggttaacgtctcctttcccaaagatagaaagactgtttattctaaagatatttattgttagtattaatgttaacatttatctagcttactgtgtggcaggcactatgctaagtattttgtgcacgtgatctctgataaacctcagaaacagaagacaaaattggcactgccatcaactagcgaagtatataacctttgctactgccctttctctccttgtccttttctgtcttagtaatgagacacttttttttcacccataagactagtttccaggcacctccatccttagaaagaaactcattaaaagtgtgctggtttattctttaactgctcatagagagttaagaagaagctactccaatggcttatttgtagagtgcttttgttcccagttgtctacacctggactttctgttaatgcaccctccccttgtattttagacagagctcggatagagagtccagccttttctactctcaggggctgtctaactgatggtcaggaagaactcatcctcctgcaggagaaagtaaagaatgggaaaatgtctatggatgaagctctggagaaatttaaacactggcagatgggaaaaagtggcctggaaatgattcagcaggtaatattggcccagtgttttctgggacattccctcacttgtggagcccctagtttgttaatgtttaattttcatgaggaatacaggtaactgttctttcatttttaactagccactaaggaagatacttcaagaaatcaaataatgtttgaaaatatccagatattatgttcaccagccattggtgaagtcaatcctctaacccagtataccaaagctaatacctaatcagcttataatacctgtctttagtagagtgagtgttttttgaatcttgttgctgaaattaaggtaaagcatctttacactgaagggtgtattatgtatgccaggcttaaaaggaaaggggagtgagacaatgattaaaatcacactaagcaacagtcctaaataaaatgcaataagtatttatcttctttctccttaaacatttatttttatatacgtacacatacacacatttacatatatatgttcaaatattaagttaaaataagctcatcttctgtaaatataacttacctcctgagatgggattggaggacatggttctgagatgagaatgaaaacaaaatataccacacacaccccttgatattccttagtgagagataacacggtcatattcccatattccatctttcactccaaaaatattttaacaatttttttcttcttatcacagaaatcccattgcttcagaacccagttctagatagctgtttgattaaacacatttaataagcaaatttaggccaaagtataaataattgataatagcttaatattgtaactttcccaagagataatttttgtttaaaagacgatgcttaggaaaacatttttaaacaataaaaaagaatcaaaatagagaaatttcacacaatatagtagatgggccaggggactttcccagtacatctgagatcatgccttgttagaaaccacctgtctctaagggcagttatggttgtgggttggtggctgaacctcatccagattttgtgacactaagcaaaggcagttgttatgttgccaaataaatgctaaagaatactgattgtagagttctgcaactcttcattgttcatgatcagaattacaatattgcttctcaatcatgtcaatgtcatcaccaatacacatgtgtttaggtgcagacctacaaatcactttcctagcaatgttagattttatagattttgttgaagtaagtcaattgtatttcatcctcctaagacccttaaataataacgttttccatttagagttatccaacctaaatatcattttggaaattatttcactagttgtttcatcaaaccctggttgtttctattttgtttgtatatttaaatttaatcttgtttttaggaagaatttaaggtgcttcatactcactacttagagactgatctgactcacctaataataaggttataatgggataatgaatattgttcatgcttattttaaaaaattatttttttaaataaaggccaacagatactaagattactttccataagcaacaaagtttaatgacttggtctgaattctgtcagaggaatcagtcagtccttaacataagggactgggccaaaatccaaacaacaaaaagatgaatattcctcctgtttcctcaacacacacacgtgcaaacaaagatgcattcctatgtacttttcaatatttttcttgcagcttggaaaagtatttgtttgtatcctatgaatataaatgaagttatcagaggtaactgaagtcatattattattgatgaaggaattaatctaggaaactaagaaaaaaatggcacaaacatggagttaataggggaagctggtttccagaataactaagaatcatgtagaatccctggcgttgaagatgaaatggtggagaagggaaaaccttgcccttcactgtcctcacccctactcacagtcacagagtaagaagaagagtttggcaccactggtaggagagatctgtaaggcaatggaaacaattaaataggaaaagtggtttctaggtttccaggaaaatcctgaggaaagagtgctattcttaagttctgttctaaaacaagattattaaatgttagcttgttttacattttgcttaaaaagataatgttcaatatttggaaatcaaagaaagatcacagatgtgctaagaagaggaatcctgttatgttcatctgcttttaagtctctgatttttagaattagaacactgggaaggaatgtgccatacagaggctgagatgggctcaggcagcagcaaaccatcactatgtagcccttctgcttttggacaccaaatagccaatacagaccccacaagaattgggttggcaaaacaacttcccaaagaattgcactctaggatccaatcttgactctaccacttataactatgaattgggaaagttactgtacctctctgtacctcagtttccatatctacaacatggaatgacgacattttacatccacttcattaagctgtgagaattaagtaagataacgtggaaagtatcaaggatggcaattgagacatcataagtagcaaattaatatcaagtagcagcattggtattgctaatagtagttgatgttttcatcttgatccataaaaatttgaaaatcataactatgtcctggttgtttccacattaaggagaaattacgacaactacgagactgcattattgggaaaaggccagaagaagaaaatgtctatagtaagtaagattcgcctgctattcaaaaataatagagtgattacgttgaaaattcaaggactgtggagatgattgggcctgagttcaaatctaaacctcaacaattcccagctgtctaacctggagagggtcttaatctctggtagtcaaattccttgtctgcaaaatatgcatctataattatatatgcatctgagggtgcttgtgtaagttaacatataaaatacttatcatattctctggttcataatgaaagttcataatgaaccagagaatatgataagtattttatatgttataaatataataaatgcttgttactctctttcttttgatgtctatgtaagttgcaaataggacaactctgctcaattttttaatgatccattatataagaaatcaaggccaggcatgatggcccccacctgtaatcccagcactttgggaggccgaggcggatggatcacttgaggataggagttcaagaccagcctgccaaatggtgaaaccccatctctactaaaaatataaaaattagccggccatgatggtgcatgcctgtaatcccagctactcgggatgctgaggcaggagaacccccccggaaggcacagagattgcagtgagccaagatcacagcattacacgccagcctgggtgacagagcaagactctatctcaaaaaaaaaaaaaaaaagaaatgaaatgattaaagagacatgctttttaataagttaaaatattaatacagtgaattctcacaattgtcaacatgtgtatcattttaaaatttctaataattgaaagttgctttggcagtggaggttaggggaggggatactaagccaatcaaacattattaagaaggtaaaacttttgctaaaataaacaacacattccaaaattaaaaataaattacgttatcactatctgaccactgtttccccaagactctccccctgcacagataattaaaaactagcagccactaaaagagtgtgaaagcttccatctcttccattttcattaatattgcatagcttttagctagtccttcgtgttgaaattcatttctcttcatattatacagttatctttttttctagagagaattcttaagcactttaaaatgttttctaaaacacaaatatactttctaaaataattaaggtcataaagacagggccatcttacagacacctccattctaatatgagtaagattaaaattttaatgatttataaaattacaagttatataaataattttaccaaggagcattaaaaagctaacatttattatcacctatacattattgtttcttacaataactctatgaggtgggcaatatttccagtttataaataaggaaactgaggccctgagaaactgaaaaattaaaggacacatattaagtgagaagccattctgtttaattcaaaatcaatgctcttaattatcagtgccttaattatgaatcaattagttctcctttcagccgcactggaataaataatactacacaaatctttctattgcacaggacactattaccaggcaaatatatgaagcaagtgatattaggaggcagacagtaggtagccaaagactatgaataattctagagacaagcagtactcctgaggtgggtctcattatggccctggtctctgccagaggaatatttcctgactacactctgagcaaaacaaagaagttctgttgaactgagaagacagagatcttagttcagggcagctgaagctgctagaatatgtgtggtgggtctctgagagcaggtggctgtgtagagaggtagcctaagaggtccatgggaaggattccacaagtctgtggctgagagatgagctgtacatgtgtaaagcaaaacagtcaaagcatgcaagacagcaacttctagggtattgaaagcaaaagagagacactagaggttgagcagagttgaggaaaaagccagcctgggagtgtttaagttctggccctgtcaaattagggagatcttaacacctccataaaatacctgacattctgctgtgacacccaaaagatgtaatgagtaagaactatgatttagagtaagatctactctagacatgccctaacaaaatctcaaaccaagccccaacaagatctatctgggagacagagtttgtaggctgactgaatctacaaactcagggccttaaaaagaaaacaccttgggctttctatcacaaaaagcccatggtgaaaaagaataaaattaagtctatacaagttcttgacagtaattgagttgcctactaaaacgagaactaccgtcatcagaagaatattctagaatccagaatatacaacacattatctataatgtccagtgttcaattaaaaaaagaagacatacaaagatacaggaaactgtaatcttaatgaagaaaaagaaactatagacggaacctgagatgttggatgttgttgatcttagcaaacagactttaaagcaccttaaacactgaattagtgaaaaatgtggtttaaaggagagaataaatagggaatctcagcagaaaaaaaaatgaaactatataaaagaaccaagtagaaagtatagaaagtaaaagtacaataaaatatataaaaattaatcagatgaacttattatcaaattggagatgacaaattaagagttagtaaacaaaattaagacagaccaatagaaattatccaatttgattttcagagagataaaaagactttgaaaatgaacagagtcccagcgacatttaggacaatataatgcattctaaaatgcatgtaattagaacccaaaaggagaaaagagtgaaaagagccaaaatattttttaaaaaatgatgaccaaaaacttgccaaatttaatgcaaaccacttgcatattgctgaaaaaacttttaaaaaccaaacttagcataactgttaaaagaaggacttctaggcaatttattttcaagctactttaagccaaggtaaaaagaaattcttgaaagcagccagagaaaacacacgttacatataaaggaaaaaaaaattcaataatttattatcagaaacaatggaggattaaaaatacaataacatctttttttttttttttctcaagacagagtctcgctctgtcgcccaggctggagtgcagtggcacgatctcggctcactgcaagctccgcctcctgggatcacgctattctcctgcctcagcctcccgagtagctgagactacaggcacccgccactacgcccggctaattttttctattttttagtagagacggggtttcaccatgttagccaggatggtctcgatctcctgacctcgtgatccgcccgcctcggcctcccaaagtgctgggattacaggcgtgagccaatgcgaccagccaataacatctttaaagtcctaaaaaatttagaattctaaatccagaggaaatatacctcaaaaatgtgataaaataaagacatttaagataaatgaaatgagataattcatagcaaaattacagtagaataaatgcttaaaaatatcatacaaggtgaagggatattaacaaactcagattctcactgagggaatctgtgggaaaaagaatactgaaattatacaaagcaggtagatataaaatattatgttttcctttttctcataaattacttcaaagacaattgtttaaagcaaaaataatgaaacttaagttagaagttatataatatgaagaaggaaatatgaaagcaatcatgcaaaggacagtggaggcagataaatagaattatatgtttccaaaattgttacgtggtaaagtttaaagattcagttacaaagtaggaagaggagagagagggtaaagtaagcagtctgatgtgtcaactataaggcatgaagtactaaggggtatactactgtctcaaaatctaagttaaagattcatgttttattttaaaaatagaaagaaatcagttaaaaaatagataaaaagaactatatttaggaaacctatagaggaaataaaatagattattaaaaaactatttgattcgccaaaaataaagcaggaaagtagaaaaagaggaacataaaaaaatggaaaagtgaggaaccaagaacaagatggtagtatttaactaagccatgtcataattatattaaaggtgactgaattaaatgcttcttttaaaaagcagacattttcagactggaaacaaaagcaatatccaaccttatgctgtctaaaagacatatattttagatataaaacacagatagatagtttgaaagtaaagtatggtaaaaggttcctatgacaatagtaaacataagcataagaaagctggcatggctatatcaatgtaagacaagataaatttcaaaatagagagtattacaaaagataaacaaggatattacatacagataaaaaggcagttcactagaaagatagagcgattctaaatatctgcgttatataaaataattttatattatatatatgaattttactaaaactcctgaagcaaaatctgacagcactcagagatgttttcacttctttcttagtaattaatagaacaaatagacaaaaatcattaaagatacagaagacctaaacaacactatcagctaacttgacccaattgacatttacataaataattttttaagtcagaatacatatttattaaaggtatacatggaggttcaccaagatgaaacataggctagatgatcaaaaaagtttcagtaaatttctaaagactgaaaccttcagagtatattctctaaaagatttcagtcttttagaatcttatattctcttaccacaacagaagtaatttagaaatcaattaagaattatatatctagaacatctcccaatatatttaggaattaaacacaacattcaaaataacatgagggtcaaataagaaatcataagaaagtatttcaacctgaataataatgaaaaaatatcaaaatttgtgaaatgcaggtgaaacaagtatgtagttaacagttctaactaaagggaaatgtattactataaatattatactagaaaataacaaaaagctttaagtcaatgatttaagtttccactttagaaaaatagaaaatgaaaagcaaaccttcaaaaagaggtaagaggagagaaataattaagatcagaaatcagtaaaaaaggaaagagataaacaagaaaataaaatcaaaagtaagttgtttgaaaacataaataaatttgataagcccatgggaagaatgatcaaggaaaaaaaaagacaacaagatacctaaattaggaattaaattgggttactacaacagatcctacagacattaaaaacatactaagggccaggcacagtggctctggccgggtatggtggctcacgcctgtgatcccagcactttgggaggctgaggcaggtggatcacctgaggtcaagagttcaagaccagcctggccaacatggtgaaaccctgtctcttataaaaatacaaaaaattagcgaggcgtggtggcatgcacctgtaatcccaactattctggaggctgaggctggagaattgcttgaacctaggaggtggaggttgcagtgagccaagatttctccactgcactccagcctgggcaacacagcaagactccatctcaaaaaaaaaaaaaagatactaagaaaatatgtagttaactttctgccaatacatttaacaacttagaccaaaaaggacaaattacttgaaaaacaaaacttgccaaaattgactcaaaaaataaaattccacactcctctgagtatacctctttgtacaattctcacttttagaactttgttaatattttacttattcagtaaatgaggacaaggcagatacaggaggcaaaatggaatataagcaaaaaaaatgtattatggataatgagagccaggttttttattgtctgagaaatcagttataattaaggaaagaagaagggctagaatgaatgttatggtattgcactggaattggaagtaaaagtataacaaataattacagagagataaatatggaaatatagttgtatgtacaagtatgtatatttctttaactctttcagctgagaggacctagaggcagtgacggcccagcatcaaggagcacatctagtacccacgtcttagtttatgaaagcaaatggcccagaagcatgtgaaaagatgctcaatatcattaaccattagcaaaaggcaaattcaactacactgatataccaatacataaaaagtataatgaattaccatttgagaagactgttggttaggatgtggaactggatatgcattgtatgcattgcttatgggaatataaagtggagtgataactgtggagaagtcaaatatgcacttaccatatgacctagtcattccattccaggtttttttccaagacagataaatgcttgtgttcacacaaagacttgttcacaaaagttcgtggcagtttcattcataatatccaaactggaaacaattaaactgggttattacaacaaatgcaaatgtccaatggaagaatacatgcttatactgtgatatatttatactatggaatactatttagcaataaaaaggaatacttactattataacaacaatataaatgaatctcacaaacattacacatactgagtgaaagataacagataaaaaggatggatcagacacaagggaatcagacacaaaggaatactacatgctgtagtattccatctatctggaattctagataaaactaatctagacaaaattgtagaagtagaaattcttaggggtggcaaatatccaggttaccagcagcaaatccatacaggcctgcagcaaccccaattcttgtctcctcagaagaaagaatttgacagaggggcataaggcagcaaaagagactgaggcaagtttcagagcaggagtggaaatttattaaaaagctttagagcaggaaggaaagaaaagcatatttgaaagagacccaagcaggcactgtggaggtcaagctccctgtttaaccttgatcctaagactttatatgctggccaacttccagcatcttgcacccctttcccttcattcttccctaagggtgaactgcccacatgcacggtgtccgccttacacttgggaagtgagcatgcgcagtgtgttcagaaagttgtatgcatgcccacataaggctttcttttcttttccagtggaatgcccctggaaggtcatactccaccattttatctcttaatgtgcatgctggagctcactcacctaattactgagaatttattggaagttgattaccaatttcaagtgtttttatctgattgggaaattgcctctgcctggcacctgtgatcaattatcactttagtgaggcaactctggaccatcagcaaattccctctccccggcacaggctgccaattatcatttttagaaaggcagtgtgataactgctgaaccatcacctaatggtcgcctgacattcctggtgggtggtgtggagccctctcccacctcgctcatgcctggctagctacctacctgcaacaaaatcagatcgggggtgccatgagtaatgtttgagtgaaggttgacataagggagaattagggaatattctacggagataaaatggtctctatcctaattaagttggtgggtacatggccatatgtatttctcaaaaatcatcaacctctttccttataaataattgaattgtatgtaattattcctgaataaagttgatttttaaaaagaatgaagtagctcaagctagcggaatatcaaggcagggcagcaagcttgtgttaatgtcaaacatatctaaaatcataataccttgagacaaaggttgggagaggaaaggacaaaagtaataaaaggcatggtttcactcacagtggctggaggtagagaaatttggggttgatatttttagatcagaatgtgagatttcatagcaacctcaaagacaagaagtagtccaacaattaaaaaaataagagagagaatttaagataaatattgaacaaaactcagtagaacatgcttttttttgtcttccagataaactcaccattgtgcaccatccaggtggtaagtgcttggtatttattgaaggatctaagactaaaacaaagtacagagtaaatcaatttcaatattaatgtaaacctaatgtgattaagcaagtcagtgtaaacattcacatagattttatatttatatgcaaaacaacttgacatccaaaataaacgtgaagcgactataaaatagaaacactgaaggcaccataacgtaataaaaggaccgtgagtttggaattcttgattgatcctgctgttctcaacttactaattgtgacctgtggcaagtcacttacgctctgtgggcctcggttttctcatatgcaaaacgtagataagcattgtaccatggggaattgctataaagactgataatgatatatgtaaatggaagctcgtgcttgatacttgggagttactgataaagcaaatgaaatttgagaaacatttgagagggtaactcatttccatgtgatggggggattgtgtgctgatgggatagtaaggaggagctagacgtcagctagggagctgttgaatattctagaagcaactctccatagcctggaccaaaccactgactgtgagaatgaagaagccatagaactgagccctgtggctgggatgagaaatggaatgccagtgataaaggcaggaggagcagtagtctaggagagcagggagtagaaggcgcaggtttttgtggaaaagtgtgttttgtaattggccaatcctggtgaatgtggaaaagaaaaggaagaaggagtaatcaagtggaggttgttactcagaggtgttggaaagattgtttctaaactcaagtgactcctgtaggtcctcagtatcctacccaagtcaatccacatgggcaggagaaattaacagcacatgccaagggtgccttttcggtatcccccttttatcttcctaataatttttcttttcacccatatcttacctttgtagaaatcatttttaagaagtactgaataaataaatcatcaaatttgtgaatgaataaagaggtaataactgagtttgtatttctaggtaaggaaactgcccacaatgaaaataagttttataatgtacacttcagcaataaggtaggttgtatttattttgatttctataaaatgcaaagaaataacttcgttaaaaaagaacatgagagccttctatcctgtctatgcttttagacattctaacagatatgaacaaaataggttaggtgtgcctttgtgtgcaaaatctatgagcatttatttaaggaaattatttggaaaaaaaacaaagagggaactcaaaggaaaaagccactgaggccaaagtgtggctaaattcaacatgtacagaccaaaaaaatcttagaggaattatcaatacatgtgttttaacaatagaaatatgataagtctactgtgtttgaatcacaatgtatacagtccttaaactctaggacattagtagggaaagtatagccccaaaatattattgatttaaatatgcattacttcacatcatagagttaactgaaaataaattgctaacgagaagctaatgataacactaagcaaagacaacagcaatggaaaaccaagaccaatccaagacaacactgataatgtcctgactacaatttttcttcataaaaataatgttattccaactatctgcatatataatgtaacacacttgcgctgctaccaagagtcatgtagcagctggatttcttgctaaaatcctgaattagagtctttgctaacttcttataatgaacgaattttaattttccaaagtttaataaccctttaagttccttgtatatttcaaataagtcataagtaatcataaaaatcattcacccttaaaaacgaattgaagcagttgcattttttattcttctgtagcccaccaccaagctgtgtgtatgtgcatatatgtatatatatatatacactatataatatatagatatatattatagactcattagactcattcaaatgtagcaaaagtgggtgcattatggccttagggcttatgaaaatatcaaccaaagattcttctataagagctgaaggattgcacaaacagggcatatattttggagaggagattttgaataagaggaaaagaatacaaattcccaatgcttaaaatgttctgcaaaatggaaagaaaatttgaattcaaggactcggatgcagttgaactttacaatgattctgtttccttttaaaatggaagattgtcttgccagttttctctgcaaagctgtttttccatggctgtgaaaggcaactataactttgtcatatttctttgttcaaccttaaaatagggacaaatcgagaaatactagctctatatctttattttttttcagcttcctgctcgaccccaagttgaaaaggaatttggtttctgttgcaagaaagatcattaaagaaggtaaaatattagctgtgtatattttttagaaaatctaaagcagccttgttagggacttgaaggtatcatttgtctaaaaaacagaattttttaaagatttcattgtcttctcctgaaaggattaacatgtatttttcaagctaaaggtgattgctctgtagaaagatttatgtacaggggtgatttaatgccaattaatcaatttaaattgatgagctattattcactaatacatttcctattttctcatttccaggttattataatgaaactcacgaatctacggacattttgctttcagggtgaagcaagcttgaatttggattgcctgctctctttaaagcgaattcatactatgacagcagaaacaaaacttcagatttcagaatttgttattggcaaaatttattctcattatacctgcttcatatgggtatattactattaaaacagaataccatagagtaattgcattatttgaaaattctctcattttacaatgcacttcaccaatgaaacagctaatttccattttgaaaattaaaagaaaacagcacagagaagttaaatgcggtgtagcaaagttatggggtctgcttgagggcactaacctcaacagattattcctcctctccttagaataaccatgaaaatacaaatttacttagcacatttttgctttttaagtagctggttcattttctgaatttctcacattcagagttccagtcattattgttacatcatgtttgcagaaaccttgtcttatttagtgtctatttgcatataaccctgaaaacattattatttgaaaacttttctatatctcaaattaatatacattttcataacctacctttgtattaagacttgcaattttatcaatctattatttcttagaaacaatttactagcttagaatagaaagcaatgttatcgtcatataattttcatgtacaaatgccacaaataaattgaatgtttaaagctatgtctgagtttttaaagtaaatttataagaattagccaataaaattgcttctcggccttttggctaagatcaa

SEQ ID NO: 252 - DNA, 77161 bp, Homo sapiens
  source 1..77161: mol_type = genomic DNA; note = NC_000012.12:113221429-113298589 TPCN1 [organism=Homo sapiens] [GeneID=53373] [chromosome=12]
agcggggttgagaggacggtaggcggtggataggagagctggcgcagctgccctggtggcagtggctgaagtggcggcggcttcggcggctgcggcggctgcaacagcttcgggctcggggttttggcggcggcgccggcgggctaggctgcgcggtgcggaccccggcgcgcggtccgggttgctggggcggcgcgtgtaagaatccgagggatgcgacggcttggcccgagggagagggcagggatcaggggtcagaggacgcggagtaaggggttgcggcgcagcactctggtgtgggaggtgggccgtacgggcccagagggggcgcagggaagtctccaccgcgcttctctccgtccagcccgggccggggctttgcaccctctctcctcgcccccgacttcttagggcgaccctcacgtgggctcccagccaggggctgggagcacgtggagctggagccagctgtcctgcctccttcttcctccctccctcgctcttctccctggcgcccttaggtgaccccacaggagtcttgtgcctgggtcaggctgccccagcggacagcgggatggtagctgaacctcttcccctaggccctttccccagcgctggccagttgggtcctctgtagaggcagaagcaaagcccgcggagggaacactggaccaggacgcaggagtcccgggttctagccctactcctccactgtgtgaccttgggcaagtctcttcccctctctgggcctcatttttgtctgtctggaaaaatgacgtgtttgaattcaaatcaggggactggttctagtcgtaggtgtatatagggtaatggttaagcaggcagggtccctgattcagactgcctgggttgaaacttataaaaggcaagttaaccactccaagcttcaatttcctcattcctaaagtggggatattagctaagataggatttttcaacagcagctcagttgacattttgagccacataattctgtttcgggaggtctcacctgtgcattgaagcaagttcagtggcatacctggactccacccaccagcaatccccccactcccaagttgtgacagtcaagatgtctccagacattgccgatgtccccatgggggcaaaaatcaccccagttgaaagccagtgggcaaaggcagtacaggcaggcaagcagtcatatattaaacagttaaacaaccgtgttgaagcatttgaatgcgaggactttaatctatggtggcagatatcatgaaaattatgcatgaacaacccccctgcctctttttttttagctcatcattaatggtagtgtattttatgtgtggcccaagatagttcttccagcgtggcccagggaagccaaaaggttggacagccgtgagttaaaacatagaaaccactagccattatgataatggtaacattaagaaacctcttctctgtgagttaataaattctcctgccttcaaagtaaacatgggagataattgtcaaagctgagtaatggatacaaggaagttcacgtatatattctctgcacttttgagaatgtttgaaaatatctgtggtaaaaagttaaaccaaaacgacaatacaaccataattcttaagactgccaaatagtagtgtctcatctgggatttcctcttctgcctttccactgctgagatttaaaagcaaaataaatccccagatctggaggaaacttaagaaaaaaaaactcacaggaagtgtgctgggcagagagctacgggcttagcagcaagtagaatgatgtttactttcgctgccttgtttcaaaacgttgtactgttccctgtggatgcacaaggatttgcttggagttgttccaatgattcgaggaagaagtcagttgctcagctgccattgactaggtcagttgggaggcaaagtgggttgagcccagagcccacagcttgaggaaggaacctgctgctgtttgcaagttcaaaggtctgcagtcagatctgctgagtctttttttttttttttttggttcttctcagcggaaacgggaatgtgcataaataggagctgtaacaggctagctcggagtgttttacttatttagttatttttaaatttttagtttatttattttttgagatggagtctcgctctgtcgcccaggctggagtgtagtggcgtgatctcagttcactgcaacctctgcctcctgggttcaagtgattctcctgcttcaggctccccagtagctgggattacaggcatgcaccaccacacctggctaatttttgtatttttagtagagaccaggtttcgccatgttggccaggctggtctcaaactcctgacctcaagcgatccacctgcctcggcctctcaaaatgttgggattacaggcatgagccaccactcccggctgctctgagtgttttaaattgggagttaaggatgagcacttttactgtattaaaaaatactcaccagttaaaaaaaaatactcttttccccttcctcggacacctaaatctaagagaacaactcctatataaaaatgatataaaaatcatacattttggaagtatgtttctaactgttctgagaggctgcatggtaaagctgaagtgaaagatgtattttaaatctgtatatatgagcaagtatatattgatgattgaagctaggtgctgcctaaatacatggcccagactttgaggaattatagtgtaatggctgggaatacaggtttggagtcacaccgtagagctgaaagcttggcttttatttagctgtgggtccttgggcaggatacgtaatctgtctgtgcctgaaatacccaccacacccatcctgtaatggggggataataagcctgcctatctcatggggctattaagaattttcagttaacttttacttatgaagtgctagtagggtccctcatacatagtacgcactcattgagtattaactattattattattactattttgagacgagtctcgctctgtcgcccaggctggagtgcagtggtgcaatctcggctcactgcaagctccgcctcccgggttcacgcctttctcctgcctcaacctcctgagcagctgggactacaggcgtctgccaccacgcccggctaattttttgtatttttagtagagacggggtttcaccatgttagccaggatggtcttgatctcctgacctcgtgatccgcccgcctcggcctcccaaagtgctgggattacaggcatgagccaccgcgcctggccgcatattaactattattttaatggttgtatttttttgtcatttaatttaattaaattaatttatttatttatttgaggtggaatctggctctgtcgcccaggctgcagtgcagtgcaccatctcggctcactgcaacctctgcctcctgggttcaagtgattctcctgcctcagcctacagagtagctgggattacaggcgcaagccaccacacccagctaatttttgtatctttaatagaggcggggtttcttcattttggccaggctggtcttgaactcctgagctcaagtgatccacccgtctctgcctcccaaagtgctgggattacagttgtaagccaccgtgcccagccttttattttactttattttttagagacagggtctcactctgttgtccaggctggactgcagtggtgtgatcatagctcactataacctccaactcctgggatcaagtgtttccgtcacctcagcctcccaagcagctaggcctacaggcatatgccatcatacccagctaatttaaaattttttattttgtagagatggagtcttgctacattgcccaggctggtcttgaactgctaggctcaagcagttctcccaccttgacctcccaaagcgctgagattacaggtgggagccactgtgcccagcctatttttttctttgaagtctttacaaaacttacaaataaatgtaaagagaagtggaggtaggacatattggccctaatgtcactctccagacagaattacccttaacttttcagtatttgttcttgcagggttccctccctccgtattttaatgctattatactgtaataatgcttttattctgtttttatttatttatttatctttattttatttttttgagacagagtctcgccctgtcacccaggctggatggctctatctcggttcactgcaacctctgccttccgggttcaagcgattctcctgcctcagcttcttgagtagctgggattaccggcacgtgccaccccgcccagctaattttttgaatttttggtagagatgggttttcaccatgttggccaggctgctctcaaactcctgacctcaggatccgcccgcctcggcctcccaaagtgctgggattacaggtgtcagccactgtgcccggcctaattcttttattttttaagagacaggatttcactctgttgcccaagccagagtgcagtggtgcagtcatagctcactgtagccttgaactcctgggctcaagtgagccttctgagtagctgggactacaggtgtgccacctgcccagctaattttatttatttatttatttttgtatgttaaatatttattttatttttttctgtgtgtatgcttacccaaccagctttttttttttttaattttttatagagacaaggtcttgctatattgcccaggctgatctcaaattcctggccttaattgatcttcccaccacagccttccaaaatgctggggttacagatgtgagccaccccaccggccaatttttttaaaaattgagttttaatttaccattttattattttttaaattaagatataatttaccattttattatttattttgagacaaggtctctgtcacttaagctggagtgcagtggcatgatctctgctcactgcagcttccacctcctgggtttaagcaattctcatgcctcagttacccgagtacctgggattacaggcacctaccaccaagcccagctaattttctgtatttttagtagagatggggttttgctatgttggccaggctggtcttgaactcctggctcaagtgacccacccaccttggcctcccaaagtgctgggattataggtgtgagccaccgcgcctggccctagttcaccattttaaagagtatacttgagtggtttttattcacgaggttgtgcaaccatcaccactatctaatttcagaatagattcatcagtcatggctgtattttaataattatcttttatttttttaattcccaaaccctagaagatgcctctaatggaggagtttctgagcagcacccctggcccagtggctttgaaagggagctcaaaccagagactatttcaagccctggatatcatatcctgagggccacaggagaagagaacatggctgtgagtttggatgacgacgtgccgctcatcctgaccttggatgagggtggcagtgccccactggctccctccaacggcctgggccaagaagagctacctagcaaaagtaagatggtggggtgggctggggggaccccagcttttctgtttcagaggctgagaggtgataagcgctttgtggtctgatagtaggggtgtgtaacttgttgcctggccccacatttgagccccaagttctgatacagaaactactcctgggaggctgtgtgtttctccttccacacccccagcttggcagtgtttctgggggcctagctgcccctcttggtgccctcgctaccttctccactgcctgccttgcacctgaggtaccttggcctgcctgtggatgcttggtggggacctcaggccaacctactttggctgccttccctgccccattccttgttaaaaaaagaaacagatttcaacaccagcctccgtctgtccccatctgaaaccgttggcaggaaagcagcactgcccgcgtctctttgctccatctcagtcccttcttgcccaggacagcggggaagagggcgagtgttttgtcatgatccattgatttgagggcttggggttttgctttgtcttcctctgaaccaaagcctagcacaaagtgaacccaagtgcggcaaggagctttaaattttttaaattttaagtgtgtttctggcagaatgagaggccttgaaaacctttctggttctcatcccgaagccatttgtttcagttgctcaggccttgggctcaggagaggcttaaaataactcgccttttctggagggtcctaagacatcaggaagcagtgctttagggtctgcttagcaaatggatgttccaccgtctcccagtgctccccagtcagggcagagatgtttggggccaaggagagacgagccaggctctcccgtctcatttgtccagggagaattcagttgagttgcagggagtttggtggcctcccctgggaactgatgaaggagagcagtgtttccagggatgtgagtgtggtggggagccctggctgcctagaaacaggcctctctttgcttcactgtgttcaccctcatctagggtggcagagctggattgcccagaaggattcgaacataaacttgatttttccccaagtgccactcagggatgagaaagcagtggctctgatttcagactatctgttttctttctgaaatccctttgcaaggctaggcagtattatccctatttacagaggaggaaactatgggtcagagaggtcaagtaacttgtctgaagtcacacagccaggaaatggttgagcagagatttgaacccagcatcatctgactccagaattccttccccttctcctcttccttcttttacttcttcagctgctcctccctctccttttttcttcatcacccttaataaatgtgagcacaggccaggcgtggtggcccccacctttaatcacagcactttgggaggccaaggcaggaagatcacttgagcccagtgactttgagttcaagaccaacctgggcaacatagcgagacctcggctgtacaaaaaaattaaaaacttagctgggtatggtggtgcatgcctgtagtcccagctactcaggaggctgaggtgggaggattgcttgagcccaggaaggttgcagtgggctatgactgcaccactgcactccagcctgggcaacagagcaagaccctgtctcaaaaaaataaaaggtgagtacagacctttagcatttatattatctcctcatataacctcaatatagggttgttattattatctgtattttacagaggaggagacaggctcagagaggttaagtgacttgtccaaggtcacacagctagtaagcagtaaagcctgtctttcctcccacaccacagtggaaggcgctttggggaaagggatgaaagtgattgtggctcagtttcagctttagagaggaatgctgcctagtgagggagggtggttggcctactaagggtgtggcttgtgtctggaaatagccaggcttaagattctaaatgggaatcctggctgtcatcgtgagtgtcacttttaagtccctccaacgtgcctgacctgatggtggggtgtccagctttcctgtgggatgaaaggggcaagagagcaacccagtcctgtgtcaagatcaggctttgaatgttgatgaataggaaataggccagagacacaataagactccccttggctaggccactagcaaggctgcttttatcttggcaaagtcagtggcttgctttggtttgtttctcaagaataaagaaatgtataactaactgctggggtccagggacattgtttttcctgtacagcacattagtatcttagtttcttctctcagcttcttactgggtcattttttaaaacctcaatgacttgtgggtgtaattcaccaagcctggctgggaagaagggtaggacctgtgcaagtaaacaagagttttcagaggaggcctgctctgccttagcatagtaggcctttgatatttcatgcttggattttggccttgaccttctaccccagcgtccccctgtccctgctgtctgaggagcagtccttcagtccttttttttgagacagtctcgttctgctacccaggctagagtgcagtggcacaatctcggctcattgcaacctccgcctcccgtgttcaagcaattctcctgcctcagcctcccaagtagctgggattacaggcgtgagccactacacccagctaatttttttgtatttttagtggagacgggggttttaccatgttggccaggctggtctcgaactgttggcctcaagtgatccacctgcctcggcctcccaaagtgctaggattataggcgtgagccaccacacccggccctgagcagtccatctaaaacacaagcccaacctggttgttgccttgttttaaagcttcctgggactttcccatccctctatgggggttggggagggcaagctcttcagctggcaacgaagccttgcgtgttctagtgccttcttgcttgaccagtcccatttcctgcctcagtccacagcatcatactgcatttagttcggtgaatcccctgtgcattcttaaacctttccaccttgctggcaagtcagtctagaatccctttctcagcctcttgtttgctcgtggcctccagttctgtcttgaaaatcctgctgataacaccatctctttgaagccttcactgaacttccccttcctgacagagctaattactcactacccttttctgcttcggtatcttgattaggcttccattattacaagtagattatagtggggtaattacacatttaaccatctgatcacctactaggccctgagatccattcatctttttttttttttttttttttttgaggtggagtatcactctgtcacccaggctggagtgcagtggcaccatctcagttcactgcaacctccacctcccaggttcaagtgatcctcccacctcagcagctgagactacaggcatgtgtcaccacgcccagctaattttttgtattttcagtagagcctctttccttggctcccaaatggttacctttttgctgtgtccccacgtgattgtccctgagtctgtgtgtctgtcctcttctgataaagacaccagtcctattggattagagctcatccatatgaccttgttttatcttagtcacctttaaaggccctttctccaaacacagtcacattctttcaccatgttggccaggctgatctcaaattcctgacctcgagtgatctatccgccttggcctcctgaagcgctgggattacaggcatgagccaccatgcctggcccatccatttgtctttgtatcacatagctcagtgcccacaatatgcaggtactcaacaaatagtggtcagaatcaacgtacttggatttctggggcctcgcagcccatgggagtggcagtgtaagggcccgagttagaggtgggcagcctccctcctgccgcctctcctcaccattgctttgagtcccattgctctcagcacagctgagtgtcctggtggctgccatcactgacctttgtctttggttgctgtaaacctttgaagtactaaggagttggcagaatgcagatgcaggccatccgcggagttggcaacgacatgagcatgggctactgggaacgaagcaagctttctaaggctgagtcaccatcaagcctggcctttgttttggcccagcagccgctgaggccttctcagcactgtacctccacgctccatgtctggttgggcacccctaacaaaacaccatggactggtggcttaaatgacagaaatctaatttctcacaggtctggaggctggaagtccaagaccaaggtgtcagcaggtttggtttcttgcgaagcctctttccttggctcgcaaatggttatcttcttgctgtgtccccacatgattgtccctgagtctgtgtgtctgtcctcttcagataaggacaccagtcctattggattagggctcatccatatgaccttgttttaccttaatcacctttaaaggccctttctccaaagacagtcacattctgagctactgggggttaggacttcagcctatgaatttgagggggacacagttcaggccatcacactcctacccattcttcagaggcagggactgaggaatctggctgtgctgcctgtgacctttaaccctatgtgagggccttatccctgcaggaaactggagggtttgggtttttctccttatatgggcaattgtggatttaatccaagactcagacatctttgggctctaagtgcggctgctgcagtgctaatgaatgactcacaggcagcatggtgtcaggttgataaaggaggcaggtatgagcagaggtatttaaagcctggaaactaggaataaccttgaaaacagtcagcggggccactgttagagcagtgtagagacagaccacagtccacaccgcgtgacaggcggtggtctcacccaccacattcagggaatcaggacgagtctgaatgtagtgggcagtccaaggaatttcccagggtaactctggtcacactcagctctgccttctccctgcctttaaagccagctgctgcctaagatgggctggaccatgtgccttttctgagtgaaggaaggattgggctcgcgggggctggctgaggtctgagcaggatgctccgtctctgctttggtgccgggttgtttatggttttcaggtgacaggtcctgcagctaaggcccaaggtcacagcgcagagagctgacctctccctccttcacgccgatgcctggcacatcatctggagttccctaggacacagtgcagcctcagcaatgtggaggatccctgccccctggcaggggcccccatgtggcaccctggtccccttttcagggtcttcatgcagccagggcgagttggcaccaggctcagtcaaggtgggccagagctgttggccgcagggccgccgtagccaggaggagttgggagagatcctcgccggctggcaccagagaagaatacaccccgaggtgtgcgctccatcactgatgtctgtgccgtggctctgcctctgaccagatggccccagcatacttgccaaagagtgaagaagcccaaggggcttgcacagcttttgtcacttgtgataccatggtgagtggagtggttgagctgagtatagtgcttagctgctctaagcctcagcctgctcatctgtagaatgtgaccatgatggcatctaccagtagagtcgtcatgggggattgagtgagagcatgtgtgtgatcacatggtcagtgctcagccggtcataggcattattatcatggcagaaactgggcttccttggaatatcctccatgagcagaggtcctgaacccaggccacgattcagatccttcttgcctcactcctggcacagcaggtggcccctgccaagctgggacgcctccgtgtagcagctggagaccaagcagcaattagattttcacaggctcccaccgagcttgggcatttggctccgctggagtcattcccctggctttttcagggcctcaccaaggcagagcgtcgggtgtcaccagaccagcagtggtgccaattaaaatgagtaagcatccagcatgctgggcgagagccttgcagccgagccttggagctttcacttcctcagccctccacatcttcatgggggggatcctgtctgttgcctcaggccccctgccatgagatgccatctcttcccgtccccctttcccgcacacaagacgctgccgctctaaatggcagtcgtggcagctgggtgcaggctgaagcacctgccactctcctccccactcgcctgggggagggctgagttcacgtttcctctgagagcgcttcatgagccagaaccgtgaacttctcagcttccccatcggggaggcaatatgggagggcttggatggctcacagcagcgtgccgctgggggcatcaggttgcagtgccctctgcggggaggtttcaaatgacagcaaggtagcccaggaacaaacctggagtgacgtcaatcttgagacagcccccacgccgccttcctgctccaggagccctgggtggctctccattcttgcccttggctagagtgaatcctctggttcggacatcctctgactgtcacccttctccccgcagtcaggtatgcctggggagaggatgtgcctgggtcagggtatgtgcagtcataatcatggcctgtgggtgttgagccctcgccgtgtgtcaggcggtatccaaagcacttttgtgctgctatcatttggtcctccctcccagcagatttggggggccgttactttcaatatcatctcaaagaagaggaaacggaggctctcagaggttgaaacttatccaaggtcacaaagacactttgacttcctttgaacccatgtctagtgactccagaaccagtctcttacctagtatgcccccctccgtgaggtagagctctgtggaagaggtagcattttaggctgaatttctttgtttcccaaaaggaagttggtttctatctttatcctttttttaaattaaacttttatttcctccaaggcaattattctaaatggagttccatacctagagctccctttcatattgtaaaaatagcacaactgatggcgtttcatggtgaagctgtgttggatcatcccagagaagctccgagacagggcaagtgaacaccagaccacaaaggacagctacagtgtcaccatctgtggaaactaggcttttcccccatgcacgccttttcctgattcttcctctgcatagagacatttggctactttttccatcatggtggttagaacaagaaaatttgggcggaaaatgggagttctcaggagccaagatttgggcctgggaaaggaaggatgaagaggagcagtttggagcggggcatgaggttagactctcaaggccaggtgggcttgctgagggcagtgatcctctgaggttgttgactcccagtggcaggtgaccccttatcaggacttgcctggtagaagtccctggactgagccagataactaaattgggaccattggtgcttgtgttgccttttgtaccgggtaccctttacgccttgtttgctttttgttggagatatttatctccttgtaaaaagtgcagttctttccctaccccagtcatgaggctctggctcagaggaggtacaagattgtagcaaaaaatttgagagctgggccaccctggggcctgccggaccaggggcatactggggccagtgtgcactctctgaagggacaactgtgatttattctggctaatcattgtcgtgtaggatcacaggctgattgctagcacatttgccagtttttcaaaagaaattagaacctatatttttaatcaaaagtcttttgatttgtaaatagtggcaaccaattcatatatgtcttcaatgtatagtgaaatctggtcagtaggctgcccctgctctctctgacgtagaacataccgattcaccctttgttttctgttcagagcagactacttcaaattaaggaaaagagtacaaaaccaacaacaaactctccatggcccttgaggttatcttcctcttccagtggcttccagtgggaatcagaacaggtcaggcagtctcctctttgccactaaatgctttgcccaaagaaagaccagatttcatttggctttgggatcaaagctggggctggagggtggaggtgtcaagccaggccaggcaaagggagatttgaagccagagcaggtgggcgcatctcccaggaaaccctgcatcattctttcctggtgattctttccttctttgttatggttcacatgagtctatggagtgctcattctacattctccgttcttatcttcatcctatgcaactttagaccgctactgttttttaaaagtgatttgatttgggctgtaacctttttttattgttgttagctttgactttgaaatgtgtaataaagattcaagtgagcattagaagtttttttaaaagtagtggtttaaaaaaaaaaaaaagaaaaaagtgatttaatagctggtcttcttttttccttaaatcgtcactttcttgtcaactgaaaaactaagtcgagttactaaaatggccgcacatttaggacttagaacagctgccctggaagttagaagaagtgcgtcaagtatagttacagcttggtctggttggcagtgagatgagtatagaacatgctgcttttgtggtgtataactctagaagggtttaggggaggtggacatggcttcccaagaaggtggaagatgggggcaggaggagatggcgtgcttcctcttggtgaggggttggggtagcatccagattggctttagagatcggattaagcttgagtgtgctgagtgtctaaggagatgaacaggaagtgaaagattctcccagaagaaaggaataggggaggaaaggtatacatgtgctggagtgggtggcatctgagtcagagggttggggagaaaggttagatccaaatcttgagggtctccttgcctgcactcctagagccatactgaagaggagctggaccttcatcctggggtggcggaaaagccccgggcactttaagcaggggaatgaccattgtttttcagggtagtgtctgaacattcattcatgctgccctggcaagagcagttggcaatgatggcaagaccgggcagtgtggaggtggcccagggacacggggtgcctactgtgttttgcctgaactgtgttttaagaggctgcataaccaagcagttgctgtgcacgtacagcttggcatctgagtctcccaccccccggcaccccatgtttgttacctgcctggtgcctgtaggcatttgagtttgtagcccctggttgaattctgacggtacagccctttggctggacaccatgcagctcagccaggggagtagcagaagatcaactatggacaggtgtgacttaggaagaggtggagtttggggtgctggggagagggaccgaacatcccagggaggggaaatggcataggctgaagtaaggaggggggttgcagtgagtcgagattgtcactgcactccagcctgcctgggtgacagagcaagaccctgtctcaaaaagaaaaaaaaaaaaagaagtaggaactcttctgagacccacaccctggacggggccagagactagcatgctgggggcagattggatttgggtgtggttacatgcactctggggtcagacccactgagtttgaatccagccctgacttctcctgctgggactttgggcagatgatgtaacctctctaagctttgatttcctcatccgtaaaatgacactaatattagtattaccttttaggactgttctgaggtttatacaagatagcatgcctcacacaactagcacagtgcctggcttatacagaatgagcattgggtggatgtcagccattataattagggtcaggggtcagagcaggcatatctgttttacagagtgcctaaaatgctgatggcaggagtttggacctggttgagttgggcatgggagctgctaaatgtgtttgggccagaaagcaagtgatgacagagcatcttcctgctgacatcttgccagctcgggatgctgtctctagccaacttgataagccctgagcttagaaaccctggggtgggtcagccctgaataggggttacttttccctctggagattgagaggtggatggagaggaaactgccaggctattctgcagtagtaggagccggatttggcatttttctctctgtgtctgtctccctgaccagtcactgaacttccccaggtcccagaagctcagctcagtagctcagttcctacttcttttttttttttcttgagttagagtcttgctctgttgcccaggctgcagtgcagtggcacagtctcggctcactgcaacctccgccttccgggttcaagcaattctagtgccccagcctccccagtagctgggattacaggtgtgcaccaccgcaccctgttaatttttttgtatttttagtagagacggggtttcaccacattggccaggctggtctcaaactcctgacctcaagtgatctgcccacctcggcctcccaaggtgctgggattacaggcgtgagccaccatgcctggccagtccctacttcttaagaggcactcaggaagcatctggacaatgctgaacagatgaggactttcataggctcacctggcctggggtctggcccaggagggtgctctttgatgagaaacatcccagcggtattgggcatggaggaagcagctagtgaaagaaaagcagagctgatgggaggaagatgtttgactgtgcccagccctgccacatatctcccactttgccctccctaatcccaccacacccagctcttaggatcagaaagtacgttgaagttccagggccactctcctgaataaaaagtgtggcttctgtttccggcagataagttcctgctttgttccagtgcactgacacagtcccctgaacaacccatcttgggttgatcaggaagttcttagtctgttcagatggcagcctacctctcattttatcatcctccttcacgataaagccctgatgttctgcctttcccacttagtggagaaacctatcctcatagccacacttccggtattgaggaattggcatcttggaatacagcttgggtatttggatgacaaattattaaaaatattctgatctctttgcccacatattttagctgtagaagcaagcagagagcatcatgttactgcagcagcagtgccgcttattttttttccttaaaaaacatgatttaggggtcctagttttggtggcttcctgcttcagcagcatttggaagacttgcagatatgtcctgtgagtgccacgtgggtgtgacccctgctccttggcctggcaacaatccagtagctgtatattagagtgtcctttttgctaccttaaatgaccaagtcttccccagagccattcttgctatctcttgctatccacctgcctcggcctcccaaagtgctgagattacaggcatgagccaccactcctggcccttcctgtttatttagctgaaggccttgagagccttccctaacctttgaggatagtggttgtgtttccacagtctctcattctccaggtatgctgtttatacctctttctctgctcttcacggcacagagacccactcgctccccagcaccgggatgtgatcgatttgatgattgaatcagagtttgctttgtgccatgatggattgtgagaaaatggagttttgatgaattaggtaatttaaaatacgggtgggagccaggcgcagtggttcaccctgtaatcttagcactttgggagaccaaggcgagaggatcacttgaggccaggaatttgagaccagcttggacaacatagtgagaccccatttctaaaaagaagttaaaaaaagttagccaggtgtggtggtgcacacctgtagtctcagctccttgagaggctgaggcatgaggattgcttgagcccaggagtctgagactgcagtgagccatgatcacactactgcactcgagcctgggcatagagtaagaccctgtctctagaaatacatatatacatatatatttcaaaataaaatataggtgggagggctaagtttggcaaagaatcctttcgtagtatgaataatacccattctgttcatccagcatcaagcagggttttgtgaatcctgctccccccagctagggcttacctggtttgtgagtttctttcttgtgtctccctgatgcctgtttgagatgactgggcagggcagggcaggaaggtagaggcctaacccagtgtaatgcctgggtgttaatggctgttgttttaggtgctgatgttttacacagctgtgcctctttctggtagtacaagttttgcaaaggcagggatcatgtctcttctacacatattctgggcacaataatagacataatagaagttgcatatctgggagtgagtcaccggtttccaaaaacatccagggtcccaggtgactgtcacagctaaaccagcccctggagccactggagggtgacaaggagactcattcacatgtgatcagaccagaagtagcccagcagggcatggcgttgctgcccctaggaacagcctactttttggatgtttgggtctctgcttccagcttcgaactccccaggagcccacacatgtccaatcccaaccttccttccatctaagcttccccgtcgccgccctaccatttgtagactgcctgtctctcttttttatctctctttttgttagattgggattttattatttttttttcctaattctttcagcacttgctgaaaaccagcttgggcagagcgacctgtgcttagtgctggctaatggcttggagctgctccaagctgccggctgcgctgcctttcacttgtgggtggtcgtcgacaagcatgatgtcttctctctgtgactctcgaggggcctctcttcttgcgggctcggctgttcacacttggctggcctgcctggttgtttggaattgcagtttttactgcacagcctcgagccagtctggtagcttcaacagggcgcagattttatgagtgctaaagtccactcagcctccagcctagttggcccatttgattttgttgcatgttgttttttgctatttcctcttggagaccagacgccgtccagagtgtatggggacacagaagtctataaatggaggtggcttgggagattcttaggctgtgatgaatgtgtgtctattgaggagtgatggtacctgctggtgtctacaacggttgaacattttctgagtgtcgcgcagtctgcaaaggatggggttgaatttctggcatcgtctcttgatagctgaacatccttgaatgaggagctgagcttgttttttcctaagttgcagtttcttcattgtaaaatcagtatatgattgtctacagtcagagtctcaacccatgagtaggtaattgaaggactttctgcattgaggatgtgaacctttcctccgttctcacattcttccggttcctcttaagggatgtgagttggtagtttgcattttctgaagtgttgtagcagttgagggacagtagttaacttccttgactaccattcctgttgtgttgcagggagaattaaaaatcaagcagctccatctcctgcccattcttttttttttttttttttggagacagagtctcactcttgcccaggctggagtgcagaggcacaatttcggctcactgcaacctcggcttcccaggttcaagtgattctcctgcctcagcttcccgagtagctgggattacaggcatctgccatcatgcctggctaatttttgtatttttgtagagatggggtttcaccatgttggccaggctggtcttgaacttctgacctcaggtgaactgctcaccttggtgagcctccctaagtgctgggataacaggcatgagccaccgctcctggccactcctgctcattctttagggtggcttcttgatttccattgtattttcctttattcacaatgctccttttgggctgccttccccaccaacagaaagggaaactgaagcaaaaggaagggaaggccgaaagcagtgcctggccattgactgcataggaattcagggccctggagaagtggcaggcctaggccatcaagctctctgtgggatgtagctgtcctccagctgtcacttccccaatgtgcccatgcttgcttcatggccgcctcacctcttgttactcttcttctgaacaaagccacctgcagcagcagcagcagcagatccaggtgctggggcgtggccagtgttcatggaagccgggtccagccagcccccaggtgtttctggttaaggactagagcggacttttgatctgtgctgagtggatgccatcagctgacacatcagtagccttcatgcagcttgagtctcaagccaaacttgttcttccgagcactggctttctgctgacctcttgcaggggaaccagagcgcaccagtgcacagtgaaaaatgcctttaatctccatttgctcttctccggctcccttccttgtccctgggtgtttcacaattagcatttcagatgcttccaagtgaatatggaacagatgttcgcacaggtgctgtactcttcactgggtaaacagtggcgtttgcgtgcctctgcgtgtgtgtgtgtgtgtgtgtgtgtgtgtgtgtgcgtgtgtgtgtatgagacagcaggaagcatagggcctttacaaatgttttttaaagcgtctaaaacactttacacatgacgggtactcaataaatactttgtgagtgagtgagcagtggcagggaaagccctttgtttcataataaacccagtggcatgggagcaggaagtacaattccaagttgggtcttgaaattcatggactaaagaagaagtcatgtcctgcctcaccaagaaattacccgtggacatctggcaaaccggggggcatgctgtagggacaagacacagttctccatctcaggaaggaggattagacaataaaaatgaccgtggcggcccctggcaatttaatctgcctcacgaatgtgagctggccacggctgtgctgggaaaaggaacttgcggttttgcccatgcagaatgtttgcagatgggttagggagttagccaggactgacctccttggctgtgtttttccaagtagcacacctgatcaggttgctccacaccattagtccccagtggctcaagtccaggccctcagcatggctttccgcctggcctacacccccagccttgcggaaacagtggagggaaaggtgagggcttggctgcccgtcgtttcctccctctgtgaccttgggcaagtcactcagcttctctgggccttagtttcaccctctgtaaactggggataataatcaagtcttgtttgtagggcctttgtacacttagaagaattaattaacgtaaagccctttcaaccgtgtctggtgtgtggtaagtactgaatgcgaatcgtggctgttacctttgcccactgcgtcatcctggtcactggtctctggcactttaagcttcagaattacagaaccctctgcagtttctcagacgtgccctgctgttgaagtctctgtgctctctgaatgactatccttgtttctagaatgtgccactcaccccatccccatccaccctgtgaatacctcctcatccctcatgcttgaaatgccagccctggcattcccctgagttcctccctgccactggccaccagcccccacggagggcccttgtcatcccagcccattttagatctcagtgcaccagagtcacgatccttcattacctactgatggagagttccatgagggcgagggccatggtttcaccttttctaatccaacacctagcacaatgcctggtatacagtaagtgctgaataaatgtctcctcaaattaaaccatatgtgtttgcatgtaggtggtcagtcttttaaaactacatctggccgggtgcggtgcctcacacctgtaatcccagcattttgggaggctgaggtgggtggatcacttgatgtcagaagttcaagaccagcctagccaacatggtgaaaccccatctctactaaaaatacaaaaattagccaggcctgatggcgggcgcctgtattcccagctatttgggagactgaggcacaagaatcacttgaacccgggagatggaggttgcagtgagccaagatcgtgccattgcactttagcctggatgacagagtgggaccctgtctcaaaaaaaaaaaaatactacatcctccctttttctccccaaaattatcatgtgatttattaagactagaggccaggcacagactcatgcctgtaatcccactccatgggaaagcatggctcatccctataatcccagcactttgggaggccgaggtgggtggatcacctgaggtcaggattttgagaccagcctggccaactttgtgaaccctgtctctactaaaaatacaaaaaattagctgggtgtggtggcaggcacctataatcccagctactgaggaggctgaggcaggagaatcacttgaacttgagaggtggaggttgcagtgagccaagattgtgccactgcactccagcctgagcaacaagagtgagactccatctcaaaaataaataaataaaaataaaaataaaataaaaaaagtttagaaaggtgttctcaaggcaatgtttgcaaccttaggatgtctgttgtgtgttcctcatgtggacggttaggaagtgggcatctcaggctgcagtcactgcccccgatgattttgatgtgctcatttcccagcccctctccctgcctacattctcctctgtcccctaactcccaaaagcctgtttctgatctgcacccctcctgcctttccatgtctttcacactccatttatagaactgctctccgcttccttgccccatcccctgccagttccaggctccctgggcctggcctcatggatgacagtgaacctctctggacttggccacttaggtccctttcaggtggccggaaacagagttagaggagacacagggcattatcctgaccactttcacaccagagtccctccctctagaacagggcttgacccgtggtactgccccgttgagcctttctttttccctttcctcctttggcttaagcctttggcaggacagattttgggctggaggccagcaattcaactgggagggctctgtgccagttcttgcctttctgaaggttggtacatttgcccagggctctgcttgggtttggagcctttactaacgtgtgtcaataatgcgggtccaccttccataccatcttgcaaccaattatcagaaagagaaggcctgagcagggggatgtgcattttgctttctttcggcgtagcatctcatgctagatttttatctgggggcctttgaagagccagccggcacagaagcatggtggcaacgctgtgcctggaaaactcatcagtgtcactctggtttattttcctctcctctttgagctctttcccatggtgtggggctctcagtgacaactggcaagcggcggggcggttgctcgttgtcattctggtaggcgctggtttccggagggctccgagtgctttgtgagtattcgcatttgtttctgagatgctgggagcacggttggcactggtcccagtttctggatgaagaaactgaggctctggggattaagatcgtgaactgtggggagtggaggaggcacagctggagtgaacttgggtgtccagggttctgtttcgtctcacagaggatgtgcgagggtgtatgtgtgcatttgagaatgtgtgaggttgtgtgtgtttaagaaaatgagaatgaggctgggcacagtggctcatgcctgtaatcccaacactttgagaggctgagctgggtggatgacttgagcccaggagttcaagaccagactggggaacatggtgatgaaaccctgtctctacaaaaaaatacaaaaaattagcagggcatggcaatccatgcctgtagtcccagctacttgggaggctgaggtgggaggattgcttgaacccaggagataaaggctgcagtgagccatgatcgcaccactgcactccagcctgggcaacagagtgagaccctgtctccaaaaaaagaaagaaagaaaataaaaaggagagaggttagaaaagggggctgggcgcggtggctcacgcctgtaatcccagcactttgggaggccgaggcgggcggatcacgaggtcaggagatcgagaccatcctggctaacacggtgaaaccccgtctctactaaaaaaaaatacaaaaaattagccgggcgtggtagcgggcgcctgtagtcccagctactcgggaggctgaggcaggagaatggcgtgagcccgggaggcggagcttgcagtgagccgagatcgcgccactgcactccagcctgggcgacagagcaagactccgtctcaaaaaaaaaaaaaaaaaaaaagaaaagaaaaggggtaggcccctcagtatcacccttcctgagaacagtcattctctgctttttctgatcagagctccctcccaggaggggcccttttatccaaagcgatctctggcccaggcaccaaagaaaggccccagtggtttacgcagccgggctgccccctgcgcctgctgggtgaggggtgggtcgtggaagccttcccctcctgcctgttctttcctgctcctccccagtgcatctttatagctggcatatggaaactgtttctatttatctggcaccaccaggacgctgctgcatgctgtgctccagcaaacagaaaccttggattccctgcagggtcatttccgatgtggcgtgcaaagcagccagctgtttcgagggagcgtctgggccctgtgacatcagcatgtgggagtgttaccgtgtgtgcaaacaggtcattctggtttgtctgcctgtcctctgcaccgggatgtctctcctgcttcgagtcagagtttgcgttgttgttttgtattctcatgcctgtcagttcagctgtttctttccactccttcccgtcctctgagtggttttacgttctctcctccgggctgattgccaggattcagggagggaggttaaggggctggtgccacataaatctttagtggccaaagtctgcaggcctgcaaggctgcgcctgtcctcttggtctggttttcccaagagagctgtctgcccagggcaccagaagggcaggacaaaatgtttcccttcgtggaactttccccagaggcccagaacagagatgcagaatacagtcttcctggttgccaagagtgttcctggtcagcctcctctggtcctttctgaaacctgcatgtggagcttgctggctgtgggagccagggagactgcaaatcctgcccgcctgcccacgctgctgctcatctccctccctcctatgtccggcccggttgcctcccaggaaaggtaaacatgcagaggcaagggctagctgccggccttctggaggaggcagtggagggccagcttcctgacagccccgtggtgaggtcgtcctgtcttctcaagctgggcccctgcgacgtgccccagttcctgcctttccagctggcctggaagaacccgttctgctctgggcaagaacagtgccaaggtcagaggccaaaggtgttgcttcttccgtggtccgtaatgagcaccagttggagagggccagccccggcacacagaggaaggggctggactggggtgatgcggggtgagcctgcccggtcactttgttggctaggatgcttcctgtgctttctgtgcctggtactccaaagatgcgagtgccagtcattgacctggaggttctgcccagggtctgtgggcagtaggaggtcagaacaaggcaccaggccactagagcaggtgggtgtaaacaactgttggcattcgaggctgcccaggtagaggtcctggagtgaacccagtgggcacgatgggcttcagtggggcagagtgtcctctagcttcacacacagtgctgatgactcaggccagctgggggcccctgcacatgctcttagttcccacgtggagggtattcattttgaggaagctgggcctgccgggattggttccccagcaagcaggggctcattctcccagaaaccactccatctgcactcacaccctgactcaccaggctcacatcctgacttaccaggacttggctatcagcctgtcccctttgatctgccccttctgccccctgccttcccgctttctgggcctgaaatgtcctcctcagaaagctgccgagccttcgagcataccttctgcgggaacaacgcagcactcggagtgggagcatatccattgtcccttcagccacttctgcaacctcttaagtggggaagagggttagacagcagacagggcaggggattagcactccacgaggtggcccagccccacccggcccctgccgtgccctcgtcttggctggtacagctgcactgctgcgtgaaggccacgtacaaaaggaacagaatggaactgtggctcctcgccttccatttgcaccctttctataatccctaaatatgtagcccagttgctcgtgccttgatgtgaaggaggccctttgcgatcacctgtggctttcttgaaaagtccctgagtggccagtgtcaccccaggccttccatccctctctccgtgtggagaaatgagcgatcatgctttgccttttgggaccacatgagcactccaagtcctgttttctgaggttgagtggttagaagcacagaacaaagtccgtcctgggagggggagaattcgctgttctttcaccttagctcttgagtcttattctcccctttccctttcaaggttctaccctgaattactcttaacacaaaacagcccctcttccgcagatccttaaaagaaaggtttttacaaatacaaacttaccacatcacaccccttcctaacaccctttggcgctgcccactgcaccccgggtggagcccgccctcttgcccgaggcctgccaggccccacggatggctccttgttctccgccctccaggccctggccatccttaagtgccccacgggggtgtgtggaatcttcagggctagcaagaccttctatttcacttcagttcagacatgtttgctgaccacttacacattgtgtacaacgctgttctggggcctgggaacaccacagtgaccaaaacaaaagtccctgccctcttggagctgacattccaggcggggaaacaggcccacgattaaacagataccctgtcaggtggtgacagccccaggaggaagcctcagcgctttgaggggacggagtgatgtggtctcaccttgtaggggaggccaagggtagcctctgataaaatgtttgtggaaactggaaggtgtgacaaagcagccaaagatcggggaggcagaggccccaaggcggagtgttccaggcacgtttcagaacaacaaggaggttagcatggcggcagcgaggggcaggcaggacgaggtgacttggagaggttgcgggtcaggttccacgagaccctctgatcaagggaggctggggcacgtttggggcagaggagtgataccatttggcttagtgttctttaggatttttgttatattaaacaaaaaagttacctaaaaacacacacacgcacacacacgatagaggatttctctgactggtgtcaagaataggccacagagggaagaacagacagtaggaagacagagaagggattgtgctagtctaggggagagctgttttgggccacagtgtggcaggggagctggtgagagcgaggtcttgtgggccaggtgcagcacctatttgtgggcctttcagctgattgtgggagaggaggagcctcctgattcctgaggcccctcctgccccaagattctctgttggtgcagctgttccattcagcaccggtatggccaggaaaatgtggtctcagtcaccccagggccttctcctgcccccagtcacttgtggcccataagagtgcatcccaagagccctggccaatggagggaccgtctgtgcgagaaccggccacgtgttctctttgatttgggtcatagatgctaagcctgtttcacagctgtatgctgtccatcagaagagacagtggccggcgtaccgcacggcagacagtgggtcagcggagccaccccctacatttctctagtgagaggtgagtggcagatgattgtatgaaggaaagctctggatggggagccaggaagcctggatgctagacctggcgctgtaaccaattggccctataccatggggacatcacgttccctgccctcagtttccccatctctaaaagctgggcaatgaattaggtggtctctaggatctgctcctgacctgacagtcgttgcttctaagacaacagcagaaagtgcctacaattcacgcaggagagctacgcagcagcgcttcccatactctgcagcagaggacctctacttccataaaacacaacaaaaacgaagtactaggagaaggaagtgccgcacagtgccacctgcggtgatggcctctacacgctggctctggttcctggatggttctcatccccgaccatggcacaccattaatggactgtgcagaccatgtggaatgacaccgcccacagttagagtggttccaagcacagacctcatttattctccagctccgtcactttctaaatgtgggagcccccggacaagctgaccaatctctgtgcttctgtcccatcacccttcttctgaaatggggatgctgatggtatccacctcctaaggttgatgcgaggatgaagttatttcacctataaagtgctgagactagtgcctgcctcacagaatttgttccgcaagtgtttgtgtgtgttattttagcggaagctgagctgctgagattggggctagatttgggggctgcagttaatcgggaggtgggagagggacgcgtgtgctaaaaaaagatgccattgccctccctaagcagcaaggaagtgtttgtggaaggcttttggcgccagcaggatctaggcagctgggccctgctcagattgtggcactgccagctctctggggcagctctgcagtttggagctgcttctgaagccatctgcacccacctgcctgctccccttgaagtcaccatatacctgtaaacatgtagatgccacaagttgcaggggcagctagttcagctgctcactggctggtgaacctcttctctattgaaatgtccataaccaatagctgtggagcctctttttgaggccacgtggtgatggggtactcactgcctctgtggacaggtgcccctggagggcaagggctgcctagttcctacagtccccactaagggcccagcacctaggagctgaccttgggcagggacaaccctgggaatgtctgctaaacaaaggagtagatgaacaggccagttgttggtcttagaatattttcattaagaattatttcccggccaggcgcagtggctcacgcctgtaatcccagcactttgggaggccaaggcagttggatcacttgaggtcaggagtttgagaccagcctggccaacatggtaaaaccccgtctcttccaaaaaatacaaaaattagccgggtgtgttggtgcacgcctgtgtgttggtgcatgcccagctactcaggaggctgaagcacaagaattgcttgaacctgagaagtagaggttgtagtgagatgagattgcactgctgtactccagcctgggcgacagagcaactctgtctcaaaaaaaaaagaaaaaatacataaaaattaaaaaataaaaatagaagaattctttccggccaggtgcagtggctcacacctgtaatcctagaactctgggagggcgaggcaggtggattgcttgagcctaggagtttgagaccaccctgatcaacatggcaagaccccatctctacaaaaaaaaaaaattagctgggcatggtggcacatgcctatagtcccagctactctggaggcttaggtgggaggatggcttgagcctaagaggttgaggctgcagtgagccatgatagtgccactgcactacagcctgggctcaataaaaagaattatttccaaatggaggccaaggggagaggatcgcctgagtccaggaatttgagtctagcttgggcaacatagtgagaccctgtctctaaaactaaagccctctgtgccggtccctcatttctagttattacaaagccctttcagatctagcagaaacaccctgtgaagtccattcccgagtcctcgttccaccattggcaacactgctacgtgtctgccctcacccaccagccatgtgtggtctgtggccacggggcgcatgttttgtctctgtgttgctcgctgtcccgtgggggggctccagccagctccctgcatccttggtgctccatggtcacctgttgccttcggcggccagcccgtgaggcccaggccacagccctcctgcctgttaggagtttggtacaggaatagggaaaagggagagggatgtagcagcagccagctctaaagatcctctcccattgttccaaggagtcagtctttttctgcaggcaagccatggaaggattttaagtagtggagtgacaccgtgagacttcggccttacccgattgattcatcctgcctcaaggcgtctgggtcaggtggtcaggaaaggcctggacagtgagagtgagtccaggttgctgcaggcttttaggtgaaagacaagaggccccaaagacctcttcagtagagatgagagggacgagacctttccagacctggtgagttacaggccatgaggagtgaaaaagaagatcgggttaagatttctggctctgaggactgtcctcccagggcagccagaagcttggtccttcctgtctcagtggtccttgtggatttcagttgaatggaactgtcctttgtggctttgaagggttatgtatcggggaagagggactatctctcacccaaaccaggacacctaaagattagcaaaggttacctgctcccaggagaaacctgttgctgggagtgtcattgaggcttgttagcaaggaatggcctgcaccgtgggacgcgtcgggccacctggtcccagggatgctgcggtataagtggtaagggataggggagcttttgaggaggaccagacgttgtctccccaccaggaacgggctgagagagcctcctgagcacaaggaggaagctcctgtcaattcgaggagacccctgtgtgagaagaagggcaggaaggctccaaagggggtcttcacggcagccgctcacatagacactcgtgtctagtgtcaagtgggagggtggcactaatggctgctgccatctgtgccagctagcagctgcctgctccgctccatcattgttatttatgttacctaggactcttctgtgttgccggtgccagcccctgctggggcatgtggaggtcgtggaggacagggcatgggctcacgaggacgcagctccatccagctgcttgcctgtggctttttctgctcaggagtcacgttttggctcaggcttccctgatccacatgagcagattgaggacggtggtttgaccttcttctgtctctgcctagggcttagttctttcagaaatgagcattgggatcagggtagggaatgctactctgttgctattgggaagagaagggtcagaattaccaagttcaaaccgcacccagatgtcccacctcctacttgcaactccactgtagtgatggaaatgctagtgtatttttggtccttttggcactaactaccctgtcacgcttttggagtttctgattcttgagaggcaagtagtctaccgattgggagctaggcagcctagtttgggatcccagcccctcttctcactaggagcatgacccggggaggttacttagcttctctgcaccttagtttcctcaagtctgaggtgggaatagtaatattacctacttgggagggctgttgtaagaactaagtgggttaacagatagatacaatgtatttagataggtatcagttatctgttgataataatattacctacttggcaggattgttgtaagaactaagtaggttaatagatacaatgtatttagataggtgtcagttatctgttgcccttgtatcaaatcactgccccaacatagtgccttaagatagcaacatttattttgcttgagtttgcagtttgagcagggcttggtggagttgtctttttgctgttgtacgtaacatctgtttggacagcttaactggggctggaggatctatttttgagatggctccttgatgtggcagagaagttggtgctaccccttggctgggtgctcagctgggctgtgaactggagccttgagtcttctgtctgcaccagctgcttgggcttccttacaaaatggttgctcggttccacaagtaagtgccccaagagaataaggtgaaagtatttttataacctcagaagtcatgaggttccctgttctctgttagtcacagcagtcataaaggctcacctgatttcaagaggaagaaacacagcttctacctgtgtgtggagaagcagcaaggttccagaagagcatggaaggtgaaagataatgcggtggccatttatggaaaataaaatctgccgcaggataggttttggcatacagtaaacctcaacaaatgtttgctaccagtagtttaaaatcatcatctgcattcctcatccccgactcctcttccttagagagatggtagtatagtgcagtggttaagtgcatctgctctggtggcaagctgctaggggccaaagcctggctcagcccttatagctgtgtgatcttggacagattgtttagcctcttggcaaatttcttgaaagataaacaaaccaccaaagctttctcaataagaatagaaaacctgagtggccctatatgtactgaagaaggttaatatgtaataaaaactttcccagaaagaaaacttcaggcccagatagctttcctggtgaacggtatacattagggaagaaataataccaatttgacacaaattcttccagaaaattgaaaaggaggaaatattttctagcccattttatgaggccagcattaccttgatacccaaaccagcaaagacctcacaaggaaagaaacctcggaccaacattctacacggatgtagatgcaaaaaatttaaacaattttgcaaatgcaataatatataaaaaggataatacatcatgactagggggacttagctcaggaatgcagggttggtttaatgttcaaaaatcaatcattgtaattcactatattaaccaaaggaaaaagaaaaaccatatacaggttgaatatcccttatccaaaatgcttgggtccagaagtatttccgatttttaatttttttcagattttggagtatttgcgttatacttactggttgagtatttctaacctgaatatccagaatgctccagtgaacgttttctttgagtgtcatgttggtgctcaaaaagtttggaattttggagcatttggatttcagattttcggattagggattctcaagctgaaatcatctcgaagtagacacagaaagtgtttgacaaaatgcaacacccattcatggtaagatctcacaacaaactaggcacagaaaggaatttcctcagactgataaaggatatctacgagaaacttctagcttacatcatactgagtggtgaaaaactgaatgcttttcccctaagatcaggaatgagacaaagatatcccttctcatcatttttattcagtattgtaagggagcttctaaacagtgccataaggcaagaaaaacgaaaggcatctggattagaaaggaagaaataaaactgtccttattctcagacaacatgatcttctgtatagaaacgcccatgacatatttacaaaagaggccactagaccttttaagtgagtttatcaaggttgcaggctagaaggccaacatataaaaatcagctgtatttctgtatcctaacaacaaacaattggaaattgagattaaaaggcaacttcatttgcaacagcatcggaaatataaaagacttagtgataaatctaagaaaagatgtgtcaggtctgtatactgaaagctgtaaaatattactaagaaaatttaaaaagatcaaaataaactgacagatataccatattcatgggtttttaagagtctccccaatagatctgacataatttcaatcaaatcccagcagacttttttttttaagtagaaattgactaattattattattaattaattttttttttttgagacagagtctcagtctgtaagccaagctggagtgcagtggcgcaatctcagctcaccgcaacctccacctcctgggctcaagtgagtctcatgcctcagcctcctgagtagctgggactacaggcgcatgccaccatgcccggctaattttttgtattttagtagagacgggcggggtttcactatgttgcccagggtggtctcgaactcctaagctcaggtgatccacctgccttggcctccctaagtgctaggattacaggcatgagccactgtgcctggcctgttattattattgagacaggatcttgctctgtcacccaggctggagtgcagtagctatgatcatagctcactctagccttgacctctcaagctcaagccatcctcccacctcagcctcctgagtagctgggactacaggtgcaagccaccatgcccagctattttttatactttttgttatgaggtcatagtatgttacccagactggtcttcaactcctgacctgaagcgatccatccacctcagcctcccaaagtgctgggattataggcacatgccactgtgcttgcctaatttttttacttaaaaaaaattttttttttgtagagatagggtctcactatattccccaggctaggtttctattgattgattgattgattggactcttggattagggacaaagaaattgactaattctaaagttcatatggaagttcaaatttttttactttttaaattttttttttttgtagaggtagggtctcactatattccccaggctgggtatgcatgtatgtatgtatttatttatttggactcctggattagggacaaagaaattgactaattctaaagtttatatggaagttcagaagaactgggctagccaaaacaactttgaaaaaaatatgaacaaagttggaggattaacactgcctgattttaagacttataaagcctcagtaaccaagacatcgaggtattgatgtgaaatctttgtttttatttttcttttttaaagacagtgtctttctgtgttgtccaggctggcttgaactactgggctaaggtgatcctctcacctcagcctcctaggcactgggactacaggcttacaccactgtgccttgatgtggaatcttttttattttaatttttttgtagagacaagatctcactgcgttgcccaggttaatcttgaactcttgggctcaagtgatcctccccaccttagcctgatgtgaaatctttatgaccaggggttaggcaaagatttcttagatatgatatcaaaagtattaatccataaaaagaataaatggataagttggccttcatcaaaatttgtaaaacttctgttttagtgacctttgaaaggcactgttagaaaagaatgagaagacaaaccacaaatgggaaaatatttgcaaatcatcatgtatctgatagacttgtatccagagtgtataaaagagctctcaatttaataataaaaaaaaagaaaaaggtgaaagatctggacacttcaaagaagatagatggtaaataaacatatggaaagttgtgcaacattattgttaggaaaatgcaaatttcaagcatgaacatgaaaaacaatgatataccactacccatcttttgaaatgcttaaagttggccaggcgcagcagcccatgcctgtgatcccaacactttgggaggccgaggcgggcagatcacctgaggttcggaattcaaggccagcctggccaacatggtgaaacgtctctactaaaaatatttaaaaattagccaggcatggtggtgcgtgcctgtaatcccagctactcaggaggctgaggcaggaggatcacttgaacccaggaagtggaggttttagtgagctgagatggcaccactgcactccagcctgggcgacagagtgagaccgtctcaaaaaaaaaaaaaaatgcttaaaaagagcgagcatatcaacagttggtggagatgtggaggaactggaactctcatatactgctagtgagaatgtaaaatggtacaatcattttggaaaacagtttggcagttttgtaaaaagttaaacatgtgatctagctatttcacctctagctttaccaaaagaaacaaaaagtgtacatccacacaaagccctgaatgaatgttcatagcaactttgaaataacccaaaactagaaacaatcttagctgttcatcaacaggtgaatggataaactgtggtatatttattactcagcaaagaaacagaatgaactgttggtacacagtgcaatgtggatgagtttttaaataattattctgagtgaaagaatccaagcaaaaaaaaagactacatactgtattattccatttatataatacatcatgtaaatatatatattatatgtaataatagatgcagattcatctaatagtaacagaatgcagctcagtggttgcctgggcatggatgggcaaggaggcacgggagggttatggatatgttatcttgattgttgtgatgattttacagatatgcacgtaggtcaaaatgtatcaaactgtattcttaaaatatatactgtttattgtggcacaacttagcgaaactgtttttaaaaatgggtagggttggccaggcacgatggctcacatctataatcccagaactttgggaggcccaggcgggtggatcacttgaggtcaggagtttaagaccaacctggccaacatgctaaaccctgtctctactaaaaatacaaaaattagctgggcatggtgttaggcacctgtaatcccagctgctcgggaggctgaggtgggagaatcacttgaacctcggaagcagaggttacagtgagctgagatcacgccattgcattccagcctgggtgacagagtgagactccatctcaaaaaaaggaagaaagaaaaaacaagggtggagtggctgggcacagtggcccacacctgtaatctcaacactttgggaggccaaggcagaagaattgcttgattccaggagttcgagaccagcctgggcaacaaagggagactccacctctataaaaatacaaaaattagccaggcgtgatggtgcatgcctgtagtcctagctgctcaggaggctgaagtaggaggatctcttgaactcaagagtttaagactgcaatgagccatgcttgtgccgctgtactccattctgggtgacagagtgagatcttgtgtcttaaaaaaagcagggagctggggaagtaagttgcatgtggctggacctcattgctcatgactggcaattcaagatcagaaggaccttttgcaacccagcaggcctttgagccctgtcagtctcctgtcccttgcatggttgtaagccttacacatttgctttctgccaactgtgcaaatcccagtatcaaaacattagatttttttttttttttttgagacggagtcttgctctgtcccccaggctagagtagtgatgcgattttggctcactgcaacctccgcctcccaggttcaagtgattctcatgcctcagcctcctgagtagctgggattacaggcaccttccaccacgcctggctactttttgtatttttagtagagttgaggttttgtcatgttggccatgctggtcttgaactcctgatctcaggtgatccgtccaccttggcctcccaaagtgctgggattacaggcgtgagccaccgtgctcagcccaaaacattagattctttatcttccttcgggtggatcatttacaatgcagatttacagatttctctcagattcacttcttcccaatgaatgcgtcatttcttggtgccgttgtttactgtgtgtaaactactgaatttcaggattattgtgacaaacccaactcagactcaatgggatctgtttatcagcttggattttggaaattaaggggtagatttcaggcacagctggattccagaggtgcagctggtgttagtgttatctattggttattgttttgttgtctgctgacttccttctcaggcaagttttccccatgtggtggcagaggcagccgccagcaacaacagggaaagagcccctccttcctaattggcctgggaacagtttcaagttcagctgtcactggctggacttgggtcagcagctatgcctgaatgcccaagggagatgaggggcttattgccaggcccaggtcacctgcctgggaaccaggggtggagttggccagagccaaacaatgtggacagagagcaaggaggggatgttctacagagacagatggcccagtgttgctgggagaggagggcgtggctgtcagcagggaagagcaacagatggccctgcaccaggggacaaatccagttgtttttaatttttaactaagtaggatattaatatgcttccaaaagtcaaaggattcaaaaagggtctgtctaccctattccttatagcccttgtagggcgactgatttcattgacttctcatttttccttcctgtgtttcttttggtaaagataagtcgatgtatttatgttttcttgtttcctcccttttgtacacattagagagcatactatttgtactcttttgtacttgcttttttcacttatcaagagaaaggaaaacatttgtaaccagctgtgctaattcttgccattatcagtacacagcatggaggttgatttgaagatgacgggatgtccatgtgagcatatgaagggactgccaggcttttcttctgccaaacggtgtctttttgctcttaagcctgggtgccaagtgaatctctctcctcttccaatgcagatggcggcagctatgccatccacgactcccaggcccccagtctcagctctgggggtgagagttccccctccagccccgcacacaactgggagatgaattaccaagaggcagcaatctacctccaggtgagtatctccagtcaggccctggcagttgtctgcacctgttggtggggtggggcagccaagactctgttaggtgcccagaaattcagttccagcatcagttcatgctgctgctgctcgtgtgtgagcttcaggttcataagatgggctgacctgactgtgctcataggggaaaactgctgtgcaccagcttgtcttcagacccctgtttagggctgtgccaacccccacaatttccggagtctggccactcggccttccctgccaccctccctcttctcagggcacactgagaggccacgttctcaggagggaattctttacatactgaatgcggtagctttattcctgtttaacttgttgctgctttcctgtttgctattttaggaatttttttttttttgaaaaatatatttttggccaggcatggtcgctcatgcctgtaatcccagcactttgggaggccaaggcctgcagatcacttgagatcaggagttcgagatcagcctggccaacatagtgaaaccctgtctctactaaaaatacaaaaaattagctgggcgttggtgggcgcctgtaatcccagctactcgggaggctgagacaggagaatcgcatgagatggaggttgcagtgagccgagatcgcaccactgcacttcagcctgggtgacaatgcaagactctgtctccaaaacaaacaaaaaattttgtatttttgtgtgaaagtaatacatgcttattacaataaatttagatacaaagaggaatgaagaaacattcacctaaggcagtcactgtcaacattatttccttccaggtttaaaaaaaatgtattataagaataatatatctgttttccaaaaaagtcatatggtatgtgcaattttatagtctgcttttttttttcatagcataagctttttttttttttttttttttctttttttggagacagtctcactccatcacccaggctggagttgaattgcagtggcttgatctcggctcagtgcaacctctgcctcccgggttcaagcgattttcctgcctcagcctccggagtagctgggaccacaggcacgtgccaccatgcccggctaatttttgtatttttagtagagatggggtttcgccatgttggccaggctgatctcaaactcttgacctcaggtgatccgccgacctcagcctcccaaagtgctggggttacaggcatgagccaccacacctggctatttaaatagctttaaattatatcaggtaaattattctaatttacttaacctgataatcttgaatattttcccttattgtaaattatagtccaaggacaatctatacgtagcaccccccacccccttacatctaggattattttactaggaaagtaaaagaaatggaaattctaagaaatggaattaccgggtagaaggaatcaacaatttttagggccttgatgtttcagcatggaatcctctgcacaggaagtatttcctctttactgagggccccactggcggtgacattttaaccttaatcttgccaatcttgtcactatcagatttcagtttctggtttgcattgagtaagagcttggatgaggaaatagactttttcttaaatgcattcgaatcataattttccctaatctttcttatgtgaagcagctctccactgcaagtatttgttttgtcatttaaaaaggatttagtgaaattcaagcctgggcaacatggcagaacccatctctggtaaaaatacaaaaattagccaggcgtagcatgtgtaccctctagttctagccacttgtgagactgaggtgaagggatcgcctgagtctgggaagttgaggctccagtgagccgtgtttgtgtcactgcacttcagcctgggtgacaaaatgagaccctgtctaaaaaaaaaaaaaaaaaaagatttaatgaaatttagacatttgtttgatggttgttcaatcatctgtttctcatatgttcatgcagcatcatatacacctaaatgatcatgttttgtttcaaattaaggcaacagaatgttttagggaaattgtcccaagcgcaggcatacttgttaatgatctagcagggacatcttatgcacatcaccttctctgaggccggataagagcgtgggataggtcagaacacagactcagaatggttgaagccctaaggatcctgatcattccttcctttcctaagcaggtgaggacattggtaatgaacataggaactttaagggggcacctgctaatctttgtaacaagcctctgaggctgtagtgatcatctcccactttacagatgtggcaactgagactcagaggggccaaatgatgcccaaggccacccagctagggagttgcagagctccacatttaaactgtttagcctccagatgatgttttttattctgtgtgctattgcatcacttatgaactgaccttgtgcatctccttgaaaatgggccatgtacttgtgggaaaaagcagttatggaacagctggtgttgtatgatcattttaaattgatgtcatacagcagcatgtgcatgtgggtatgtatgtgtacagatatccatacatatctcaaaaattgtttaaatattaaaggtgattatctctggctgatggaatttttactaccttacaaatttatattgtttaaattattttaccaaaaatgcattatttttaaaaaaattaaagaaaaacttggatttcacagtcattcacggctgtttctagaggatgagatggcctgtttttcttgagacagactctcactccgttgcccgggctggagtatagtggtgcgaccttggctcgctgcaacctcctcccaggttcaggtgattctcctgcctcagccacccaggtagctggaattacaggcacctgccgccacaccaggctaatttttgtatttttagtagagatggggtttcaccatgttggtcaggttggtctcaaatttatgacctcaagtgatccacctgcttaagcctcccaaagtgctgggattacaggcatgagcctctgtgcccggctcaagatggcctgccttttcacgcttgcagccaagctgcgggtcctgcagtgagccaggttgctggtgtgcatggataattggccctcgctgctttgagggtgtctggtgcctgcagtttcccctcttcccacattttacctgttaactcactcatcctctggagccacgtgctcagcagtcctgacgcctttgaaacagtactcatttctgtgtggacttggaccccagggagcggagagcaaaggcctagaaatcgctacaactggccttccttatttttccaaatctagtttatgatcagccaggaaacagggccgatattctctggggttttcatcagaatccagtgccatgggtgatatttccatctgttggtggagacctcattacccccatctcttctgggacaactccaagtcctagagttaaaatctgagccccatgtcagtggttcttctagcgagaccttcattcctggttatttgttggaagaaattgcccaagaaatacatttttttttttggttattgaaaccagaagctccccaggccactgtgtgtggccccctgcccactgctgtggtcatggaggtggtagtgaaaaccacagccctgcacagagcacagaactgtgttcaacttaccttctgttgactgccaaggtgtttgctccctttgacatgcctgcccctgccgggtttgctgctgggtctgtggtttgtctcgattttttgctaatggggcgagcagtttatccagcttcagggaagtgactcactcacagtcactctgcaaactgcaggcagggcctttcccagaataagtttgtgagaatgggccgagcatggtggctcacacctgtaatcccagcactttgggaggctgaggtgggcagatcacttgagctcaggagttcgagaccagcctgggcaacatggtgaaacaccatctctactaaaaatacaaaaattagccaggtgtggtggtgcacgcctgtcattccagctacccgggaggctgaggcaagagaattgcttgaacccaggaggcggaggttgcagtgagccaagattgcaccactgcactccagcctgggtgacagagcaagactctgtctcaaaaaaaaagaaaaaaaaaagttgttacataacatataaatatatcaaaatatcacattgtaccccatatacaattattatttgtcaattaaaacaaagtagggtatggggaatcctgaattaagtaaatgtatagtagcaatacgccactgtgcagctctttttgtttatttttttggagacggggcccaggttggagtatagtggtacaactttggctcactgcaacctccacctcctgggttcaagtgattcccctgcctcagcctcccaagtagctgggactacaggcgcatgccaccatacccagctaatttttgtatttttagtagagacgaggtttcaccatgttggccaggccggcctcgaactcctgacctcaggtgatccacccgcctcagcctcccaaagtgctgggattacaggcatgagccactgcacctgttttgggtagctcttgatgggtgttaaagggtctgactaggcagggttattggcttctttttttctggtaatgttcatataacttacgataatagcaaatacctgtagtgagctgactgtgtggcagacaccaccctaactgcctcacaaatgtcctcacctttcctcttcacaacagctccaggaggaagcactaatgttagttcctttatcgttgaagaagctcagcctcaagggtgaaggaaccttcccagcattcctcagggaaggagtagaaagccagggttcagcacgtgtggttcctcccaggcccctgagctctttacactctgctgggcactcctagagggagaacttggcctctgaggggattggacatgcctgtttctctttacctcctctcaggaccttttttctttttctttcttttttttttttttttgagaccaggtcttgctctgtggtccaggctggagcgcagtggcacgatcttggctcactgcagctttgacctcccgggctcaagtgattctccaacctcagcctcccaagtggctggcaccaggggtctcaacatgttgcccaggctggtctcaaactcatgggctcaagcaatcctcctgccttggcctcccaaagtgttgggattacaggcatgagccaccgcacccagcccctcccctcttttttaagagatggtgtcttgctgtgttgcccaggctagactcaaagtcctggctcaagggatcttcccgccttggcctccggagtagctgggatgtcaccacacctggctgtctctggacccttttagtctttggttcctccgagtggtttttaagaagcagcaaatctcttgagcccatcagcaggcaggagtgagacctgaccaccgtgagtttcgcgaagatcattttgattttccagcatcttctgtctctggcctgaatctctcctcgcctgcctggggccttcctttcctcccctgcccgcggctcctctttggcgttggatgggtctccaggcttacatgcccacactactctcatcttttcaggaaggcgagaacaacgacaagttcttcacccaccccaaggatgccaaggcgctggcggcctacctctttgcacacaatcacctcttctacctgatggagctggccacggccctgctgctgctgctgctctccctgtgcgaggcccccgccgtccccgcactccggcttggcatctatgtgagcgcacatgctcctcatacggggggctgggagccacggctttcagggcaagcgatggaactccaaaaaggaacattctgggagggcaaacactgcaaacggacttaaaacagagagatacgaggtggtcatagaggccttgggagcggaaatgcctgggtgtccctgctggagtgaatggccttcacccagtctctctgggattctgcccaccagtaaattccagggaggggaagtgtcccaggccctgctcaggaccagtgcccacaccttggctccgggtggggagggcacccagtggacagtcccactactctgtctccagcctcaaaggagaaggcagttcggtgtggtcaccatgggaggtgggggatgtttcctgggcagccccagccccgcagatgtccctacacccaggcccagccatcattcagtgggggccagaacaggtgtggagctgtgcttgtccccttctcaaggggtgtgtggtaggcatggaagcagggaagggagcctgtgcctgttgagttaggaagcgctcatccagcctggcctccaaggccctccatgactcagtttcccttcctgtttctccttcttcatgcctggaactcacagctccagccagtctgtgtttctttctgtgcacacctcccccatgccgtcacctgtgctggagtccttcttcctgtcccttcactttgtcaattcctgcccactggaatgtccacaggccctggacctccctacccccaggaggaggagctctcctatgtctgtttcccagaagcacttgacttccctgctgggaaggttttccatctaagggttttccatgtcttgtccttttgtccaaaatgaggatgagagttttaggggctgctctctgcttgacagtccttgtttctttgacaatcggattttatttcttaagttcctaattgatgctttcttagtgtcttttatagatcttttgtaaattacatgaaatccctcttagaacaagactagatattaaattttatcttatcttgtttttcttactttttttttttttgagactgagtctccctctgttgcccaggctggtgtgcagtggcaccatctcggctcactgcaacatctgcctcctgtgctcaagcgattctcctgcctcagcctcctgagtagctgggattacaggtgtgcgccaccacgcccagctaatttctttttcttacttttaaacttcaggctccttcctgatttttcatcatttgggccagcatgtcagtttcatggatatcaagtttatgtttagttgttctggggaaagctccgtgaccaaggctctgtctttaggcatgcgaggccaggtttttgtaactctgatatgtgttgggaggatgtcctggggcactcccaggtcctgggagggttgggcaaagaggagtggccatgggctgggctggccatgacacatctccacaccctctggtctcaggtccacgccaccctggagctgtttgccctgatggtggtagtgtttgaactctgcatgaagttacgctggctgggcctccacaccttcatccggcacaagcggaccatggtcaaggtgatgtgtccgcccatctgtccctcccctcacagccttttctcccatgtcaccttcaaacctgtctctttggtacaattcagaatccaccatgggcccagtccatgctcagaggtgtaaccctagggtccctgtcctgaccgtgccctcagccttgtgggtgccctggatgtcgtgatgccagcagtagctaatgtgattgggtgtttggtacctgccaggcactggcgcagtcaccttcgagagagatgtgctgctctccgtggtttacattcatctggagacatggggctcacacccagctctgcccactgcgcccggctcacctgtccctagtgttgcgcatattctctctgtgccacagagagtggcatgagtaagagcacgtcaaggtggcattttgtagtgtgtggagcatgtgcgctactctaggagaatatagccaagtaagcagagctgaagaggagctgcaggccccgggatccctgatgtgagtggcgagggctgatcgaggggtcctggcagagtggcggttttgcctcctcagtggataccagcagtcacacagcccttccattcttctggtgccacacacctgtgccagcacctggagttttttttcttctggggctgcctgatgttggcaggaagtgtgagagggctggagagaggagaaggcctcccgaggccagagtgggcactgcctctccagccccccgttccaggtatgcaggatgacggctgggctgcaggggctgacggtgctccatgcctgccacccacagacctcggtgctggtggtgcagtttgtcgaggccatcgtggtgttggtacggcagatgtcccatgtgcgggtgacccgagcactgcgctgcattttcctggtggactgtcggtattgcggtggcgtccggcggtaaggcccgggtggggagctgggcagtcactatcctggcatggcctgacctctgggccagtggggcaggagcttgtgagtcagttagtgatgaggtcgaccctgcatgctggtggagtacacgcagactcactctccctctgccattccatccacgcacaggagaaagcggtattcctaccgcagtgtaggtttgctgcctctgggtccagggctttttcccatcttatccgcagccttccagagctgcttcctcgctctaggcatgttatctacccaaatgcaggcagctcagcagcgtccatgtgacacaagcagactctcctgccacctccatcgaggctgtaggaccaaactcaaaccagaccaagcctcgactgagatttattttgggagactcaatctggaaaattccttggctgggctactgttgctgagagtgggtttgcaattcattctctgtgcccatctgcaaagctagaaacaggactcagtgtccttgaaacaggcccagtgtcccaggactaagtggccttgaaatgtcttcatgccttccacatcctgctcatggaaactgacctttgcacccaaggtcatgcccttggccttctgctgctctgttccctgcttgcatggcactcacctccttggggcctcaccaggtggaggtggctgtgtgctacgcctgccctagttcttccctgccatccgctgagtgggggtctcaagccactttaggaaaaaatgaagcatgatgtcacaccagagtgcgtcagggtttagtatttcgagtcagaagcactaggcctccatctcaacaaggaggagtcccaggcagcccgccccagctggtgcctcccctgagctggcccatctctccccagcaacctgcggcagatcttccagtccctgccgcccttcatggacatcctcctgctgctgctgttcttcatgatcatctttgccatcctcggtgagttcccgcctctcaggcccaggtgcgctggaaaagcaagttcacggtggatgaaaaattattttgggcctggctcagtggctcacgcctgtaatcctagcattttgggaggccaaggtgggtgggtaacctaggtcaggagtttgaggccagcctggtcaacatggtgaaatccagtttctactaaaaatacaaaaattagctgggcgtggtggtgcacacctgtaatcccagctgcttcggaggctgaggcaggagaattgcttgaacccgggaggccaaggttgcagtgagctgagatcgtgccactgctttccagcctgggcaacaacagagtgagtgagactttgtctcaaaaaaaaaaagaaaagaaaagaaaaattatttagacagtgccttagtccttttggactgctgtaacaaaatgccatagactgggcagcttataaacaacagaagtttatttcacccctttctggaggctgtgagatctggaagtccaagatcaaaggccagctgtgggtgtctgttgagggcctatttcctgatccataggtggtgccttctggctgtgtcctcacgtggtggaaggtgggaggcagctctctgaggcctcttttttgtttgttttgttttgtttttttttttttgagacggagtctcaccctgtcacccaggctggagtgcagtggcacgatctcggcttactacaacctctgcctcccaggttcaagtgattctcctgcctcagcctcccgagtagctgggactacaggcacccaccaccacacccagctactttttgtagttttagtagagatggggtttcaccatattggccaggctggtctccaactcctgaccttgtgatccacctgcctccgcctcccaaagtgctgtgattataggcgtgggccaccgcgcccggcctctgggacctcttttataggggcactaatcccattcgggaggacgtcacactcatgacctcttcacctcccacagccgccacctcctaacaccctcaacttggggattaggatttcaacatagggattaggggcaggggacacaaacattcagaccagagcaggtagttttataaattcagaaagattttaaaaatacgccaggcatggtgtcccacgctgattgtcgcagcattctaggaggaggaggcaggcagatcgcttgagtccaggaggtcgagaccagcctgggcaagatagggagaccccatctctacacacacacaaaaaaaatatacaggaattagctgggtatggtggcatgtggcatgcacctgtggtccctgctactcaagaggtgaggcaggaggatcacctgagcatggggagacagaggttgcagtgagctgtgacagcgcaactgcattccagcctgggcaacagagcaagactctgtctcaaaaataaataagtaataataacatgaacacccatggacctaccatccagcttaggaaatgaagccttagaaataaaatggaaggcatgtttgtgacctttagtgattgtgattcccgctttccccaaaggtaccccctgtcctacgcttatcattcccatgcacgtctttatattttacttcacatttacatttccccaagtgacaaagaaatgataatgctttgcatacttaaaaaagtctctaagtggttatataatatgggtgtccgcttctacacattgccctttcgctcagcactgtgtttttgaaatttattcctgttgatacatgtagatgctgtttattcattttcactggagcggagcaagtatgccaaagcttgtttatctgctcttctgtcggacgtttttcttatcacaaatcccaccgcagtgaacactcctgtgtgtttcccggtgctcacgcttgagagtttcccaaaggcgcttgcctgggccctgagagacggcaagcttcagcttcactgggtacagcatggtcacaggctgctcactcaggagggcttagtttttcaggtggggctgactgtgacagccacacaagagtcacagggcatagacatcggaagccgtggcactcagctgggaaagccgaggtcctttcaccaggactccgcagatggtgaagacagtggaactccagagccctgactctgaggctagagccagggccaacccctcccggccctcgtgactgccttgtcctgagtcatggctctcacttcctcccacccaccaccccactcttggtagaattttgtttgtgcttctccgggggtaggggctgatttcccctgagggcagagttcctcccttttcccactcaggatttcagggactcagggagtggtccattcctggagggaggaagtgaatggcattcccaccctgggaccctggctgcagggagcagcggatccctttggaatttagtcagctgtcatgttctcagaacctaagattgcgaaacagcagcctggattccagatccagcctacagatgggttttgtttggtctgaaaactttgagccagcattttaaaattagattttacacaaaaatacagacttccagccttttgaaagaacagagccgatagtgcccggcacattgctgtagggcagcaagcgtctggtgccagcagccctgctcccttccaacagagcatgtgttctcagggtgctgtggtccccagcagtccctgctgctcttcctgacctgctgcgttcatttgcatgtatttgtccagtccttttgacaccaggttttgggacctctgctctaatccttttgtttatctgtttccacccacttctaggtttctacttgttctcccctaacccttcagaccccgtaagtaatcagcacatttgtccgtctcttcttttatggagggcttttccctcagacagggtcaccggcgtgaccctgtggccatatggggaagggggggcctgcctggtttctcatcatagcttgtgtgtgcattgcacctgggagttcccatcactcagacttgaccactttcttccttgagagctggggatccccttttctgttcttgaaaggagtgccgccaggatcaggtttggaccattggaatattttggcagaggagcagtgggggagagccaggcgaatggcccagacatgtgactccctagaaaaaagtccccccaagtcaatagtttgcttctgccggaagcatcaggtgcaggaaaggggaggcctctggactgcatgtttgctctttcctctgcctccctcagggattccttgagagatgcaagagcggtcaaggcagggcatgccaggtggcccatcacagcctgttcctgatggccgtgtgctcttggctggtcccgacttctctgccctctcttcccttgcagtacttcagcaccctggagaacagcatcgtcagtctgtttgtccttctgaccacagccaagtaagtgcaggctctgccttgcctttggtcctctgctgccgccctggggtctctttctcttttctgccaagtatattccacatcccagcacaggcaggtgctgtggtgctattgggagacagggttggcccactgagcacggagcccagggatgagagtaggggaaccagggttggaggctgggaaggcagacaaggagctgtcctctgcaaggcatgtgctctgagaggatggagacaggcagatacagcacgccgggtcaccctctgcaaatacagtttcccagatgtgatgatgccctcctactcccggaacccctggtcctgcgtcttcttcatcgtgtacctctccatcgagctgtatttcatcatgaacctggtgagtgactatgcctcaggctacgctgaagcagcctgcccctacccatgcagcactaggcactgtgggagtggagaagtggggactgtcttctgcctctcagggcagaacgttggggcaggaagtcccagattcatagtcaggtgcggtgttgcagggaatgccctgtcgggacttcaggagttcagccagttgctgggggtggcgtcctcaccaaggcaatgctgctgatgctggtagtgctggatgtgaaacccaggcaaccctgggaccttttcattcttacatcagaaataagcagttgaccctcggtgtccacagggattgtttgcaggaccccctgtaggtacaaagatccacagatgttcaagtcccttatataaaatggcagagtatttgcagataacctgtgtacattcatcctctcatatattttaaattatcctgcattacctataacacctaatacaatgtaaaagctatgtaaatagttgttatactgggctggacatggtggctcacgcctgtaatcccagcattttgggaggccaaggtgggtggatcatttgaagtcaggagttcgagaccagcctggccaacatggtgaaaccctgtctctacttatgaaaattagctgggcgtggtggtgggtgcctgtaatcccatctactcaggaggctgaggcagaagaattgcttgaacccaggaggtggaggttgctgtgagccgagatcatgccgttgcactccagcctgggcaacagcacgagactctgtatcaaaaaaaaaaaattgttatactatattgtttagggataatgacaagaaaaagaaggctgtacatgttcagtacagatacaaccatccttttctttttggaatatttttgatttgcggttggttgaatgcatggatggagaacccacagataaagaaggccaagtatattataataaccataaaagctggcatttagtaagccttagccacttggcactatgcaaagtgctttacatatgaggatgaaataatttaataaataaacacaaccgtggaggtagtgagtatggttctccatgtgcagatgaagagactgagggtcagagtgacagtgtgatttgcccatggctacatagcttggagtggccaggccaggctcatcccagagccctgttcctaaccactctgttcagttgcactcacgtgccagaaatgtcttgtgtatttctacctcacttatcaggaaccatcagaaaatccagtatagaacacgttctgtgaaggagaacgtaaagcctctgtgctcaaagaactttgagggtgtttgtggaggtgtggacagcctccaggagtgtcccagccatcacagatcacatccgacaccaggctgttaggccggtgcccagaccacacatccatggcagagctaacggggagaggcttccgatcgagtcctgtgtttatttttatgcttctgcagagcattctcacaccagtcaccacagtcaggcccagtatagaaatgaaaatcatcttttccaggtagacttgtgaaatctaaaaaattttaagtccttttctcttttttgagatggagtctcgctctgtcacccaggctggagtgcagtggcgcaatctcagctcactgcaaccgccgcctcccaggttcaagcgattctcctgcctcagcctcccaagtagctgggactacaggcacatgcacatgccgccacacccgactaatttttgtatttttggtagagacagggttttgccatgttggtcaggctggtctcgaactcctgacctcaggtgatccgtccgactcagcctcccaaagtgctgggattacaggtgtgagccacagtgcctggccaaaatttaagtcttaaaaaggagaaaatatttcctttttttttttttgagacagagacttgctctgttgcccaggctgtagtgcagtggcgcgatctcggctcactacaacctccgcctcctggattcacaccattctcctgcctcagcctcccgagtagctgggactacaggcacccgccaccacgcccggctaattttttttgtagttttagtagagatggggtttcgcgctttgttagccaggatggtctcaatctcctgaccttgtgatccacccgcctcggcctcccaaagtgctgggattacaggccaccgtgcccggcctgagaaaatattttcttgttttaattcctcaaaaccaagaagaaatatgttgagtacttctttgtatttgatttaattcataatatatttagagctgtgaaaatttagggcagcagtcaacaaagtacgacctgctggccaaatttggcccatggcctgtgtttgtaaataaagtttcattgggacagagtcatgcccatttgttcatgtatagtctgtggctgatctcatgatatgaccacaggttagtagtcgcagcagagatcatttggccttcacagcctaaaacagttgctgtcgaaccctttacagaaaaagcatgctgacctttgatccacagggaaaaaatgggggaccagtttgagggaaaggaccagagagtttcccttaaaacatttttaaagacagagaaagtgtttctaaaaaggattctttcaagttcttccccggccttccatccccctctgataagctaacttttggtattagccaactctagaacgttatttccttgcatgcagagcctctcactcccctttttcctgggccacacgtgaagcagtgactcacaaggagaagtaacaaaggggcagggggaggaagggtccttctggatcggaggtcaggagggcagtgggcaggcagcctccgcctgccactggctggagtcggactgggctcagaatccagatgcgcccctcttgctactctctcctcccctggcttgcccctgcgcagcctgggacaagctgtagctggaactggggaaaggagtgtgggaaagtggaggggaacctgggaaagatggagtaacaatgccttcatgtatctgaagagggaaatttacaagcggaacaaagggccttcctctgttgagacttgggagactgacttcctaccccatgaggtgcaggcgagagggtctccccagggcctctctggggtgactgggtaagagccttgcctagatgatgaactcatacccccctgcactccctgccctaaccactcaaggtcctgagctagggctctgtgcttctctcccacagcttctggctgtggtgttcgacaccttcaatgacattgagaaacgcaagttcaagtctttgctactgcacaagcgaaccgctatccagcatgcctaccgcctgctcatcagccagagggtaggaactatgggccagggaggggcttggtccctgtcctccctcccttgcccagagcagcccctaagcatggccaggccagccactttagaaaccaggaaccctgcccttggaagaatgaacagagctggagtggatctggagtgggtgccccaagggaaggggagtagcctgggttccacactgctcttccctctcccccagaggcctgccggcatctcctacaggcagtttgaaggcctcatgcgcttctacaagccccggatgagtgccagggagcgctatcttaccttcaaggccctgaatcagaacaacacacccctgctcaggtaagagcagatgcctggtaggggcagcatggccagacaaggtgttcacgtctagagtgaacgggggcatgtgaaggcccttgaggtgggcaggcctataggcttgtcagagacttcctccacagatgtttatccatgtagacttacacactggattcatcaggatgccttttgcaagtgacaaaagtccaacacaaatccaattcaagctgacttgagaaaaaaggagctcatgaagtggactggcccagctgctggccctcgaacccccagtggggtgggatagtcccatgtgagccaggtggacagacaggggtgaatatacttccccaatcccctgcacacacctggctcggccgcagagaactgacccgagatctccaggggtaggattggtcttccaggctgttgatgaccaagccctgtccacagcagcctgctgtggagctgagaacaagccctgtttgagctgaacttgcagtcccaggtgttgcattaaggcccctgctaaaaagtgaagtttccgtcctcctaagaatcctagtgctccagcagctgcctctccagggcactgacactgtccgtagttagtgccatcggtggagacttaagtggattacatatttgtagtacctcaaggtcagaggagatccaaacgcttgcaggtaaaggatcccccagcactgctgtgctgggactcacatggtgtcccctctcttcctccctcaccccataaaggtgtccataggcaggcaagtaagagaagcaaagcacagtggaactatgttctgatattttgtccctttttattttgcttttggtagcctaaaggacttttacgatatctacgaagttgctgctttgaagtggaaggtgagttcttctctgagaccatagaaggagtagacagagaggtccccacgtggggcagtgaggagcaggggcaccccgagatccagctctctccctgctagagcagctcagcccccagcttggcatggtacacttcagggatcacaggtggccccagcccccaaatctgcccttacatttgtgatacagtgtcatcgttaacagcaccgaatcttacttagaccccattggttattgtgtgacatcaggcgggttactgagcctttctgaggcttgtcttacctgggaagtggcgtaaggataatccctactgacaaacctcatttcaggactatactaaaataaggcctctgcatggcacattgtaaacgctcggtacacactggctggctgtgttgtcatgtagatccctgaaggttaacattgttccccagtttagcagggtgaacaggaaaggaagccagcatcctggctccaggcagggccctggtccctggccctgacaccctccctcttggtcctgttgtctaccaggccaagaaaaacagagagcactggtttgatgagcttcccaggacggcgctcctcatcttcaaaggtaagtgggcttgagtatggcaggtgttggcagctgggggccgatggaggttttcagagaccacagataagcgtctgaggagaggttcagaggggtgtgtgtgtgtgtgtgtttgtctgaatgcctgtgtgaagagacagtgtgattaccccagcagggacgtaagggtggtaggaagcagattgggagagaaatgggtaacttaacccaaccaaaatgggtaacttaacccaaccaagacatttggggtatttttcttttttcatacaaaagcaaagatgttcattgaagaaacttgaaagtgagataattagaagtaaatggaaatttaccacccagataaccactgttagttctctgatgtgtttccctctgtgccatttttctatgcatttttaaaacagtagggtgacattatatattccattctgtaatctgccttttcatccaataacacatatgtgtgtgtgtgtatatatatatgtgtgtgtgtgtgtgtgtgtatatatatgtgtgtgtgtgtgtatatatatatatatatatatatatatatatattttttttttttttttttttttttttgaggcggcgtctcgctctgttgcccaggctggagtgccgtggtgcgatctcgctcactgcaacctccgcctcccagattcaagcgattctcctgcctcagcctcccgagtagctgggactacaggcatgtgccaccatgcccggctaattttgtgtgtgtgtgtttttagtagagatggagtttcaccatgctggccaggctgatcttgaactcctgacctcgtgatccacccacctcggcctcccaaaggcctgggattacaggcgtgagccactgcgcccgaccccgataatatatttttgccctcctcttatggcaggatgtatactttgcatgaccccttgaataatgcttgtgtagtgtaaagtttgaaaatttgaaattgggtgctcgtattatttacctgacagttgccccttaatttcatgccagtttcagcagtgatcaggagagctttgtcctgctctatcttggttccaggttgctcaggctccccccagagcagctgtagtcagtgcagtcttgtctgggggtctgagcagaagcatgggtaccactctttgagcaggaccctcctttcttcacctctggggtaaagaccatgcttacctgcatgcacgaagagtgtggtaggtggttgcacctgcccagaaagagataataataattaaggatacagtagggggaacaagtgcgtaaatttacattttaacttgtcttttcttcaaataggtattaatatccttgtgaagtccaaggccttccagtatttcatgtgtaagtgtgaaatatctccactctaggccactttccccctgagtcctttgctgttctagaagcgggagaggcaagagattggtcctagagtcctgtgtttgactttttattgtggggaattcccagcatgtataaaagtgaagagaacattaccacacgcatccccgtgcccatcacccatctgtatcttcactccggctcatcatcctctctagacctagattttttggaagcaaattccagaaccacagagttgactggtcgatatgtctcttgagtttgttttaatctataggcttctcttcctcacctcatttaggtgaggaagcaggatttgggttttgtatgttcctctgttgccttttcctggaatttggtagttctgtctagagccatgctgtgcagtgtggaagccactggccacatgtggcaatttacatttaagctaattaaaatgaaaaattcagcttagctgtcacatttcaagtgattaatagccacaaatggctaatgactaccaattggattgtgcagataagaaaatttgtattgtcacagaaaattcccttggacagtactaacctagaggcttgatccaatttggtctttccaaggagctctggttccttttagtaggaaatggtgttagagacacaattcgaggtgctgggtgctcattgcttgggttggtcattgtttctaggcctttccatggacagaactagggttttgttttttttaaagataaactgttgtgcgttcatgctaatacttcacattcaggcctacagcaattttaagattaagaatctagatgtgtaagactgatttcatcaatcttacacgtctagattctcaatccttttttttttgagacagagtctcattctgtcgcccaggctagcgtaatctgtgctcactgcaacctctgcctcccaggttctaagtgattctcctgtctcactcacctgagtagctgggattacaggtgtgtgccaccacgcccagctgtttttgtatttttagtagagatggagtttcaccatgttgaccaggatggtctcgaactcctgacctcaggtggtccacctgcctcagcctcccaaagtgctgggattacaggcgtgagccacgtgcctggcctagattctcaatcttaaaatccaggttgtctttgaagacaatcagacaccaacaaagaaaaaaaaataaatatccaggttcccaactacactggcacagttattcatttgctttgtctcacagtcccaggataacaattgcaaagcaatcccaatgatataattactagaaacatcattccaatgatgtacattcagattactgtgggtttttttgtttgtttgttttgagacaaagacttaggtctggtgccctagtggcatagtcatggttcactgcagccttgacctcccaggctcaatccatcctcccacctcagtcttctgagtagctgggaccacaggtgcatgccaccacacctggctaattttttaattttttgtagagacggggtagcctcatgttgcccaggctggtctcaagctcctggcctcaagccattctcctgccttggcctcccgaagtgctgggagtacgggtgtgagccagtgtgcttggccttgtgttttaaggtcatgtgggatagttcctctccatgtggacatgtcaccaactggatacacatttggatttcttttttttttttttttttttgagacagagtctcactctatctctgtcacccaggctgtggtgcagtggcatgatcttggctcactgcaacctctgcctcccaggttcaagcaattctcctccctcagcctcccaagtagctgggattacaggtgcccaccaccacacccggctaatttttttttttttttttttttgagacagaatttcactctgtcacccaggctggagtgcagtggcgtgatctcggctcactgcaagctccgcctcccgggttcacaccattctcctgcctcagcctcccaagtagctgggactacaggcacccaccaccacgcctggctaatttttttgtatttttaatagagacgggatttccccacgttggccaggctggtctcgaacttctgacctcagttgatccacctgcctcggcctcccaaagtgctaggattacaggcatgagccaccgcatccggcctacacatttggatttctttatgccatgttattttttattttgggggattgcttttggcatttaattttgttttatggccgggcatggtggctcagacctaaaatcccagcacttcaggaggccgaggcgggtggatcacttgagcccaagagtttgagaccagcctgggcaacatagtgagacccctgtctctacaaaaaaaaaaatacaaaaattaactgggtatggtggctcacacctgtagtcccagctacttgggaggctgaggtgggaggatcacctgagcctggggaggttgaggctgcagtgtgccatgatcgcgccactgcactccagcctgggcaacagagtgagacccccctatctcaagaaaaaaaaacccaaattttgtttcataattatgtaaattaggcctgggcatggtggcttatgcctgtaatcccaacactttgggaggccgaggcgggcagatcacttgaggtcaggagttcgagaccagcctgagcaatgtggtgaaaccccatctctaccaaaaatagaaaaaattagccatgcacgcctgtggtcccagctacttgggaggctgaggcaggaggatcacttgatcctgagaggcagaggttgcagtgagttgtgatggtgccactgcactccaacctgggtaatacagtgagactccatctcaagaaaaagcaaaaaaaaattatgtaaaatacttacatggttccaagtcagatctaccaaaaaaagtatattgaaggaagtttagtttatatccctgtcacttcccacagtgggcaacttttatgtatggcttctccttccattgtttaaaacctgtaagttggatacctatcaatatatctgtcttaaacaatagcatattttatgcacttttttctgccacctggctttttgcagttaacaatatgccctggagaccgtaatatgtagaaatgaggctgggtgtggtggctcacacctgtaattccggcactttggaaggcagaggcaggtggattgcttgagcccaggggttcaaaaccagcctgggcaatgtggcaaaaccccatctctacaaaaaatacaaaaattagctggcgtggtggtgtgcacctgtgttcctagctactcaggaagctaaggtgggaggattgcttgagcccaggaggtggacgttgcagtgagccaagatcacgccccactgcacttcagcctgggtaataataaaaccctgtcttaaaaaaaaaaaagtaatatgtagaaatgtacctcatttcttttctttcttctctcttagagagagggtcttgctctgtcacccaagctggagtgcagtggcacaagcatagctcactgcaaccttgacctcctgggttcaaacgatcctcccacctcagcctcctgagtagctgggcccacaggtgcacactaccacacctggctagttatttttattttttgcagggatttggtctccctgtgtgcccaggctggtttcgagcccctgggctcacgcaatccacctgccccagcctttcaaagtgctgggattacaggtgtgagccactgtacctagcctgtgtttcttttttatggttaaagtatgccagtttatgaatgtatcgtagtctgttcaaccagtcccctactgatgatcattgagattgttgccagtgttttgctatcacaatagtgctgcggtgagtagctttcagatacatcttatatttttgctagtgtgtcattgggatggtttctggaaagtgggattgctaggcgaatggcttaatgcatatgcagtttttctaaagagttcatgcaattattttaaaattagaagtctctaggggaaaacaagtgttttcaatacttgaatgcctggtatattgtccctcttttacctcaatttggaataatctctacatcataactggtattcatacagtgacagagggagtgtttttagaaatttatagctgtttctaggtgaaaacactggttgatttagctcccttggtaagagcactgagcagaaagaagttccctatcaaatgggtgtgtggagcagccctgttctccccatcccgtagagctccaggaagttaaccagggacttcagctgcgacctgcagatttctaagcccccctgttatttctctgtcttttacgggcctgtgtatttcagacttggtggtggcagtcaacggggtctggatcctcgtggagacatttatgctgaaaggtgagccccgctcagggactggccgtgtcctggccggcacacctggcttacctgtgagctgctacttctctgtcttacaggtgggaacttcttctccaagcacgtgccctggagttacctcgtctttctaactagtacgtttccgacatggctttgctggactgcttgttttaaaattgtctgggagaactttcattcagtgtagaacctcatggttcttctctaaaacaggaagctataaagagacggagtaatcagtctgattccatctcgtccccgtttaaaactctttcgtggttgtccgctgccctctggatggagcccagatcctaggcgtgtgtgaccctccactcggctctgcagccctgctgtttgccagcgccgtgtcccccgctgcacactgttgctctcctcagcagcctctgctccctgctgctcttgcctgcctctgggctgtgcacaggggtttcctctgcctggtggtgtcttcctctaacctctgcctgactttcctgctctttccatcaagtctgagcacactgtgttgtcattccctgttggcgtctttcctcccacctagctgataagctctgtgcccccagggttgccctgcactggtcacttttgcacacctggtacccaatgcaaggcccaaggtagaaggggtagtcaggacacacctgttggatggacagatggttagctgggccctgcccagagacaggcagggaggatttctctctctttttttggggcaggatctttctctgtcacccaagctggagtgcagtggcgtgatcatagctcactgcaacctcaacctcctgggctcaagggatcccgagtagcctcagcctcccaagtagctgggattacaggcacacagcgccacaatgcctggctaatttttgtattttttgtaaagatggggtctcactatgttgctcaggctggtctccaactcctgggctcaagtggtcctcctctcttggcttcccaaagtgctgggatgataggtgtgaacccctatgcctggccagtttctcttaagcagattacccagttggccaccatctaggccctctcctggagcacctgctctcacgctgggacatgagtgaggcctgggctcagcctggagggcttatggccagcagggaggctgcagactgtggaggagcctcaaagaggagaccgagcatgggggaggatgtggcggggctgctgccgatggattccttctgtccacagtctatggggtggagctgttcctgaaggttgccggcctgggccctgtggagtacttgtcttccggatggaacttgtgagtggacagcatgtttctgacccaaagctgagactcttgaggatggccccagacccttctctgcacaccctgatcccgggccatttctggaatcgcagagggagggtctgaggatgggctgaggcctatgtctccctcaagcagccctgcccacagcccaggaactccccagggtcaggcccttgtctgaagcctctcagaccacccacaccgtccttctggaaacggcctcttgaggtgccatagactgattggctcttcctgactcattaaacttttttctcttccataaaagccacaatgcccacagaaaagaatgctcccccccttccttgatcagcagtaatgagaccccatgtggcccttctccctattccccagagcgttggaggtcacttccctgccctgttcaagttaaccggcctgtgaagtcaggctgcactcatgaggtcttgggccgcgagggtgagcgggttaacacgcagagcggagttgggaggagccgacagcacgtgtgtgccctgcgtgtctggagaggagagagggtcctctggcttggggcagggcgagctgttctcccgatgggaatctcactggaagggcctgctctcttccctcaaaaagttccttggggtcaggctggtctgcagtgtgtaaccagatgtctgttgagcggaagacgaggcctgtctccagggctgcggaggccagggctgcagaggccggggcttctttccttcttgtcgttagaccagcatggggccctttgtaggggttcccgggcatttctggccttggggtcagagcactgaggcctgacccgtgagacgcatgctgggacagggcctggccaccttgaaaccccagggtggcaggaagttcttcccgcagccggctggttcctgttggtgttgctgtgtctgggctctgtgggagggtggctgtgcacagggccagggaggggagcaggcgcaggtaggctcagggccacagggtggaccttggcctctcccctactgcaggtttgacttctccgtgacagtgttcgccttcctgggactgctggcgctggccctcaacatggagcccttctatttcatcgtggtcctgcgccccctccagctgctgaggtgatgggcagggcagagccggagacagggagaaagagagggaggacgggaatgccccaggattgatccgggaagtgacccagaatgagccagaaggttcacaagccagagtcacagatgtcaccccctggagaatcaccatggggtcaacatccccacccctgagggtgtgcaggctgcctgtgcccttcccctcactgcaccaggtgcctctgggcagagaaacccagcccatgactcatgtgcaccccacctgaggtggcattgcaccagcgacaggagcccatatgctcaagtcacagatcacagagccacaggtctgagggttggaagggcctttcaggggccctgcgtgcttttctggctcagcgtcttatggagaaaaaccctcgtgtgggtcccactggtttcccagggacactggagaaagtcccagacgagcctgccccactgacggtgtctcttcctaatgaggggtcccgaggtcctgtgccctcagagcctgggcttgcctcctgaccctccagctgcaaccccatccacgtccgccccatcctctcccaaggcgggacaggcggggcaggtgcggggaggggtggtggcgtctatggaggaaaagcctacccccttggcgtgtgggggtggcctggggctgctcctgagtgtccgcctccgtcccgccccctgccacccttcttcactggtgagctccattgcccccgctccccggggcacatgggcttctccccgctctttcccaggagcaaggccttgctcctgtctgagcctgcagctctactgcaaggagatgtggcctggccctgctcctcttcgtggaaggaccccgcccagccggtgtcctggggctgccaccatcccttccctcatgcatgaatcacctgagcccagctcagggttggtggcgcccaagggagtggacgcaggtggaggagaggccctcacctgtcttcaccgcatggcgtgtggaaggcggggccggcatgttctgagggcgggggctgaggcgtgcacctgtgtgtggaggtgacgggtgtcctcctcgctcaggttgtttaagttgaaggagcgctaccgcaacgtgctggacaccatgttcgagctgctgccccggatggccaggtactgccagcccccaccctggcctgcaggtccaggtgccgtgtggcagtgccccgtgggggcgggagccgagtggcagtcgggggaaaggagttccacaaaggactgcaatcgagggcctgacggggctccaaggagcctggaatcttgaccaccacaggtctcctgggcaccatttttctccactgacctgtctgacatatttagtagggagggcagggagctgtcaactcgcttaccacctgtgtctacattcacaggtaaggggtcacctgtgagtctaccttcacaggtaaggggtgaatctctgggaaaggggcatttgttcatagcgtcctgacttgagctgtttttcaccccagagctgccccacgaggccccttccccgcaggcactttccagttggtgaaccgaccaggggcatggccctgcagtcagccccacgggtccgaggaggccggggctgcagaggagccgttccctcctgccggccccgcgtcaccctgcccctgtcgccccacagcctgggcctcaccctgctcatcttttactactccttcgccatcgtgggcatggagttcttctgcgggatcgtcttccccaactgctgcaagtgagtaggccccacccagccccaggcagcctgcatttcccgggcagagggctggccagggccaggattggtgtccttgtggccttggggtcctcggggatgttcctgtctaagcaaccaccttgctttgctttcagggcttagttgagtgcagtgagctaaatgaggggcctggactcggggtccctgtttctccatcccccaggcagggttgggagctgtcagctcaccctctgccgagggctggaggccacccccacagtagcctgggtcccaaggtcaagtcccatggcttcctcccacttctctcctggagtggctggggacctgggccaagaccagtcttctagggacagcatcgtaggataagacagacggacacgtgcaggaaggtcatggtgctcagggatggggagcagagagtgaaatctcccatgagcactccctttctcctgagccgccacagtgaaatcactgcacactgccattcattcatcctcaattcagagagtcctcttacatttggtctttacagcctcaagcaccgatgaagaaacagttttacaaagacactggtagctttgagacccagtttgagtgtcaagcttggtctggaaccagaagcctatagcagtgggtcccagactttagagcccattgcagtcaccagggagcttagtgcaagctccagacctcactcttgtgtctgatgcatgcgtgtgggaggaggctccctggtggcccaagcactagacttttataaacattagcatggatattaacagaacagccataaaagattggaaggaaagtggcaaataagagctcctcaaaacagggccaaccttttcaaatacttgctcaggccaagtattggggaagccccagtagggaattccttccctgggactgtggcctagtgtccagcctcaagagcagatcctagatggggcaggtgcagaggaggcccttgcctctcctccctcccctgcaagcaacggtgagagagaaggccctgcctgcagcagacaacttccaggtgacagaggtgggtcaggctggccaggggatcccgccaagcccagcaggcaggaatagccaagggcattccttcagcagggacccaggcatgaggtggagagggttaggcaggaaaccaggctgcgggcagaacagaaggatccttggccagaactcggtttgtttcagacttctgtcctctctggaggtgactgatcgccttgtgaccctccctcctttctcccttgtgctccggccagcacgagtacagtggcagatgcctaccgctggcgcaaccacaccgtgggcaacaggaccgtggtggaggaaggctactattatctcaataattttgacaacatcctcaacagctttggtgagtgggaaaaatcacagggggcacattccctggggaccccacccttgtcacccttgtcaccacgggtcccagaggtggtgtagcaagtgtctgggccacactttctggaagcctccctggcccaggtggaggacttggtctgcccagctttggcagtacagtccaggctggatcctggagctcactcagttgcctgattccactctttcctgatattttctcagtaccggggaggacaagagttgcaagccttagctgggcggggtcccctcatcacagtgccacttgcagaatgggacccagccacaccactgctgctgcagctgcactgccccctggctcagactgcacacagccctctgcccactcccatgaagaggcgaacacagccaaaccgcctctccagaaaaagggtgtgcccccatgacaccccagatctgcacccagtaagatccagatagtctgatgtggcacaggctgctgaggcagagggtgtgttctcttgggggcaggccatgatgtcctgtggagccagcgccctaggagtgccttgcctggtctttcctggagctcacaacccaagcggtcatatggtgaccctctcatcttagcacatggcacccaggataggtggcaagaggccacttgaaattgactttgaagtggggtctcatcaggatgcttctttctctcttccctcggcagtgaccctgtttgagctcacagttgtcaacaactggtacatcatcatggtaagagctcgggcagctctgggggtatcttcccgccagccctggggtcggccctgggtctcccccaacccagagtatataattcttcccgtagcttgcagggctgggggtcttgagtcatgctgtgttggtgttcagtggggaggccacaggatggctgggccccaggagccacccctcccagtgttggctggactcggctgttactcccatctccctgcatgtccccagcagccaggagatgccacttagactctgggtctctgtcctgtctcgcccactgtagagatgacttttccctctagtgacaaagtggcgagcattgctgatctctttattccattccttaaactttcccgactcccagccctactgggataaaggctgccctggttctggatccagtcgtccaggggagtggccagggctccttcagcagtcaggaattagtgttaggcccagaggggcaagcttcctctcctccatctctcacaaccagccacaaatcacggtggggtctgcgaagagccggggccatggagcagcctgtgtagacggggacctgccctgcatgggcaccccctcactggctgcttcccttggtctccaggaaggcgtcacctctcagacctcccactggagccgcctctacttcatgaccttttacattgtgaccatggtaggtcccggaccacagaacgctctttgtccttcgtcttccacatcaccagctgcccctgctcttcagcctgcagcgtcagggagtggggctgggtcccatctggccggactctgttgggcgtgggctgcgcagccacggacacctacccaccctcctcccctgcctctgcccctccctccctatccctggccaggtggtgatgacgatcattgtcgcctttatcctcgaggccttcgtcttccgaatgaactacagccgcaagaaccaggactcggaaggtctgtgcagggatgatgccttgggcatttgatatctgccgcctacccagctctgtctgtctgtctgggtggctgtccagccagccatcaggctgtcatttttctgctgtctggctgtccagcttatctatctggcttgtctttctagatcttgtatttgcattgattttcaaatatttaatgtcagaaaacgtaatctaactttaaaataagacagagcatgtcatagttggagaaaaatcaagaagtagagaaaggcttatgtggcagcagcagcccctgccctgcctttccctcccgtcctccagaggcttctccttcttggctatttcttctgttagtcatctccacgtttctcaataataggttcacactacggttcttgatttaaatggtgtaaatattgcttatggcacaggcgaatcgtattcctgctgcaactggatggtgctggctttagtgactgcctcactcttcccagattgcacagctttctgtgtgctgaccctcccttcttcccaaattctccatcaaaactgtctgcacttgatctcttgagcccaggaggtcaagactgcagtgagccatgatcacaccactgcactccagcctgggcagcggagtgagaccctgtctcttaaaagaaacagaaaaccctgtgcccacacttgttacctctcatcctcagatctctgtgctatcagaccatctgaccattttctctgtgcttagaggccccttcctgaaaccctctggccctgtaacagctgccagctagacctgcgctcctgacatcacagcagagggaggggaagggaaaggagggccaacgaggagagcaggacaccaatgcagtgtcggtttagagagagaaccttaagaccccctgcggaagggggcaaggaggtacgagacccagccaggttggcagctgcagccccgggcccttcccacacctgccttccatccctgcagttgatggtggcatcacccttgagaaggaaatctccaaagaagagctggttgccgtcctggagctctaccgggaggcacggggggcctcctcggatgtcaccaggctgctggagaccctctcccagatggagagataccaggtgaggagcccaggccctggtccgaaggagggaggcaggtttcagtgtgggtggcataatcccttccctcagatattggtaacattttgagtgacacagttgcaaaagccagagaagtgggagacgccaactgtggcaccaggggtgggacctgaatatctgcagccgagccctgcagcctctgctcttccttagcaacattccatggtgtttctgggacggcgatcaaggaccaagagcgacctgagcctgaagatgtaccaggaggagatccaggtaggagcctggccgaccacgctgcgaatcctcccccaagctatgtcctgggaggggcagggagctgctctctggccctctgagtagagggagaaggctggtagagagatgcagaccgtccatcgggaccactgctggggttgtgtgggacctgagcggggctcacttagccttgaacccttgactcgtgcccagcagaggcagctctccagcctgcctgccgccatatgtccctgccccttatgaattctccagaacctcctctccatctcttactctgagtcagctgcaaactcaaacatgtgtactaagaaacacagtgagcaaagaggaaagagcggcgaccgtggtgaactggcaaggatgtccctgtccaaaggagacagtctcctcccagctccaggatgtgcctgtccaaaggggacacagcctcctcccagccccagcgagtgctgcccaataggaagaaggccctactgcggtcgggctgcttggtgttttgttttgagatggagtctcgctctgtctcccaggctggagtgcagcagcacgatctaggctcactgcaacctccgcctcctgggttcaagcgattctcctgcctcagcctcccgagtagctgggattacaggcacacgccaccacacctggctaatttttgtatatttagtggagacggggtttcaccatgttggccaggctgggagtgcttgggatttttcataattgggtgttttttgttttgttttgttttagagatggtatcgctctgtcacctgggctggagtccagtggcgtgatcatagctcactgtagcctccaacccctgggctcaagtgatcctccccactcagcctacccaagcagctggaactacaggtgtgcactgtgacaccctaattaccttatttttgtagcagtgaggtcttgctggggtctcaaactcctggtctcaagcaattcttccaccttggcttctaatttaagaaaaggcaggccaggcatggtggctcatgcctgtaatcccagcactttgggaggccaaggcaggcggatcacttgatgccaggagctcgagaccagcctggccaacatggtgaaaccctgtctctactaaaattacaaaatttagccaggcctggttccgtgcacctgtaatcccagctactgaagaggctgagtcaggagaattacttgactccaggaggcagaggttgcagtgagccaagatcatgccactgcactccagcttgggtgacagagctagactctgtctcaaaaaaaaaaaaaaaaggcagaatcagatgtttttctttttttgcatgacctcccaatctttacatattggcagctaaggaaaatatctcacaaagcaccgtgtgggctggcatttggcacggtgccttccagaccatgggccaccagcccatgagccctgcagagtcttctcaaccacctcagggttgccagggctccggggagcctctcccacaccagctatggtggctttgctctgttttctggcattctaatagcttgaagcccttctgtttcactaaaacagtgacaaccagggtccatgcctgaaaagcggggggtgctgtccccaaagcagcttacacattctccgggaacacaagagactcaggcagtgttctttgggctgatgtgtagtggctcactgaacttggtgtcacagaaacatggaaataatagaagcgtttgaccttgggcagtcactccatgcctccctgtctgtgcaaggggatgactgtgcagcagcacccattcaggtgtggttggaaggaggtgtgctgcccttggcctctgcccttctgcctgtccatctgctccaggcctcagtttccccctctgtaaaacaagggggccagaactaggccatctcgaagctctaaaagtctatggttcagtcttttaaaaagtagggtagggtatggtggtgcacacctgtatttccagctgcttgggaggctgaggcgggaggatcatttgagcccaggagtgggaggctgcagtgagccgtacctcgccactgctctccagcctgtgccacacagtgaatctctgtctcctaaaaaaaaaaaaaaaaaaaaggaaatgtggggtatacttaattccttaattacctgaatacctcagtccctgaaaatgtcagagtttataatcatggccttaggcaggtgaggtattcagcacaatacagctctaagcctcggtgtctcgggtgtgaaacagggacacaattcctgccaagctcaaaaggggtcactcggggggccctttagtgaaggacaaaaggttatgctcacaaacaaggggtgagggttgttcctgcctgggcctgttagagagctgttatgcgcaaacctccagacactagggaaagatttcattgtcatttttgcctctggggccacattcaaaattcccagcatttctgggcctgtgacgggggtttcagtaccagctgggtgaggctggcagccctgccccttccagcctggatgctgtgggctgtgtgaccttgtggggtgggcggggcagggggtggggtgcagccctcagcaccccttctgctctcttctccaggagtggtatgaggagcatgccagggagcaagagcagcagcgacaactcagcagcagtgcagcccccgccgcccagcagcccccaggcagccgccagcgctcccagaccgttacctagcccagcgcccgaaagccgtctcttctatgcaataacacaatagtattactctactgcgatgtacggaactgcggtgtgtgtacacatactcacgtatatgcacatatttatatacaggaagaaaaaagacagacaagatggggcttggtttataaccaccttgccctgtcttccttaactccagaagccagtttggtgaggggtgggggtgcggccaccaggtctgagctcttcctactgtggaaggctccagaaggcccttcacaaggagacccctcacctggatccagtcgactgcggggcttgcccctcatgtgggctggcctccatcggccacgtccaaagctgtcactgctactgcttcaggctcacatccccccgacctgatggcgtgcccgccccctctccctgcggcccatgccacaggtttctgtgttttgctttagggacagaaccacttaggaaggaaagaactcccggtctccagggtggtatttcagtgtctgtgataatgtcacgcaacacctcttcggggaccagtgcccaggatctaatggaagcggaattggggcaactgggcccatgtggccagagctcagttagccagtgccgggcggccacagattacactgaccaatctcctcccttggctctgcaagcctcccacccagccttctctggcttaacccttgttggcgaaaactcttccacagtggcctccttggggacccagaacccggaggaaggggcatgaggcaggaagtggggccgatgtctgcaacccagaccacttcgtggaatgggctcttgaccaaatccctttttttgcgatttacccgttcaagcaaaacaacgttttggttaactaaggattgtgctaaagccgataccaggtccttcacacgtgtgcactaggaacaggagcgaacagcacagagagacgctccctgtgggacgcagcagccccgtggccccggcccagttcccagccaccctccctggctctgctcacaccagagatttccatagcaggagcggttggtgcagaagtaggttcagatgaacctcagttaacgtcgccacccctcctcccaccatggtaccctgtaggagccctgtatgacatctgagcgtggtggaggtaggagggttgccagctgcagtgaccctgccacagaggcagggtcagtgcagaggtcgctttggttccgcttccctgggccacagaacggaacacagcataggttctgcagcaggagccgcagtggcaggatggagggtgcgaagggcaaggagtgcactgctgggcattcctggccagccccggccctctggtgcctgcttcctgtgacttcagaaggcaggtggacagagcctccctctggccttgtcctcttcccagccacagaacgggcagggtggcacccgaccccaggggagcagtacctggtcccccaccccctcctcccaaccacctccaaggccaagctgggtcccatagccagcacggcatggttctccccttccccccttcccaggtcaggggagttggacaagtagcaggtgtttgtttttaaagcacagccctttgggaaagcaacacattattgagactcactgtgattcccccgggagtcagactggctttgtcctcttcctctctggagggccatgggccatcagcaggagctccacatcgagccccaggccagaaccccctccctttcacagagagggaactttattgcacaattgggtgccttttagcttttgtgtgttgaaatgggcgttttggaagcaagggtcaggggacagcttctaaaggtgtgagtctctgacctgagcatctgggcctcgcctgggcccttcttcctccccaggggtggaaacgtggaggggccagcagcaccccggggtctgcccaggggagtcaaggccccgaggtgggggggcctattccaggaggagtgggatctcggccctgtccagagcgagttaatgtgtccatctgcccaaccctgtcctgagaaaggacctggttttggccaggacctgacaaatacccaatggcagcagtgtcaacagacgggagtccagccagggtgggtgcccttgtcattgaggttagggacagctatccccaggttatgcctggccccacccagcagggagttggggtccccccacaggctgtgagctctgtgggccctgggatgtgatctagctcagatgccctctcatccttgatgtcatagttgagtgcacccaagtggcacccactggcggccaggggcacagcctggtggtggtggcaatagaactgtgcccctcctcagctcctcgcttcccctcccacagccccagccttactccaccatgcggacaatcattttgtacggatcacgggagcaatgctgtacggttttgtacactggtggtttgtttcctagaaaacccattgtgtctctggatttctagcacattactaaaagagcctctgctttgtaaacatg

SEQ ID NO: 253 - DNA, 40358 bp, Homo sapiens
  source 1..40358: mol_type = genomic DNA; note = NC_000017.11:c75667202-75626845 RECQL5 [organism=Homo sapiens] [GeneID=9400] [chromosome=17]
tcatcactgcgcgacggatataagattgcgtgggttctgcctaaagctgaattcccagcgctttggcttctctgagttggggttgtgtataggggtcttcgaacagttccggaaccagccagcagcctttaattcttgggcggaccacggccggttctgatatcttagggtgaagagagggaggtgtcggccagccaagagagaaaattgcggatcttgggctcaggaagacgggagaaggggttcggggtcccggggtggaagaacggtcgtcgtggttgcgcttatagaagtaggagcaggtggtggatcttaggaaaacggttccccgttctccaagctgttctgaagacatttatgtttcttctcttgatctgatttctagctctgtgctataccgtggcctggaatagttcaatgttttcattttcattgagcgtaaaagtggagatgttaattactgaggaatgtattgcttgaggcagttcaccttcagctttattacttaaaaataatacattatttaagtgtaatatagcaaattgttacagaaaaataatctgtatttttaatgcaaaacagagggttctcgtggcaaccttttactacctttgccttaacctttggccactgttcttggctaagatgagcagccaccataccacctttccttttgaccctgagcggcgagtccggagtacgctgaagaaggtctttgggtttgactcttttaagacgcctttacaggagagtgcgaccatggctgtagtaaaaggtaacattaccaagctaccttcctttaaatttatgctggctataccataacgctgcggcagaacaccctcctcctcacccttcgtactgcctcacctttggtccataactggatttggaaatctttagagttgtcaaagcttgtagtttcgtttatttgttttaattagagatggggtcttggcatgttgctcaggctggtctccaaatcctgggctcaggcaatcctcccacctcggcctcccaaggtgctgggattacaagcatgagccaccacgcccggcccaaagcttgtagttttagtggcagaaccacccagctggtctatatttcatagctagatttacacatggtctttgaaaacacttcagattctcattattgttcgtttgtacacacaaacgaacagcaacagtgagggtggtaggaataacttaactcggtcactggcctcctaggtaattcccttgttgcaggttgagtggccttggtcccagatagagaaggaaagagtaataatgttataaacctgagatacggtgacaaatggaagttgccaagaggcgagcagcaatgtaatattaatgatacatgtctaaacaaaagccctctaagtaatgtcctctcatgtctacacagatgtacccactcatctagcagtactctgctttcatggctgtttagttcaatcatccatatcacagcagactcagacttctttttttttttttttttttttgaaacagagtcttgctctgtcgcccacactggagtgcagtggcgcgatctcggctcactgcaacctccgcctcctgggttcaagcaattctcctgcttcagcctcctgagtagctgggattacaggcacgtgccaccatgcctgggtaatttttgtattcttagtagagacagagtttcaccatgttggccaggctggtctcaaactcttgccctcgtgatctgcctgccttagcctcccaaagtgctgggattacaggcgtgagccactgcgcttgacccagactttttaaatcttgtttttaaccattactagaaatggtttgggcatgtatccaagtttcccaggatccttgcctttttcatagaaaggacaggaggggaattaggattacatcgagaccctcccatgtgccagacactctgctaggtgcttttcctacattctcatttaattttcaacaacttcaatgaaaaggcaggaagcactgagatattgttgtcttgtattttttcaggtaacaaggacgtctttgtgtgcatgcccacaggggcaggaaaatccctatgctatcagctccctgctctgttggccaaaggcatcaccattgtagtctctcctctcattgctttgattcaggtgaggcttagggcaatgaagatggtagcccaaaaagattcggggaaggttttttgaggctggaaatttcacttctctattggtcttttgcctcttattttcttttctttttctttttccttttttttttttttttttgagacagagtcttactctgtcgcctaggctgaagtgcggtggtgcgatcttggctcactgcagcctccacctcccggcttccagcaattcttgtgcctcagccccccatatagctgggattacaggtgtatgccaccatacccggctaatttttgtatttttagtagagatgaggtttcaccatgttggccaggctggtctcaaactcctgacctcaaatgatccgcccacctcggcctcccaaagtgctgggattacaggtgtgagccaccacacccgcccctgcctcttattttctatgatttgcctatctcattcgctatattgggtttctgtatttccccaatgtagtgttctccactggtgcatatcactctgggaggttatgaatgactcctctgaggtccctcaccctcctttgttatttttttgttcagaggagtatgaaactgtatttgtacacacatatacactcagtctcatgtatacacacacgtgcactcgtgatgttgagacagaagttgcagatggatagatagctaagttgatatggggaatccctggtgtcctgcttattttggtaagggcacagtatgtgaaacagaaaaaaagatgagaaactgtctgggaccttattaacatctgctctacaggtgttctgactatttaaggcctgcagatgggctgatagaatcagaattgaggaagtgtggctgtgtgggtaagagccatccaccatgaaggaaggtagagagggaactacagtaataacttggtgaatgttcaccaggtcccaggcttcgtgctaagtgctttacatacattaatttctttctttctttttttttttttttttttgagatggagtttcgctcttgttgcccgggcttgagtgcaatggcgtgttctcggctcaccgcaacctccgcctcccgggttcaagcagttctcctgcctcagtcccccgagtagctgggattacaggcatgcgccaccatgcctggctaattttgtatttttagtagagacagggtttcaccatattggtcagtctgatctcgaactcctgacctcaggtgatctgcccgcctcagcctctcaaagcgctggaattacaggtgtgagccaccgcgcccggcttacatacgttaatttcacctctcagatgtaaattttaagttatacaacaatgctattagatagaattgtataaatcgttcagagggtaagaaacagccagcgagcatgtggcgattaagtgagccaggatgaaatctaaatctgaagtctgtctgacttcagagcctgtgctctaaaccacttcaccttccatagagattgagcatccctaaagcaaaaatctgaaatctgaaatgctccaaaatccaaaaaattttagtgctgacgtgattccacaagtggaaagttccacacctttctgacctcatgtgatgggttgcggtcaaaactcagccaaaactgttttttcatgcacaaaattattattattatttttaatatatattttttattatactttaagttctaggtacatgtgcacaacgtcatgtcaaaattattaaaaatatataaaattacatctaggctatatgtataaggtatacgtgaaagaaaaaatgaatttcatgttcagacttgggtctcatctttaagagatctcattatgtatatgcaatctgcaaatattcctaaatccaggaatatctgaaatctagaacacttttggtcccaagcatttgataaaggatattcaacctctactacttctatgcaaagagaatatatattggagggtgggaggaggacagtttatgactgggaaatcctccagggacttgcagtgatgtttacctgagtcctgagggccagttacagcctctttctcttctcttaggaccaagtggaccacttgctaaccctaaaggtacgagtaagttccctgaactcgaagctctctgcacaggaaaggaaggagctgcttgctgacctggagcgagaaaagccccagaccaagattctgtacatcaccccagagatggcagcttcatcctccttccagcccaccctgaactccctggtgtcccgccacctgctgtcttacttggtggtggatgaagctcattgtgtttcccaatgggggcatgactttcgtcctgactacttgcgtctgggtgccctgcgctcccgcctgggacatgccccttgtgtggctctgaccgccacagccaccccacaggtccaagaggacgtgtttgctgccctgcacctgaagaaaccagttgccatcttcaagactccctgcttccgggccaacctcttctatgatgtgcaattcaaggaactgatttctgatccctatgggaacctgaaggacttctgccttaaggctcttggacaggaggctgataaaggggtgaggcattgaggtggaggccaagcagctgttagagcagtggggtgcgatgtgatggagatggagattagtctaagacctttggtttttctagctttctcagccaggcttcctaaaacttgtgcacaaaaagagttgtctctttggtttcctggcattgtcctccttaccagggtttccttgttctggatcctgtggaaggcaagcagccagccagtctgtgtgatgcctctgcagacccatgcaaagctcatgaagaggaggcagagaagttaaacaggttgagttttgagcagcttttggcctgttttttttttgagatggagttttgctcttgttgcccaggctggagtgcaatggcgcaatcttggctcaccgcaacctccgcctcctgggttcaagcgattctcctgcctcagcctcccaagtagctgggattacaggcatgcgccaccactcccggttaattttgtatttttagcagagacggggtttctccgtgttgcccaggctggtctctaactcctggcctcaagtgattccccccaccttggcctcccaaagtgctgggattgcaggcatgaaccattgcatccagcctggtcctgctttttataaagtgacagagcctcactgggtgtcctgcctcagaagagactgaagccgacgagagaaggaacacagagcttcttttagagcagggtgcattacactgggcctattgttctgttcttgctatgcttattttcttcctgcatctccccattcagttatctggctgcggcattgtgtactgcaggactagagaggcttgtgaacagctggccatagagctcagctgcaggggtgtgaacgccaaggcttaccatgcaggtaaggggcacccaggccacttgagtctcttcaccctcagaggcttcttagctggtctcttgttctttacagatcctggttatcaggtgacccaccatcttattgcagatactcaggcagagctaaagtgatacacttaaatcccctaaaaggagtctagacatgaatgaggtctaaaatgagaattgtgactcctgagttcttcccactgtatgcctacccagcagcaggtgatacgtttttacaagccaaggtaatggtgttgtaggaagagcacaggctttggaggccaacggacttgggcttgaatcatggccctaacctttgccaaatgctctgtgccacacatgggctagggtctttgtgcctgtcagctgaggctcagtaaagttaagcgcctgatgttaaggtcagacagctgggaagtgaaagattcagggtttgtgaagtgcctagcacacagtgtcaaacccaaaataggcccccggtaaacccaagggaaatgtgagttcccttctccatcttcccctcctttacagggctgaaggcctctgaaagaacgctggtgcagaacgactggatggaggagaaggtccctgtaattgttgcaaccattagttttgggatgggagtggataaagccaatgtcaggtgagctttggttcttgccctgccctcctggtctgggcctggctcagggtggattgcctagtgctgtgcccaaaggaccaggtgcatgtgctccttcgagggctagaggggaaggaagctccaggagagagtccttagaatacagcctgaatgctgacagctcctgtgcggcctgctcccaggtgactgcacggcatggttctggcaccccccaggatggggcagcatgcagtctgtcaggcttgtcctttaacatagtcctgttcactcacatctcagtaggtggatcctatgaggaggtgggaataaaggaactatagtcatgcacctcatgttgatgtttcggtcaatgacagactgcatagactgagatcctgtaagattgtaatggagttgaaaaattcttatggcctagtgatttgcattacagttgcctacaatattcagtgcagttaacactcgatacatgtttacagcctagctgtgcaggctgcagtaccatctagatttatgtaaagactatccaccgtaatgtttgcacaatgatgaaattgcctaacaagtcatttctcagaacgtatccctggccgggcacagtggtccacacctgtaatcccagcactttgggaagccaaggcaggtggatcgcttgagttcacgagtttgagaccagcttgggcaacgtggccaaacctccatctctacaaaaaatacataaaaattagccaggtgtggtggtgcgtgcctgtagtcccagctacttggggggctgaggtgggaggattgcttgagcccgggaggcggaggttgcagtgagctgagatcatgccactgcacttcaggctgggcaacagaccaggaccctgtcttaaaaaacaaacaaaaacaccaaaaaccaaaacacaatatgtattcccatcattaagtaatgtgtgactgtattttaagctactccctgtggaaggtcaaaggcaaggctcttagaaccatcattcctttttattgcttactaatagtctagaagagtcggggtgcatcccagcctcctagccccacactggcaactaataggaagtcttttatatctggccatgaccttcaagaggcgttttgggctacagcctgaagccctttggtctgattaacgacaaataataataccttgtatgatttacggagcatgtttgcatacatggtcttcgtgaacctcacagtgaccctgagttagggacgaaattttatagtgcgttacatttgaaagaacaccgacttcagaatcagagttcgaaccctgggtatgctgccaggtgtagtggttcacacctataattccagcactttgggaggaccagatgggaggattgcttgagcccaggagttcgagaccagcctgggcaacatagcaagactccatctctataaaattaaaaattagccaggtatagtggcatgtgcctgtagtcctggatacttgggaagccgaggtggaaggattgcttgaggccgggggttgaggctgcaatgagctgtgattgtgccactgtactctagcgtgtgcaacagagcaagaccctgtcttgaaaaataaaaaacaaggccgggcacagtggcttatgcctgtaatcctagcactttgggaggccgaggcaggcggatcatgaggtcaacagattgagaccatcctggctaacatggtgaaaccccgtctctactaaaaatacaaaaattagctgggcatggtggcgcccacctgtagtcccagctactcaggaggctgaggcaggagaatcgcttgaacccgggaggtggaggttgcagtgagctgagatcactccactgcactccagcctggtgacagagcaagactccatctaaaaataaaataaaataaaaaacaagcaaaataaataaaatgaatcctgggtctgtggtatcttgttaagagccagttttgaaggcagacacccctaggcccaaattctagctctgctgaccctttactgtgtaaccttgtacaaatttacctttctgaatctcatattctggagaatgggctacctcacatgatggtgactaacaattaaatgagacatatataaactggcacataggaggtatttaataaatattattcctttccctctccaaagaagttataaataacttattcaaatttgcatagctcataagtggcagagcctcattttgtttctttaggtccagtattttttccactgggccctggctgagttttttggcccctcatatgtgctggatttgcccccccttaactcctgctgtggcctctaagctgggctgcttctagaagggagacgtgctgatgggctacaggtgtcttaactattctaactctgggactatccctctccctccctatctgctggcctccctgctctcctagtcatgattactcctccaaaggacactcagcttctccaccatctcatgctgcttgtccctttggatcctacaggtttgtcgcccattggaatattgccaagtctatggctgggtactaccaggagtctggccgggctggcagggatgggaagccttcctggtgccgtctctattactccaggaatgaccgggaccaagtcagcttcctgatcaggaaggaagtagcaaaactccaggtaaggcttgggcagtagaaggtctttcagtctgacccaccactctccagttttgtgaagctgatttctgaactctgatgatgcttgtgtaagctagaggaggctgctcccaacctgtaagtatagcaaagggaaatggcgtattggttaggtaggcagcttacaacaagctaggttagactttttctttctaaatatttaaatatttaaattatcttaatactagctttttttcttttttcttttttttgagacagagtctcactccgtcgctcaggctggagtgcaatggcatgaactcggctcactgcaacctccgcctcccgggttcaagcgattcttctgcctcagcctcctgagtaactgggattacaggtgcatgccaccatgcccagctaattcttgtatttttagtagaaacagggtttcaccatgttggccaggatggtctcgatctcatgacctcgtgatccgcctgcctcggcctcccaaagtgttggggttacaagcatgagccactgtgcccacctttttttttttttttttttttaagagacaaggtctctcactgtcacccaggctaaagtgcagtagcatagtcatggttcacagcagcctctaactcctggccataaataatcttcccaccttgagtagctgggaccacaggtgtgtgccaccacgcccagctaatttttttttcagtttttggcagagatggggtttcactatggtgcccagactggtctcatgactcctgggctcaagtaatcctcctgcctcaaactcccaaactactgagattacaggtgtgagctactgctcccggccttaatattgtcttttgtgtacatgttattttatgtggtcaagatcagtactgccttgtttcttttgttaaagagatggggtctctctgtgttgctcaggctcaagtgcagtggtgattcacaggcgtaatcatagcacagtataccctcgaactcctgggctcgagtgatcctcctgcctctgcctctcaagtcgctgggaccagaggcatgtgccactgcacctggcttaatcttcccttgttttttgtttgtttgttttgtagagacgagctcttgttatgttacccaggctggtctcaaactcctgagctcaagtgagcctcccaccttaggctcccagagtgctgggattacaggcgtgagccaccgtgtccagcctataagtacttatttctaatctctgccaaaatgacaataaaggggccgggcgcgatggcttacgcctgtaatcccagcactttgggaggccgaggcgggtggatcacgaggtcaggagatcaagacgatcctgactaacacggtgaaaccccgtctctactaaaaatacaaaaaattagccgggcgtggtggcgggcgcctgtagtcccagctacttgggaggttggggcaggagaagggcgtgaacccaggaggcagagcttgcagtgagccgagatcacgcctctgcactccagcctgggggacagagtgagactctgtctcaaaaaaaaaaaaaaaaaagacaatagaaggataaatatacataaattcgcaaggataatgaaagtaggagagaagacaacagcaggtagaaatgacaacacattgtgcctagaaacacaaaaaccctactagaaatctactcaatcataagaaaatctggcaaactggttgaatataagagaaatagtttaaagatcagtagcttttctctagtcagatgagagccaaggaaaaaaaaaatcagtagcttttctccacattaccataaatacctagaaatagaaacaaaaaaaaaacttaatttacaacaataaaacttataaaatacttaggaataagtgttacaagctgttaacacgagtttttttcaaaaagctccccagtaggctgggtgcggtggctcacgcctgtaatcccagcactttgggaggctgaggcgggcagatcacctgaggtcgggagtttgagaccagcctgaccaacatggagaaaccccgtctctactaaaaaaatgcaaaattagccaggtgtggtggcgcatgcctgtaatcccagctacttggaagaggctgaagcaggagaatgacttgaacccacgaggtggaggttgtggtgagccgagatcgcgccattgcattccagcctgggcaacaagagtgaaagtcggtctcaaaataaaccaaaaaaagctccccagttgctttgaatatatggccagggttgacaaccactgatttagatgaagaaaactaaaatctcaccaagagaaaacaagctctggggccaggagcagtggctcttgcctgtaatcccagcactttgggaggccaaggcaggcagatcacctgaggttaggagttcaggaccatccggcccaacatagtgaagcccgtctctaacaaaaaaaatacaaaaattagccaagcatggtggcacacacctgtagtcccagctactgggaaggctgaggtgggagaatcacttgaacctaggaggttgaggttgcggtaagctgagatcataccatggagtggaggacgcactccagcctgggcgacaaagtgagaccctgtctcaaaataaaaataaaaattaaaaaggccaggtgcggtggctcacgcctgtaatcccagcactttgggaggacgaggtgggcagatcacgaggtcaggagatcaagaccatcctggctaacatggtgaaaccccatctctattaaaaatacaaaaatattagctgggcgtcgtggcgggcgcctgtagtcccagctactcgggaggctgaggcaggagaatggcatgaacccggaaggcggagcttgcagtgagcccagattgcaccactgcactccagcctgggtgatagagcgagactctgtctcaaaaaaaaaaaggccaggcgcaggggctcatgcttgtaatcccagcactttgggaggccaaggcgagcggatcacttgaggccagtagttcgagaccagccggccaacatggtgaaaccccgtctctactaaaaatacaaaaattagccgcgcgtggtggcgggctcctgtaatcccagttactcgggaggctgaagtaggaaaatcgcttgaacaaaggatatgaaaagcaaataatatgaaaagaaagttcccagaaaaatttatcaaatgacatgtttaaaaatgttaggctgggtgaggtggctcatgcttgtaatcccaacacttcgggagaatgacatgggaggatctcttgaggccaggagtttgagtagtttgggcaatgtaacaagactttatctctacaaaatatttaaaaattagctgggtgtagtggtatgcacctgtagttccagctacgcaagaggctgaggtgggaggatcacttgagtccaggaggtcaaggctgcagtgagctgagatcataccattgcactccaacctgggtaacagagtgagaccctgtttcaaaaactaataataataaaaaaaattagctgagcatggtgatgtgcgcctgtagttctagctactcaggatgctgagctgggaggattgcttgagcctaggaattcaaggctgcagtgagttatgatcatgccactgcactccagactgggtgacagagcaagactctgtctccaaaaaaataaataaataaacaaataaaaatgcaatgctgtatgtggaaacttgaaggaaaaaaaagacatcttcagataacaaaggtttcaaaaactttcccctggtatgtcatgtctcagaagctattaaaggatgttctccattgtagagaggcagtaaacctagaaagcaaagatggaaacttacccaggagtaagtcttggcacaggacaatattggagagtagtccggaaagacagctgtgtcccaggcctagggaaaactggtccagattgcactagggggcagaagactccaggaaggaaggttctaaacatcaaagtggaagctggcatctctggctcctatcgaaatgaattgttcattatgttaggacagttaggggtgaattaataacatactgaaatctaagtaaatggagaaaaacaaagctatttcaggggaaacacagttacacaagaaaggaaatgtgatcacaggaaatataaaaatgcaatcacttcggtttagctgtgaactctgttgacatagtcataataaggaaaatatggatttaataagaaattgtgttgtaaacatattgggaagttgggggtacagaatctgtgtgtatttgtgtgtattggtggggatgagttacctgcccaaagcagaaactcaatagatgatgtctcagatatcagtgtctggtttttgtttttttggggttttttttttgttttgttttgttttgttttgtttttcagacagtctttgtcgtgcaggctggagtgcagtggtgcaatctcagctcactgcattctccatctcccaggttcaagcaattttcatgcctcagccccccaagtaactgggattacaggcgcccaccaccacgcctggctaatttttgtatttttagtagagacaggtttcaccacattggccaggctggtctcgaactcctgacctcaagtgatccacctacctcagcctcccaaagttctgggattacaggcataagccaccatgcccgggctctttttttccttttctgtattaaataattcacagtattttaaaaggatatgttggcaaatagacatgtacacaaaaaaggccgctgatgaataatcacatcactcacaaatgctcagtattctgctagttgattcagccacaagtccatagacaggcttataacagagtgaagccaggaacggtctctgagcagagctgcaccagagcttcggtcactaagaggggaattacctccaggaatgggcaaggaaggaagttggctgccatctttagagttccactgccctgaccaggtgtccacatttgaaatgtatagtgcccattccttacctaatagtggttcctggcccaaggtgagcctgtactttgaattggataagggtgcagaggtcttcctggtgggaaggcctggagctgttgttgctcagctgtggggaccacctgctattgccctactcccctctagtgggagccaaagggaaggctggctgatgagtgtctgcggattgaggatgtggcagggactggtgcccccacctccctccgccccaccaccaaagatggggctctgcctgctgtgtgcctgtcaccagcaaccggcagtcatgccttgggtttcccaggtggagaggtggcaggcaacattttaaaaagaaaacaggaaactatattgtgtgggggaggcaggagtggagatgagaaaacagtttggattttgtgagaggggctttgggggagtttggtagttgttggtaacttaagtgctttttcttccttttaagttagttgcaggctttggtttggaaagccccagggaagtggggtgggggacagaaacctgaggctcttgcccctttatctgccttcacagtaccatctccttcccccagctttaccctgcgctcaggagccaggcctcagcgcttcctgctatccacttcccataagccactcctctgatattagtccatagccaaaggagctgtgggtccaggcctggtgaccagcccagctcagcccgctcattcagggtgctccctacctgcaggcaggaggcaacaccctgtctgctaccattagcaccttccagagcccacctcccctgcccagccgtaccctgctctgccccatctgggatgctgtgctcaggcatgagctggcagggccgcacacagcctccctggtaagtagagactcaggaaacctttggggtcctcctgttttctggttgtgtgatccaagtggtgcacactggccccttgggtgccaactgaagggcttgggaatcttgctctcctggtgtagctggcagctgcccacccccaccccacatgggtttctgagtcggcaggtcaagcattattttattttattttattattttatttgagatggagtcttgctctgttgcccaggctggagtgcagtgccacgatctcagctcactgcagcctctgcctcccgggttcaagtgattctcctgcctcagcctcctgagtacctgggatcacagacatgcaccaccatgcctggctaatttttgtatttttagtagagatggagtttcaacatgttggcaaggccggtctcgaactcttgaccccaggtgatccgcccacctcagtctcccaaagtgctgggattacaggttttaaattgtattttaaattcatgttttaagcttatcaagaagagtcacttaaccttttaatatatctccctccaatatacacagaagtatatgtgttcatatttgttaagttcacaacatttgtgcgtgtatttactattattaaaataggtgatattatatagcgcttcctaaatgccagtctgtgggccctttgcatgagaacctcctgagaagcttttcggaaactctcaaaagctcatcccagaaaattcagttcagtagtctgggggttatgatacatagtcaggtttggggacacttttgtaaatggctttattactgtcatttaatatttttctcccttgttacttttttttgtttttgagacggagtgcagtggcatgatctcagcttgctgaaacctccacctcctgggttcaagtgattcttctgcctcagtctcccaagtagctgggactacaggcatgcgctgccacacctggctaatttttttgtatttttagtagagacagggtttcaccatgtaggtcaggctggtctcgaactcctgacctcaaatgatcctcctggctcagcctcccaaagtgctgggattacagccgtgagccaccgcactcggcctcctcattactttttgtggctctaaggtagtccaattctataagacttgctaagtggtcattttttgtccccaggaaaagagaggaaacaaagcatctgataaagccactatcatggcctttgatgccctggtgaccttctgtgaagaactggggtaagtgacttattttatatgtggagcaaagtgtcagtgagatcatttacttccccggcacgccctagttaagcagctgacataagacagcccgtaggctaccaagggacacctgcctgcaaaggctgttgtgtcgggcagtgtggaagtcaggaccttgctcttctctattggaggccccgggatctctcgcagtgtggggatttgctcagtattctgagtggtgtccttccctccactccaccctcttctgggatggctggccccacaagccactcagttccaagggatgtgaccagctctgagccatcggctttgtggtcatcatgtgccaccgagctgggacttctggcatcacttgagtagtcctcacccttatccaggacccacacagaagcctgtggccccacttacctcggggagtcatgtgctttgaactcacgcatctgttttacctgcatctgcaggcgatggggcaggggccacggaaagagtctgagggctgcttggtgtagtcaggttgtgtccaggcatgcggagctgtgagtgcctgcaggagagacacccaggaggagtttttacattttggtctaaaaagctcttggattcatctcatctcatggaatgatcctgtcggatgacgctgacgtgattgcttcagacttagaggtgaataaattgaggtccagagaggtcacagtcacgaagctcatggtagactgaggccactaaacacccgtctcctgattttcagtggcgtcctcatttgcatacacctgggccatcttggtttttgcaagaaaaaagcgaggaaatcagagaaactctttgggctgtgtgtttttatttccacctcctcctgttgaccagtgagtcggtggcttctggactgaagctattttcttctccaaactgctgtctctaatttggcctctgtggcaagaccacgcccagcaaaagtggtcggctgcagtgccaggaccacccttgcctgcagcctttgcgaccagagcccttttcaagcacaattaatatgggagttgctaaatttggccttcttaggcttcttgagcagagctcttatttctggtgaggaatgaaagggccaagtgttcctgttcattgtgagtcctgtttgctgaaaaaagctctggggctgtctgaggctctggaatgctctctggagggttaactctgcctgtccccagggtctgctccgcctgccaggcaagggaacaggtcctcccaagggcctctgccttcatttctcctgtcaccttccggggagctgggacttcttagtgcatcagtggcctggttgccaggggctggggtccaggcatctgtggactcaaggagtccaggtgacggtgttgcgctgcctcttgagcagcctcgtgcctgtctcctttgctacatgtgatgattctgaaatccaggcagcaggctggaataaacgctgctggtatgtctgtattggctactgttctttgaataagtgaatgtttctttattgcataactggcgtgtagcacaaagaaaaagccccttctccaccagatatttgcttcctaagaatagttctcattggaggctgaggtcgaagcagcctcccaccagcgatcccttggggcgggcacctggcagtgagggacagagctagtggggtgggctcagcagaagtgggtgcatttctgcaaaggaagctgtaggtttcttgtcagtttgttgtggggtctgaggcacatgggagtgggaccagcagaaaagatactcaggtcagttaactaatgaggcggggctgtggcagccagcggttttcctctcttctctatctgtagctactttctctgggctgcagccttgaaaaagcagtgtttgattattcataacaatgagtgtcttttagtgtcacagggaacagttattaggtttgaagcaacctccagcttgaggcctcggcatcttgagatggaagagcagccttgtgtttagacctggattgaattgggccctgttgtttcctgggatcttggggctgggggtgcccaacagcctggcatcttcttgtttctctgtgtgtttactcattcattcatttattcagctgataaatattgactgatgccagctctgtgccaggcacattggacatgggggatacactagtgggcagaaatagccccgtcccagagccggccatggtggctcatacctgttataccagcactttgggaggctgaagtgggaggatcgcttgagcctgggagttcaagaccagcctgggcaacatggcaagaccctgtctctactaaaaatacaaaaaaaaaaaaccaaaaaacacaattagccaggcatggtggcacatgcctgtagtcccagctgctcaggaggctgagatgggaggatcatgtaaactcagaagtcgaatctgcagtgagccgagatggtgccactacagtgcagcctgggtgatgggagtgagaccccatctcaaaaaaaaaaaaaaaaaaaggccgggcgccgtggctcatgcgtgtaatcctagcactttggaggctgaggcgggtggatcacaaggtgaggagatcgagaccatcctggctaacacggtgaaaccccatctctactaaaaatacaaaaaaattagccggtcacggtggtgggagcctgtagtcccagctactcgggaggctgaggcaggagaatggcgtgacccgggaggtggagtttgcagtgagcccagatagcgccaccgcactctagcctgggtgacagagcaagactctgtctcaaaaacaaagaaacaacaacaacaaagacatataagtcctgtaaatggtgtttcgagagtataaaacaagtggccttaccctaatccttgagggttagggaagatttacctgagggagtcaggttcaaacggagatacaaaggatgaggaaggactaactaggccatagagtaaagtgtggtgtgagggagagcatcccggtcaatgagaatagcatgtgcaaaggccctgtggtgggagagaacacagcatattcaagaactgaaagacacgctgagaacccaggggcagggcaggatggggtgggcaagatggctggagacaggcaggctagagcgtgcaggccccggtgcggctttgttcgggaagcttgctctggtggctctatctggattaaaaatgagctctcacaagttagcagatttgaaaaggaatttttatttcatttggttgtgtctttctctgtcaaggatttgtgaaattgctggctgggcctgtgagcctgttagagaaccttgttagccatagctccttccacctgaggcagtggagccatcctctccatgtgcttttagggttctggtcggggaaccctaaaaacaatagggtcaaggagccagaattggtctcagaccagcctccccatcttactagtctgaccaaccctaagccagatacagtattttactagactttttcctgatgggaaaggaagacaccagggcttggcccctgagccagagggaaccgcgaaggggcccaccactggaatgggggcaggtcagctcgcctcccctgctgccatctcagtccccagcaagtcaggtcactcctcttcacccgcttcacactgagtgttttctgtggaagtgagtaaaccaaacacgatggcaaataagatgagaagcaggacagcggtgatgaataagataatcactgccaggcccccctggtcccaggggttctgccagaacgcatcattccagattgtctctttgaataccagttggtccatgagaatctggaaaagagggacagaggacctgagtgcaggcagccctcccaggccctgtcccaggtgctatgctctgcccgccgactccagcctctgtagcagcctctgtgagcagccggcccgcctggcagccaggggacatgaaagggctagagtctttgtgctggatgcctgcagccagcagcaaatggcatttcccccgctctagatacaggagccaggactggcgcaagaagtggggccctggattcttcctaggggatgcccctggattctccagtccttctttcctgagtagcaagtgtgagcaaggactctctctcatccctgagacctacttggctagaatctaaaaagcatcatgatagagtctccctgtttttcctgccccaactgccaaacatttgggaggcatttgagagagcgtataggagccgaggaggggccaactccagctgaggcctcggtagcctccttggagcagctgagaatagaacttaggagtcctctagaagcggagctccttatcgcagactgcaagcccatagccaggtgagggcagcccaggtggagaaggagggagccattacctgattctgctggtagctgttctgggtcctacaagggcaattcagggtggtccttcaggctcacactttgtggagggctgagctgaagaggccgccaggtgaccagagctgcaccctgactcaaagaagcaactgttgagaggaaaaggcatgagcgtggccaagcggccctgaccagaccttagttgctgtcaccaaacaaacaaaggtgggctagggctggttgcctggcaaccacggctccctttctgcctttcacgttcccccttcagctcctttctgcccttgtgtgatgtcattttgggggtgctcagggcacgtgttcatgagtccctcctgagagaagtcagacttggggtggacggggaagagactggaccgagggcctttgccccaggccatcaggccgcctcacctgtggctgggctgggctgtcctctgtctgggtgacgtgtggactgcggacctgccccgagctcaggaagccctggggctgggactggcgtagggctcacttcctgtgttgtggggtgaatgattaactgcagccctggctggcgcctggtgcctcctggaactgtttctgggggaagtgttgctccccccctgaggcttcccattggtgcctttgtctgctccctgggcacggcctcagcaacattgtgtggttggtttctgcccactggcacaatagggaagctgggaagaggggatcaagcctgtgccctggtgcttgaaacctagtggccaccatatactcctttaaaagctaggatgtgagggcccgctatggccaggaaccatgccaggcactgtgtgtccagttgtgagatcagagaggcgggccctgccctccaagggcttcccttctagccctcgggtgcttatcccagctggtaaagatctaggagctttgagaaatgcccaggccccacctggtaccacttatatcagtctctggggttgccaggatgtcgtattgtttacacatccccaggtgattctccccaggtgtggccagggttggatgacagatggaggcagatttagaacagtcgttcttaactatcatgggcgtcactgacccgggttacctgatgttttctgtttccttgtgtgaaacttactgactaaggcccttggcatgctgaacgctcacagcagtgggccagtctctagctcaccctttgcgtgcagctccgtcagttaagtcagatgcttatcaagagtcaagtgttggttcccaaacctgttcatggcagttgtacttgtaattacataattgaatttaacatcccgggaaccaatgaagcaacaataatagctgaaaccccaattttacatgtggggaacgggcacagagaggttaaataacttagccgaggtcatcagctagtaagtaactgagttggagtttgaatccagcagcacacagtctgagcgctgaagcacctgtgctgcacctcagagcgagtggagaaagaaattctttctagaaatacctattgactactttgggatgactttggaatcactcagataatgttcctgttgaaaaagatgcagacatgataactaaacatcagggacattttgtaaaaacccagaaggttttcacacccagcttcctttgcctttaagttccaatgactttaagtttttgttctgctttaaagaaaccaaaactagaaaataacaatccaggagctgtggttggcaagcccacactcaaccaaaactagaagatagcaatccaggagctctggttggcaagcccacactcagagaaaaggccaggaaggccggccaaggaaaaggtgtatgtttccatttaatgtgagatatgtaaaaaagtaatagatgtgtagagaacttaggtgttctttaacaaaagttgctttgaccagctctttcaattaactgccggccccaattggataatttttttttttttttttgaggcagagtctcactctgtagcccaggctggagtgcagtggtgtgatcttggctcactgcaacctctgtctcccgggttcaggcgattctcctgcctcagcctcctgagtagctgggatcacaggcgtgtgccaccatgcccggttgggaggaaacttttatatactctctgccaagtttttctaatgagattcttgtatccgtggctttattgtcattttttatttttattttattttttttgagacagggtcttgctctgtcactcaggctggagtgcagtgccactgtcatgccccaggcagtcctcctgcctcaacctccacaggagtagctgggaccacaggtgtatgctaccacacctggctaatttttttttatatttgtagggacagggtctccccatgttgcccaggctggtctcaaactcccgagctcaaggatccttggccttccaaagtgctgggattacatgcatgtgatatactatgctggtctgttgttgttttttgtttgtttgcttgagacggaatctcactctgtcgctcaggctggagtgcggtggcgtgatctcagctcactgcaacctctgcctcctgggttcaagcaattctcctgcttcagcctcccgagtagctgggactacaggcgtgcgccaccacacccggctaatttttttgtatttttagtagagacaggtttcaccatgttggtcaggctggtcttgaactcctgacttcaaatgatctgcctgcctcagcctcccaaagtgctgggattacaggcaggagtcaccacgcccatccctattgtagcttttaatcaggcatgatgtacagacagtgtggcacgcaggtcttcagagtagagtgcagcccttttgaggagccgagagcagcctgccctgtggcggaagcagagggcacagcttggggtgggcatgaagaggctggcgacatgattgtggggaccacttaggatgctgctgcagtgaccacaggtaagcattgatggtggcatggtccaggatggcacagtggcgggaacagagaggtggtgaccaagtcagacgtcctctaaacctgaaaccagcctgatggctgccccttccatggcccccacctgtcttcaggccgcccaggtctgcagcatctttctgtttattctttcccacagtggggcaactgctgccacctttccatgcccatcttccccagggaagaccggcacaagaagctgcctcttaaaggagcgggccaggctgctgtcggagagcaggtctggtttgttaatctcagtgggtttgaagcctgtgaaggagttggcccgacagccgggcctggtgtgtgccagttggccaaggagcagggaggagtgagtcctgtgagggcagggaccgaatcctgtgcggactcagcagttgttcaccgcctgccctagagcggccattcggcctgtctgtgcccagggctgtctgtggttcccacctctccgcagctgggctggggaagcagaatattttctaacaaagggcctcagcctcagccgccctggagcagggctattcttatgctgatgaaaactggcttatggaaaagtcacccaggaattgggctgcttccctgttggccatctcccaaacagaaggcttccagggaccctccagccattggtgctgggaatgaaaaatgcagggtttcctgtccgtccactaccctgtgtttttcttccgggaggggtgcctcattgggcaccaccccagctcttacctgttgggtcccacccagtcctgcgaaggttattttgagacagagtttggggtgtgggtgttttgggtgtagggttggtcgatggaggataatggattagagccttatctgtactgcaaccaggaggccaagttctgggtctcagagccctgggtgtggtaagcagaggctctggagccagataggctggactcaagcaggccctgctccttttcagctggttgaatgtagacaagttacctaacatcgctgaggcccagcttcctcatctctaaaatgggggtaatagtggtatcttcaacatggaggtactgtgatgagtaattgagtttatctgcaccaaaatgctgaagacaatgctgagtatgtgtaactcctcagtaaattttagccatcttcatcatcatcttcatcctcctcctcatgatcatcgtcatcattctgaatcctattctttggagggggctgagaatggacaaatttttgaatttcttttcttttgtatgaaaacacttactctctgggtctttaacctaaacctgtcagacaagtccgtggacactagaaagtgaaaccagagggtgagagcttcccctccctgcctgctattgccagtgtggcctggactgccagctggaaatggcgggggtgtggcaggggctgggatcccctctccatgacatgtttcccaggtagacagggctctgctcccaggtggccagagcacgggtcacgcaggccaagatgatggaagcatgtgaaaaacacagacttcttgaggctctggggaagccccggggaggcacctcgggatgctctgtctggacccattggcatttctggagccatgtgcctcccctcccctcactcctgggttcgtagctctacctggaaagttctctggaagaaaaactcagctgaaaggagggggtaaggaaggaaaggtgctgcttctcagcaagaccagtctttaaaatgggtccctgttgccctggttggtcccatgtttagaggggcaaataataacgggtcatggtgatggggctctaaagatatgcccagcaccgagctgagtgctagacataggtcatcttagtttatcctcacagcaaaccccaggaagcagtaccaggatttgctccatttcaccaagggggagttcggcttagggaagttgagtcacgcagctgacagggtgagggtgtgagcccagacagcacacaaatgggggagggccacagggtcaggaggcaggttacaggtgacattagggccttcctctggcagtttgtgaagacccactggtctgagtctgctagtgtgggatgtgcaggccaaaggtgcaggcagttgacagagtaaagtgctgttcctgagcttagctcctgcctttgggcaaacacagtctctgccactctgcagagtagtgcctcagcctggcagagctcattagcagctaatgcatgacaggaatttcatggcaccgtccactggtcccgtggtgttaaccgcctgtgtggcatgcttctctgcgtggttttccagctttcgtgggcacagggagagcagaggcctgggaaggacgggcaccagccataccccctcccaatgtacagagcccagcccaacctcagggagtccggcaccgcagaaacacgtaacacaaaagcttttacttggaaactggcaaatactggactagaatactgacatgctcacgctctggcgggagctcggatgcagaagctattgcacaaagcccctctgattgccttgctcctctttggcatgtatcagcagagccccaagggccaattgcccacaggtggggactgttctccatcaaggtatggggacccctacttccttgttttgttaaaaagtgcaggtaggcgaagaagcccaggcagttgacccagtctttgaaacagctgactccccagcacccagtgtccactggcagatgagaggtttgcacctataccagcccttgtttccttggtagggctcaagttgtcagtgtccaggtacctgggctgggccagagctggggccaggggagcctggtcttgaggggtaagggctgcagggccaggctgatggcctgtgtcatggcattggccatctcctctccagcttctcctcagccatcgcccgtccgtcatggtggtgtcggctgcacctggaccttcctgcctctccgctcagggcagcagcagtgagtgcagcagcagctgcaggctatcagcagcaacagcagaacagtagctggagggccgggagagagcacgggactcaggttgggggagagaaaggatgcccaccctcctcccagagaaacccactgcctgccagggtctttcccccacaggtttggtggaggtcagaaagatccgagaggctggtgagaggtgcggacggtccccatgccagccgccagggccaacctcctccatgttgtgtcttctctttcactgcccaagcctggctcccgtcatccccgcgtttgggatcccggggtactgctgggcccagtccccagcaccgcccatcacccaagcagcatatcagaggatgagggaagtcccttggcttcccccaagggacaactggttttcctccttgatccggcagacacccgccacctctgccagccctctggctggcaccatggtgtggtctctcccagatgccagggagagccatggggtgctgagtgccccaactaacctgtgaaaaggatgatgactgagaaggccacgatctccacgggctcagcctggggcagtctctgcagcttgagcagcagcctctcgcccacggcgcgcatctcctgcacgaagtcggtggcagccatgccgcgctggcttcctgttggggctcctgccgggctctgctggggcagagagaacacctggagcctccacggctggccccacactcgtcgcagcaccgagattccaccctcgcacccatccgcagcccgcagaacaagtttgtcaggtctcacacattgcacccctggtgacttccacctagtggtggccctcagtccccacccagctgacacagctcagggtggaggaagccggtgaggacagtgagaccaagggcttgcttcgggggctgccggccaaggcggcggctggtggtggtttctggcttcgctgttccattcccttgtcttgaggtaccactactgggttttgcctgggtgcttgggactggcacagctccctcggggtggggagactgggataggatgccaagctggtactcttgccttccatcaatgtggggacagaaggagcaggttctcccgagagcaggttcatggggcttctggccagggtcagtcagaggtgaaaactgcccccctgtcccccaggccccccaacctctcccaccagcccagtttctacactcatgcctgttctgccagagggggaggccgcaccgtgtccctccaggttttgccagggtttctgtcctgtctgttgggagggggtcaggaggcccaggttgctcaagccagcccctcccctgctggcgtcatctgtttctctagcctgaccaggaaagtcctctccactcccacccctgccccaggagagcctcttcctgtctcagggtgcccaagaggcccaaggtgccactccagaaggctttccccttctgcctctcctgtgggcatgagggagctggtgcctctttagagaggagccagagacaaccttgtcccaacccagcctgatccagttcaccaaggcagttgctctaatccaggggtggtggtggggacaggtggccaggggctggtgccagacctttggctgtaattatcgttgccttgtcccaggtctcagccggttctcgctgagatggctacgtcagtgaggccagtcactcccggtgccgctgccttggcagagctggtttagaaccaccgtgaaggtcatcgaacggggccctccaccctgcaattggcctgcggccatccttgaggccatgtggtctttgcatgagcacccaggatggtgaggaacctccgcctgctgaggcagcccacccactgcagaaggtcggactccctgctggcccccagttagtcccacttgtggtcacttagaccttgccccctcttctgcctcgtagcccttcaggagcaagatggcagccggcatgtaccttctggatttccttctctgccaggggcctgctctagtgttttcagctgctcctccttgaatgccacctccacttcttccttttgtgacatgaacaggttgcttcatgtctctgatatggaatgagatgcccgtgttttgaggctattgggaggactgaccatctagcagcacattgtagacagccataggggggtgcccggcacacgagaatgcccccccgggacgggtctcactggctttgggggctgtcacccccgtgcaccgtcactagcacccccaacaccttttgggtgtctgtcctagggtgtctgcggtgtgtgccctgaaggaaggtaggcaagctggaggtggggagctatgtttttgttgttggttttggttttctttgagatggagtttctctcttgttgcccaagctagagtgcaatggcatgatctcagctcactgcaacctctgcctcccagattcaagtgattctcctgcctcagcctcccgagtagctgggatcacgagtgtgcgccaccatgcccggctaatttttgtatttttagtagaaacaggatttcaccatgttagccagactggtctcgaactcctgacatcaggtgatccgccctcggcctcccaaagtgttgggattacaggtgtgagccactgcgcccggcctggggagctgtttttttaagtgatgatgagggtagcaggcagaagatggctccgtggaaaattagatgagttcttgtcaaaagccgtgggttccctgagttagatccacccagcttctcacacctcacctggagtgagtgcgtttctgtggaggtgaggatctcagttttcaaatgtactgagaggcatagggtcctagaatgctatagatcatccgctcccgcctccttccttctatacgtggggaagctgagacccgagagagcaagcaacttctctgaggttacacagcaggacagggccccagccagcacccccactggtgccccacgctgtctctccatggaggcctgtctccagcttagaccagcaagatagccaggagcagccccgctgagggtactgcccgtgcagtgggctcagtacaggagccagggcccgagagccccctggaagccagctggctgtgctcggccagccccagcccacatttgtggatctgaagctgcttttatcagcatatcaccaccaggccggggccacaccaggctctttgagactacctggagtccttgtcaccacaggtacaggtcttgtgagtctagccagcctgagtgtaggactgaaccctctggtcagactgaatgggacattctctctggccaggtggagcaggcttgcacaaggacagtggtcccctcttggttccgggacctccgtgccatcctcacgccccagctttccaggttccctcattcttagagggacgacaatgccgacagtgtcccttacgggacagtttgcgcgtggttcaggagctgggctgcctttctcccctccctctctgtctacacttggtctggcgttttcagcctgactggcactgtgcccacacggcctaatgtagcccagcagagacactccttcaaagagggagcgggcagggagagctttttcgcttgtgccacacccagagacccagggagagattgcagggggcacttttccttgtgagcgagagacctggggctgtgctcaccagaacagggaggaggaaggttggactgaggctgaatttactggtgcaggaaaagtggggtttgttgctgagaagctctggccagcctcctccaggggctgcaaagtgggagagctgcagactcatgccgggtggaccccggcctccagcggggaaaagtgtcagttcccagcagcagcaggctgcggctgtggacagtgtcatagctttgcgcccagggcttccctagggggctgactggaagctgaatttgccagccaggcatggccagcctcacccagccccagggtctgacccaggggtactcacggtatcctgtcacacagtgagcagaagtaggaccgttggacgtggctgttctgcccccagagagctggagaggaaccccgggaccccctttgttttgcagttgatatcttgtcatttggagcgtaaacccgcgactgaaccttcatggcgcaggtgggggagctgaggggtcctgttctctaaagaggaggaggcgcattccagccggtccccaggtggtcttcccagcgggctatttaaagccaggccaaggagtgcctgacacttggtgcccaatataaccagcagccgtcaggtgactgtgtggcatgtgccccagccgctgctcctaagggaaccttagtgttcccagctgtggcgaggggaacatgggagctctgaggctggccacctctcctcccctttcccttcctaggtttggcaggaggaaggcagggaagcccaggagggctactgatgatcccatatttttcccgtctttctatctcaggttcacccaactccttccaaaaccacacttcccacctgcgaaccagggcaaccagtccctcccaaccccacgcttggtagtgcccacctgcgaaccagggcaaccagagtccctcccaaccccacgctcagtagtgccttggttggaggcttctcagggtcctcaggggttcctgagtggctgccagagcaagtggtggctccctctggccttaagagggagtgtagcccagctgccaccaggccctcctgctgcccaggctgcccagccagccctgcttggagccttcagagggtgtgccctggctgcagtagcggtcagcacaggggaaacactcagggcagagaaggctggcagagccggagggatgggaagcattcctttatgtggcatctcctggcacacggagccttgcaacaggcaggcatcccgcaggccagacagctgccacttggtcccgaagcttccctgtttcctcctcgcagagctgatactccaaccccaggcgcctcacgaggaagggctggcagcaggcggcgtgtttgagactgataagcgaggtgtgttggcagcgcggggccccagagggctgcttgctctgccctgttgtttcgtcatggtgggttttagtcacccttgccctgttgggcattatctcgtttgaggtccacctagaaggaggcataactgacacttgtgggagatttgcagggtcctgtgcctgagcagccgggggggatgcccctatttgtggcactgagcctttgggtgactcccctttttgccctggctccaactggaagtagaaagtggtgcttgaacccctggcaggccctgctcctgtagccacccagggcgggaggaagcgctttctgctgctggtgttagaaacagtaggcgctctttctgcagctacagaagctggctgttcattcaccctccgtcctggttcagggactgtgttggagagaccctgtccactcgtgtcctgtggatgcaggacagggatccccacctgcctgcctggggcgtcttgtgagtgacagccactggggtctccaggctcaccgctgtgccccgaccccgacctggcctgactcttccctactgtgcgcctcccaacaccgcaggagcttgtctccccagacaccagccccagccgaagcccccagcctctgctgagctgagaacacttgggctagtccttggtttccacatttccctgggtcattgtttttgtttctcactagatgccagcttgtttgctttgaggaaaacatatggggggtggtggctttaacgctggcttgaggacagggcggcaggaggagtaggcagcctcggctcacgggccctgcccaggagggctgctctcagtgttccccaaagaaccaaacagccgggtcctgcttccttaggggtggtgtcatgtcagcctgtgcatcacggtggcacagcagaggtcccggttgccagcgtggtccctcccagcctcacttctgtgaccttctgcccacctgagcctgagttgaaagtcagtcctccaggttcctggtttggtgttcaaggctcatcaccagagggagatctaggagtttatggggttctagatgggcccagggaggaggacccaggctgagccgtgagctgagaacaccagcagtgagtgggccaagcccctgaaaggacacagatgggcagagtcctgctgcatcctgggggcgccgcatgctggctgggcagaccctgcgctgacctcgacagggctctgccctaatcctgggaaaaagggaggctcagcaggccggcagccattctctcccaagctggacagccaaatccctcttttaagccccctgaataaaagagctgaaatgaacttgcagaataagcaggccctcggggcccctctgctgcacagcaggcggagcaggaggcgctctgagcagagcccccagccctcccctagtgcagggtcccagcagcagggagagtgcaggtgtgtgcaggaggctggctgacttccctgcagggaagcgacccagcatgtccccgaagacctctccgtgtttatggtagactgtggcccttcaccctgggggcaggggacccttgctgctccctccctgtccccccttcttctgtggccattgccactcacctgggagctcaggtgttgggggctgagcagcagtgccccagcgcggagcctccacgtgctgtcctcgtacttccttcgtgggcgccgctgctcccctgggcgcctcagcccagctcctctgctgacagccagctgctgtctctgcctggcttttttgttgttggtcgtcctggagatccaagtgtcaaattaccgtcgcgagggggagcccgaggaagccctgcttgggaacttgtcctccaacttcatgtcccggtgcctcacctctgccctgagagcgctgctcagggacaagacaagctccctctctcctcctccttcctcctcctctccctctccccgactcccacgccgtgggctgggcctgggttgggagctgaagaaagaagtcggctctctgccttcctggccaggaggaccctggggaggctccacctgagcctgtggaggggagtcctgcagcgctctcaggtctggggcacccaccctgccctcaggaaggccaccccttctgtccctctggccactccctggctggtccctccctctggcctctctcaggaacaacagtaaacagtggggagctggtggccctctcaagctgagcaggaggctttgcaaccagtccctggggaggcccttgtgccgctcagcatctgaaggcgtcttgggggagaacttggaatcctgagtgacctgggagtggcctgcgcgcccggcaaggcgcctcatgttccttgtgaggtgagggccttctgctggggctgtgaccgcactcctggcccagctgtcagggcagggctccagagtccaggggccgggccctgtgacatttgcctggttgtgcctcccagcaggctaggctgtgtggagagaaaccgaccccagccccgctgtcaatggagctctttgagtccgagcacaaaaccccagtgagtcagggcctgaggagggcagggggaggaagccagccatgtggtcacaccactcggatgccagagcctcccagaggctggacaggcggccgctgtgcgggcgcacggactcctggggatgaaccatttgttgcatttactcattggagcagagtgggggcaggagcgccctctggtggccgcctcggctgtcccagcccaggtcaggcttcagagctgcattcactcagctaaaagaaagtcagccaggccctgcttccttaccggggtgttgcaatcagccttgcatccttgagcctgcgccttggggtcgcagcccctcaaagggcttcttgcagccgcagcagtgctcacactgggaggagttctagttagagcagttaatgccagctattcttgtccctgggatgtggcaccccagacagccctgcctgtgttccagcatctcctcttgggcttccctaccctgtgccacgttcctggtggcaggaatggctgtttataaggagcctgagagagctatggcccctcttgcggcctctgcagctgccccaagggtcgacagccacccccatgcagagggaacagagatgcgacagagcctcgtgggccagccagaggctgctccctgctcccagcatgggcagaggccgctcaccccaggagggctgcagcagggttgagacagaggaagacgagaggaggactccaggcgaggctgcgtctccctggctaaaggccccacctgtgacaccctcacgggttgatgatgggacatattactacacagccgtgcctgccttagcaatgcaaatacgttttgagaaatttaacttgtcattgtgcggtcacagagtatacttagggaaatcaaacagcaattccagggaagagaaggaaaaaaatatcaagcggcacagcctcctacacacccaggccatgcgctacagcttgttgctcctagaccacaaacctgtacatcacgttactgtcctgagtaccgtatgcagttgtaacacagtggtattcacatatctaagcacacataagcatagaaaaagtacagtagaaatacagtgttagaatcgtaggggaccaccattggctgtgcagtcattccatggggcatgactgtactgtaatgcacttcagacatcacctcagccatcttcgctcagtccgtgagggctgtgcctttctgcaccatcttactgacgggaatgcatgggctttaggaggtgaagtgtgtcacccaaaagacacccttcatggcagagccagcatctacatcccattgccagaggacagaggggaggagcagaggagtaactggacagagtggggttcacatcctgcttcccgggagacccccatgtgttacgtgaccttgggaaagttggttcaccttatcgtcctcatctgtgtagtggggagagccaaacgatgcctggtgcagcttggatgagatgaggggtgtggggctcccggcatggtgccggacgcggcagtgctcgctcagctagcgattcaggctcgggtgaacagacgctggccgactgggctctccgcccctcacctctgcggtgctgcctgctccaggtgccgccatgccgccattgccaagtacttcggggatgcgctgcctgcctgcgccaaaggctgcgaccactgccagaaccccacggccgtgcggaggcggctggaggccttggagcgcagcagcagctggagcaagacctgcatcgggccctcccaggggaacggctttgaccccgagctgtatgagggaggccgcaagggctacggggacttcagcaggtaaggggccgagaagccagggctccaacccgctggaattgcctggcattcccttggcgccagggccagaccagaggtggcacgatgccgcaatccccccttgagctggtaggacatcagggacattgccgttctagcagcagcacacatggggagggcagagcccaggccagggccactcacgcctggcctgtccctaggtatgacgaaggttctggaggcagcggggatgaaggcagagatgaggcccacaagcgggagtggaacctcttctatcagaagcagatgcagctgcgcaaggtgaggggaggcactcagtggcctgtgtggggcccctggtggccccctgctcgcacctctcagccccttctctggtgctggatgggactgtcctgcggcagggcaggacgcctcatgggtccttcatgttgtcctccagggcaaagaccccaagatagaagaatttgtacccccaggtcagtacagaaatgttcctggaggcttgtgggctcttcccggggcatggagggaggattctcatccgggctgtgggggacctcagagcgcagaaggtggagcgaaaggaccaaggaccaccccccccccccacagatgagaactgtcccctgaaagaggcttctagcaggaggatccccaggctgactgtgaaggtaagagacgggcagctcctcagccacccgccggggccctcccccagccgcgaggccatgcgaccagtctcactgtcctgtgccaggcacgggagcactgcctgcggcttctggaggaggcgctgagcagcaaccgccagtcaacacgtaccgctgatgagtgagttccacgatcactgggctgaggagcactccaagctctcgttcccttggagactgcaggaccctgtcaaccctggcctgtttgggccacctctccccagattgtacctctcctactccaggggactgcccctacaaccccaccagggccaggcatggctacaacttaggtgctaccagcagctgctgagggacagtaagccacagggtgctcagagagccctaatcagaatccctgtgcccaaggcctaccccaccaggcctggagtcccgcaagagctcagcagggagaagcccaggcccacctgataccttgtgcctgttaccttgcacccacagagctgacctccgggccaaggccgtggagctggaacatgagacattccggaacgccaaggtggccaacctctacaaggccagcgtgctgaagaaggtgggcctggtgcaggcggacccagggtcgttgcaggggcccctccatactctgacgcagaagctgtctgccagctctctgggctcaggcagcccagaactcaccctccccagcccaccccagagacagtttatgggggtagagctccattctccactggctggacatgtttctagccaaccctgtgaggatgggaggcctaaaacttgcccagtggtcagttgcctgtggccactggccacagaaacccacttgtagtgcctagtagaaaaggagggctaggtggggcatgtcaggaggagctggcgggtgccacagcctccctgcctatccctgcccaggtggccgatatccacagagcctccaaggatgggcagccctatgacatgggaggcagtgccaagagctgcagtgcccaagctgagcccccggagcccaatgagtatgacattccaccagcctcccatgtgtactcggtgagctgtggcccagtggcctccagacctgtgaccaggaaaggcttcacttcccctctgccctcaggggtgcacctcttgccaaggcctggctccccaccagggtcctgcctgcctcttccctcccacactcctgagagccccgtcccaatgtgagttactgctccagccagcggtgccctcaagggggcctagtgggctgaacctcctctcctcctgctcacatttacagctcaaacccaagcgggtgggagctggtttccccaaaggctcctgcccgttccagacggccacggaactgatggagacaactcggatcagggagcaagccccccagcccgagcggggaggcgagcacgagcccccgagccggccctgtggcctcctggatgaggatgggagtgagcccctccctgggcccagaggggaggtccctggaggcagcgctcactatggggggccctcccctgagaagaaggcaaaaagttcctctgggggcagctcccttgccaagggccgggctagcaagaaacagcagctcctagccacagcggcccacaaggattctcagagcatcgcccgcttcttctgccgaagggtggaaagcccagctctgctggcatcagccccagaggcagaaggtgcctgcccctcctgtgagggggttcagggacccccgatggccccagagaagtacacaggggaggaagatggagccgggggacattcgcctgcccctccccagactgaggagtgcctcagggagaggccaaggtaagggtacaggtagtcatagaatcttctggaacctacacggcagcatcccctttgctcactgggcgtctgaagctcagagctcacccctgagatgggctctcctaggcctcctgggatgagggagccaccaggacccagtgctgtgatgcctgctcttccctctaccagcacctgcccgcccagagaccagggcacccctgaagtccagcccacccctgcaaaggacacatggaagggcaagcggcctcgatcccagcaggtgccggcagggatgagtctgttggggaggagagaagggctgtgggcgaggccaggagctgttgtgccctgctcaaggggtcagggaaaatcagctttctttccacacctggcagcagatgggctgggctggagagaggcagctggtgcggggacccagtcttctggaggaggggagcaggccagtggaagggagctcaggagtgaccctctgctgtggcccttctcaggagaacccagagagccagcctcagaagaggccacgcccctcagccaagccctccgtcgtagctgaggtcaagggcagcgtctcggccagcgaacagggcaccttgaatcccacggctcaagaccccttccagctctccgctcctggcgtctccttgaaggaggctgcaaatgttgtggtcaagtgcctcacccctttctacaaggagggcaagtttgcttccaaggtagggggagtgagtgggctctgccttctcccatgcctggggtatgtgggtgtagtgggggtgggaggcagggagtttgagccccagaacacagtgggcctagggccagccccacgcccgtcctccctggggcctgccttgccgttgggtcatggccgtgggttgctctgggggtcagggcagggtcctgctctcttttttttttttttttatctctgtcgcccaggctggagtgcagtggtgcgatttcagctcactgcaacctccgcctcccgggttcacgccattctcctgcctcagcctcccgagtagctgggactacaggcacccgccaccacgcctggctaatttttggtatttttagtagagtcagggtttcaccgtgttagccaggatggtctcgatctcctgacctcatgatccgcccgcctcggcctcccaaagtgctgggattacaggcgtgagccactgcgcccggccaccaagggtcctgctctctgcttctcttctccctctcccttccaggagttgtttaaaggctttgcccgccacctctcacacttgctgactcagaagacctctcctggaaggagcggtgagcgctggcattgccagggccaggaggcacttgggagggtggtctacagggaggaggctaacgctcacctcctcatgcccccaccctgaatctgtagtgaaagaagaggcccagaacctcatcaggcacttcttccatggccgggcccggtgcgagagcgaagctgactggcatggcctgtgtggcccccagagatgaccaactgctggctgggcagggcccgcgtcctcccccagattctagcatgggtcatcctgggcctcacctgctgatgccagggccatcgtcttttctcagtccttctcctttccaaccatacttggctttggggatgaccccagacaccccctgaatccaggtcagaggtcagcccacctttctttctgcttgcaaagcctatagacccttctcagagcggtcctcatggctgggttttctgggacacatgtcgaggacagaaggtggagggtggtggagctgctgctggaagaaggggaaggaagagtggcccctccccgagttctaagtcaggatgaggcccacctgtccaaggtatcggaacctacccaggggaccctcagatcctccacccactcccccatccattacgatgccagcttccagccttgcccaggtcagagctgtggcagaggagaggcagccaggccctgttcctgctcagctcctgctcaggaaggccaggcctgacagatgtttgggagaggaataaagttgtgttgttgtggggcatgcaggcgtgcacacagcccttttc

SEQ ID NO: 254 - DNA, 42916 bp, Homo sapiens
  source 1..42916: mol_type = genomic DNA; note = NC_000005.10:c96433248-96390333 PCSK1 [organism=Homo sapiens] [GeneID=5122] [chromosome=5]
actcagcctggagaccgaagcgcttcactgagcgctcgccgccgcccagcctctcctctcgcgcctcctagctcttcgcagagcaaccaggagccaggagtggtctagagcccgagggtgggaagggggagtctgtctggcttttctcctatcttgcttctttttcctcttcccttcccactcttgttcaagcgagtgtgtgagctatggagcgaagagcctggagtctgcagtgcactgctttcgtcctcttttgcgcttggtgtgcactgaacagtgcaaaagcgaaaaggcaatttgtcaatgaatgggcagcggagatccccgggggcccggaagcagcctcggccatcgccgaggagctgggctatgaccttttgggtcaggtaagagtttccactttcaagaaactttctggggccccaggggactggcgggactggagcgcggtcttccaagtgggagccccaggttgcactctccagagcccagagtagcaaagagcaaggagctgctccagccctcgcccctgtcgcgcttggagagagagaaagcttgcattatttactgtttaggctgggcgcagccaagcagaaggaagccgctgcagctgggtagggcttatgcttactgttggccgctctagaattgaaatccgttcccgcgcggtttggaagaaaaatccctccacgcttgttcagggaacttgagatacactcaagctcttaccaaccaagcgcccccgggagaagcagtgcgctccatcccccgggactgaggcggtctgcgtcaggagccggctgttgccttcttttcaatatggcagcatcagatccaagtcctgatgcaaggggctaagcaggcttggggctgtccgccctggcagcctgtaagggcacgcccagggcattggaagagtgccagctgctgggactcgcgaccaggaggttgggaggccgcggagtagcctgggaagctggggggagaaatggtgggtgaaagacacgggaccatctatccccgcgactctctagggagctccggcttttcactgggaacttataaagtccaagcttcataactttgcccggccagtcccactgcagggtcgagatgccgaactgactatggggaagggatctatttctttcttgttcttcagccaagtacgtaatcgttttcccgggaatttcagcttattgttgcctgtccaagtgaaggcttggtcgataggtagctggttggaggtgggtgggcgtcaagacattaagtgggagactgcttatagctgagcgattccgaggggaccctagggagtgtgacttctagtctagagctttcctttccttggctcggaatcaagccctcgccccctgcttgggaagttggtctgcattgaagcgtgggaggaggcagttgtaaaacattttggcgcgttttttctggaggtggtggttgagacgccgctggagtcacggatgagtaatcggcgggggcgttggcgattctgtagaccgaaccctctggggaattcgcctgctcttgctagaggcttcattctcaactttataaaccaaattgtctttgaaatgcccgaaaggaaaatcaatgcagattggcttcctggtgtcccagcagcagatgagtcttttgcttttggccagcccttgccctcgtgccaggctccgtgttaggggctgaggaataagaggagggaaagaaacgctctcaagtaatcaagaatctagaggagactagcttagagataaatgattgcaactgattgtaatttgtgtaatcatagaagttgtacttgaagtctcaatattcattggttgaaggaatgaaagtagtagggaattcgggaggggtgaatgaaaactgcccaaaggagaaaacatttgctccgggaacagaagtcaaaggttgccaggagcacataatgagatcggagaagacagtctaggcatagaaaacagcttgtgggaaaacagtgagacataatacagtttagtagtaagtctgggaattgcacgcaattattaggaatttttgagacccaaagagggtatgagtagcagaggaaattgtgctggtgggtactgtggacatcatacaaatcatgtatgacctatgggggtggacactggggatttaattgtgtattccttgagcagctactgaaaggctaaatagcactggtaaccgtgtaggaggagactggggaagacagcaaaaactaaatctctcttctttttcccacctgttagctctaggcatgcatctaaacctagaccattcaatgtgaaaactgcttttcaaaataaataaacataaatcttaatagtaaaaaacaatacatcatcattcttgggaggatctttgagtaagggatagcatagtcacaaaagcattaacaaatagtgggggaaaaccatctatatttatatatgatttacaatactatctttcctctaaccatttttagttaagatggcattactaacaaaagttttaaaacaaacttaacaaaattattttattagaataataattctttgtagaaggctgatagcacgttcctggttctgcttatttctctttttgtttaatattactaaaattacactaatttagcattactatattgggtaccttattgcctcaggataaagcttggattaaggtagtgacaagaagaaaaaccagttgacagcagagaaaacagagctaagcactggtgatctttttctgcggctgctgatttctctccccagttccatccacagcttataggaagattcactgagattcaggcttggagcagggcctaagcttctctattttaaaattctctgggcgatgagaatcaccaatttaaagaacacgtttcttctgtaatatactgttgtcaactgtttgtttcttaattttaaaaatgcagggttacctagaggatttggtagcctcaaatttagtactgagtaaagggagactagctcaaaagaataatgaatatagtcctaaatgaaccaaagatgtcaatagatacccggagaagtacaaaccctctaaagtgggacaactgccctaaatgtagcatgttcttttctgaaagccttgaattagtggaaaatcaaacgatcactaatagtggctaatagcaatttatcactatgaattcaatggctacattttataacaacgataatttattttagtggaaagtggcactgaccatagatagtatcccaggtgtttgcctgcttaccacaaataattgttctttgaacagatatatttgattaaatgagcattttaatatgatattgtcacacatgaaaaacatgtatttcctccaatgtgtgtaaaatagaagcatcactagcctcctactgtgagctaatgaatatactgtgaactcaagcaataatattctgagggtcatcttaagacctctatcagtgccttcttcatgaagaatgtggatggagctggaggccattattgttggcaaactaacacaggaacagaaaaccgaataccgcatgttctcactcacaagtgagagctaaatgatgagaacacgtaaatacatagaggggaacaacatatactggggccttttggagggtggagggtgggagaagagaagggatcagaaaaaaataactaatgggtattgggcttaatacctgggtgatgaaataatctgtacaaaaataccccgtgacacaagtttacctatgtaacaaacctgtacttgtactgctgaacttaaaagtttaaaaaaagaaaaaaaatattaatttcagataccaggaatgggcttaataaaagttgcctatctctaagttagctgagttttaaactagtccatatatacttgtttgggaacgtggatatttattttatttctttccttttatagattggttcacttgaaaatcactacttattcaaacataaaaaccaccccagaaggtctcgaaggagtgcctttcatatcactaagagattatctgatgatgatcgtgtaagtgttgtacatttgtcttcaaaccaatactctagcttatctgctttctttatgatttctaataaaaacagaagcattttgcaaatgtggttttttttttattgtgaccaagattgtttatctgtattatttctaatttctttccataaaattataatggcacataataataacaagattgggttgaattggttgagccaaagttaattttacacatatatacgcagtttaattatataattacatatatatctaaagttaattttatatgtacactcacaaattcagtctaagagcatgaaagtgaatatttaaaatgagagggcagcactaataaaaatgtttgacaatacagtcaatcaacaaccttttattaggtacctattatgtaccaaacactttaataccaatgtgggctcaaagaaatacatgggccttactttcaataacatttcagtataactgaaaaaaaagtctattatttctatttggttttgctgtataaggagctagtgtttatgagagaactgtaaatccatgtcttcatgaggcaaatgtttccataagtaatctattgttggatccaaaccatctgatctcttttcatcctagtttgtatcttggttcaatgattaggttacagcagaaataaatataggtaaataaggtagaggcagtttgaatagatagctaatgtacctattgattttgaagtctattttcaaggtcaacaaacatattagaaaatgtttactatgttgggagtattgtaattttcatacagtgttgccttttctcaaagaaatgccatactggaagaaatttatcctgattcgcctgatatctgtgtacataatttttgttacctaggacaacctggagaattagaatgagagatcctcttggtgagaggattaaaaacatcctttcaacttcccagggggaaaatatatatatatgtatgtgacagaaaggtgatagaactgttgaaagtagacgaaattcatgaggactgtaagataatttgcccttttattcattctgaaactgatagaatttttaaaagaagaagaaaaagacaaattatgagggtagggaatgggaatggcctgggtcaccagtgttcgaatgtaaaagaaacaacaacatcctgacaatgctgtattaggaccacggacagtgaccgtatagctcatctacacccactgctagctcttttttgtcaagttattgcttgatgtgggagaccaaatcagaggccctggaccttattacagaagtttcttgtccactgaggtcttcccttactcacttcaagggagagggctcatcgtgtgtgggctctgaaaagcagaataacttctagcactctggctaggcttagtccccgggctaagcagaagagagatttccttctttgcctaaatgcatgcccaaactgcatgcccattaatgcacatagaactcaaactgacctgccttctcactttcataggagaaaattggacagaatagagcatacctaactgttattcttactcaaagtatctcatgacaatgaagatggcccattctactctttatacatccccttgatagctgatttggtgggggaggggtggaatctcaagacattatgaaaaaatgctaagaattccttctccagcacaggtataactttgtaaaaaattagcccaagaataattttattttaggaaacattctggaaccatagaaacttgcattggaaggttgaattagatgatcttcaatgctctttccagatcaaaagtattatttataattaagtacatgatacctataatgcataatagaaagacactaccaattttcctctataccattcagcctgctcttctagagattaatacatgattctgagttaatgacattaatcataacactgttttctacaattggatgtttatctgatcagacggcagagtgcctcctcttatatcccatttccaaaaaattgctcttggttttcattttattgctcttttttgatggaggataatattctttcaaatcagccctgtgaaatgcagcaacagtctatctttacaagtctgttaataaaatctccaagtgtaagtgaccctctacctcaaagattagtacttattccctagcagtcagcttccagagatcaactcagatgataggcagcattccaagcattgaggtattttaagccaaaacaattaagcttgaaaatacaagcactttaaaaataaatcatagtgactaatttctagctttcaggttcttcccattatttttaataggtttgcagtatatttttaattgaaaattgagggcagtcttagtggatggttttatccttcagttgcaaattatttttcggtttttatttttggagctgattcatgagtactctcacattaacaatattccaccacacactgaattgtcatcatgcatacagcagaaaagatgtgtttggggtaggaaatagtcatattgccaagaaaaataagagtatagaattatctcataatgaatataactacaaggcagcccctcactctctcagggcttcaagtataatagtattatgctgtaaatatggggcaggtaattttcgtattgtcagatctctttgcataatacatgagactgaattaatggtaagtgtgcgtggtcagtagtgctcattcatcacccaggatctgtgtctcatattaaatacttttaagcagaggtcgaagcacaggggagggagtttcaaatttgcatggatacagcaccattcttactttataaaatatttgcaatttctacctgttgtatgtaaagacagagaaattaatctataaaagcattataacagcagtctcttggcttgttgactcaatccataaaagcagacaaattttcagccatggagccctgaaacctcaatataaaaatgagtattatggtccatttgctgatgaaagcagactgaacttttgcttccactgtaaccacaatgtaaataatttagggaattatcatttcactgactgcttctcctccccctaaaggtgcactttactgtaatagaggaaatattcatctccccagtgggcaatcccttcttctcactgaggtgccagtttaatctgtagtcaaatgaaaatattgcagagctgcctgaactctgatgggaagggtactggagatagttagaggaagtatacagaggtagatatttgacttttgattttcttgctataaaaatccttgtaggtgatatgggctgaacaacagtatgaaaaagaaagaagtaaacgttcagctctaagggactcagcactaaatctcttcaatgatcccatgtggaatcagcaatggtacttggtaagtacctacagaaggactatgtgggtgggacctgggacctggcttctttatgttgttacatttgcaacatggatttttttttttttttatgatggagaatttcatagggagctatattgtctggagattagggctgatgggatcttcttgatctgcctcttctgttttgctgagtaaggatgttggaaacagatatctttagctgctgtgaaaaaaataggttgtattttttgtcttcttaagtttatttgggataaatgcagaaaaataatatcttgcaggttagggtttccaaaaacagtacttgtggcaaaaatctcatttggttaaagttattcttcagaaccctttaaagcactcacagagtatagtgaacataatttggcatatacaaccctgaatgacaattcttatatgacacagatgagaatctctgaaagaggttaaaagaaggaacacaagaaaagtctattgcaaatgtctagacttgcaaaccattctacctttaagatagttaccaaatccttgagcgaagaaattgttaagtgttgctgtctacctgcagggtgtcctctcttctgtttaatgttacgtctgtatggtagtagtataggctaatagaaggatttgttgttgagaattttataaaagattatttctcttgaaaaacacaagctaagactttgatactcttgttgcataagggttagaaaaggggatcagtttctcttgaccctacgttttctttctttctttctttctttctttctttctttctttctttctttctttctttctttctttcttttctttctttctctttctttctttctttctatctttctttttttttttgacagagttttgctcttgttgcccaggctggagtgcaatggcatgatctcagctcactgcaatctctgtctcctggcttcaagcgattctcctgcctcagcctctggagtagcttggattacagatgcccgccaccatgcccagctaatttttgtatttttaatagagatggggttttgtcacattggtcagtctggtctcgaactcctgacctcaggtgatccacccgccttggcctcccaaagtgctgggattacaggcatgagccaccgcaccgggcctcttgccactatcttaagtatttgctcattgcagcagaagagacttatcagttaacacttgtgcatttcctgtgtgacaaacactattctaaaatgtttgatatgaattaattcattttgttctcatgattgtctgtgttgtagaaatagtaattatgcccatttaacagatggaaaaacagagatattggaaagtagaataatttgccaaaatccatggctgctagtggtgggactataattcacgactccagagtccatactcttaacaactacagtctaaaattgttcctgcaactgacatagaggccttcttctctgactttggccaacaatctgtgtacagttccagcctcctgtgattcagcttcataccagcctggcaaatacttgtcaccccaccccccaacctctttatggggaggagggcacaaaagcaagagggcagctccttcactgacacttttgattgtggttatttatagatttcttattgaccctttcaccgggtacctggcattcttttactgtctctgtctcacatgcttagaaatgtgcttatatctgtgttcccttgctaccctgtacttatctcctgtacagtcccacactctgactatcagaaaatgtattttaaaaggaaaaccctgaatctcctctcacagacacttaccccctaaatcactcatacttaaaaataggcaatcacattgcaattcctgaggcaatcacagtctcctgagcattccaggttctgctttttcctttagaataaaaattctaaaacattcatgaatgactatgcaccaggcaatataatgagagctcaatgtggcaatggagaatcaggatttggggggagatgaaaacatcgactatcaaatagagcttccatagatgaaagggttgagcatgttattataaatgaaagaaatttagggataaaattcttcaaagccatgtagttcaaagagaaggagcacaggtgattcatcttttcaagtgatgtccatttgggacaatcgggagaagagcagcactctgggggttcatttggccttactctcaactttgttttctcatttcactgaattggcttcttctaaagagtagagtgacccaaggaaaaagaaagatgggtctccaggttggaactgaagtgcccattttgtagcaagcaaatgataattttatcaatgcttcgttgtttttctttaccagcaagataccaggatgacggcagccctgcccaagctggaccttcatgtgatacctgtttggcaaaaaggcattacgggcaaaggagttgttatcaccgtactggatgatggtttggagtggaatcacacggacatttatgccaactatgtaagtgtgtgccttctcatgactgtgacttagggagctgtctgtgcagacacacagttagggctttccttcttttcaaggggatgctgctctggtgtcagtccctgggattatgggccaaggttatgtcccttctcccacttcccactagcttatatgaatttattttgtaccagtgggcattgaaataattcagtgggatcaaaaattgtacaaaagtatatgtgttgggagaagaaggggcagtgcctacaccaattaagttaccaaaatctgatgactttgagttgctcagtgtttggggcattaaagtaatcaaatcaagccccttgcctgagatcattgtcacagtttccctcctcacctcttttatgagtctatatccctgacattgtaaaattatatgaatgtgattccttccatgcaaatccaaagtgaataccacacaatgcacctatgccaagctgagaaaggaaaagttttctagaaatgggaaaataaataaataaaaacaatttgcttcattgtttattaagtttataatataatatgaacaccatcatatatcttaggtctttagatcaggaggctggtgtttcatctttcagattatcccttgtttttctctcatcctttccacctatcaaacattccccagctataacaccaagctaaagagccaaggaaaagagaaggaaaaatagtagcacagagtagaaattaggaatgattgaaatatacggaaagcattgaaaagtaacagtaagggtatgcgggaggcgtttaagtgtagctattgggttggaaaagggagtggagcctggaagcttgtcttgaatttcaagcaccctctctcaaattaaattacatgtttatttagtgtgcctgggaggctgaaggagagcaccatggacctgagtcccaccctcagccacttctttgcacctatattcataagagagatgagtgtcaaagtgtcactaactagctttatggccttagggaagtcatttaacttctctgggcctcaattttctcatctgaaaactgagatgactgaactaagtaaactaattccttccaactccaatatcccatgagtgcctgtgaaccataggcttggtaacattcactgagaattgaatgctggctcacctggctgtgttcatcatctctgcctggtttgtgagtaaaataaatattcagtgactcggccagaaactctaaaatgcaggcttttgagctatcagccaggatgggaaggcatagggtaagaggcttgggaagtgatgcttttttttttttttttttttttttttaatgctgccacagtgttatattttgttgtctctttaggatccagaggctagctatgattttaatgataatgaccatgatccatttccccgatatgatcccacaaacgagaacaagtgagtaaatatgcatttgtgtgaaataaagtactttacaatgcttttatcttgtttgagaaaattataccatatatttcatccacattccagtgctcaggaaatgttaatgcacaacatccataccacaatattttgttgcttttaaaacagaaaccaaagtttctatttttatattccctttggtttatagaaccatattttcattaaacttcttacattatgaaattctcctctcaaatgttactgaactgttgtagctttagaaagaatgtttgagacataaagagtacacactttgagcccatccctcccctcaattcctctatgaatcttttactcttagcaacatgctttatgttagtcatgaaaagaaatatatgtaaagaaatggatatgaacaatgcccacaacttctgacggtggctacagtcaccttcaccagttctctcagaagagcatggccaaactccagacagagaaatgcctctgaggtctggcccctgaatccaacacagtctccagggcattgagccagccggaagtctcctccagagttcctgctgctataaggccataggaaagagagaggagacagcacccgactcccagattaactctctgtcccttgaagccacattatggtgagagaggccaagagccacagaggccaagagcaagatcttctaaagggagaggtgaaagaaagacccagaggcaagagactttcaacttctctcctagccccaaagaaacttcacgctctaggcatgtggaccctcaaagtgtccatgcccatgggagagaccatctttgctcataccgatgttctcacagacatcaaggagacactcaaactttccttttcattttctctacacagaagagacttgcaccaaaatgatcaaagccaaggtcaaaattagggcttgttgctacaagtgaggatggaaaaagccaagcatctaacagctcttggtatatgtcacatgaagcgcttctttattctctctggatggcactgtctcttggactgttacccaacttgggtcagacaagtctgtctctgtctctctctctctctctctctctttctctctctctctccctctcttccttcctccctccctccctccctcccttccttattctccctcagaactcccaagtggctggtgcagtaatactgatctaaagttatttctttctttggatagtcttccctccagaaagccaacaaaccccaggatgggaggctggggtacatggacttggcctcaacttctgggtgtttatttcttccttggggaaaatgggaggcttgtggatagttcagggatatgacttctttccgtaccatttatttctttgagggtgactaaaggggttaaccgcaaatatcccttagaggtgaaaacattccagtaaaaacacaataggaaccactggcaagggtacctttggagcaaagtgggagtgtttcgagagcttacagcagaccctcagacaaactttttgctatatgtctgaagcaggataatgcaggaccagtaaggacatctactcttttggggcacagccttgcaatgtagttatggctttgccaattcccagagtaaagggtgaccttggagaaatcacttacctctctctgcctctattccattttcttcccctaaactgggtgacaacgtaccttctccctatgtttcttaaatgaacttcctgaggaaatggctaataagcacttggaataataagccttcttagagtggagtagaaacaactttcattccacccccttggttaagactacgggaaatctgttcccagacacttgaggagacttagatggaggcactggctccttcctaggcagtatacggtccttccaggcagatcctgggtctggccccaggatccagtgtgggtgataacttgtacgatggctgcatagtgggcgaattcttgatgaaatgacattctctggagtttttccagtcaggagatggaacactcagaccttcctcaaaacaaaggggatctcacagcacagcatttataatagttgttttatatatatgaatataataattaaaataaaatataatttccctgactcagggagttacctgcaaaggccctagggaagcagcccatataatgctatttgttttgtgcctgaaagccctgagcttccagatcatagcctgctgtgaatcttccacacagcattgagagagcatgtcatagcccaacagttaagagcagacttgggagccaaatttaggtcaaattttagatctgccacttagtagttgggtgatcttgaggaaattatttaacttctttgtgcttaagttttatcatcttttgaaaaagaatctctacttccttgagttagaggtattaagtgagtgtatatatatatagagagagagagggagagagagagagagagagaggtattaagtgagtttatatatatatatataataagtattatataacatatataatacttcattgagttaggggttaaagtgaggttttatatatatatatatatctcacttaatatatatatacatataaactcatttaatacctctaacttaatgaggtagattatttatctatatctatatctgtatatctggcatttaaacaaattgatttgtttaaaaattattccacaagatatttaaatactacccttattctggttaaaatattcttgtcacacttgttatttaagccatatatgtatatgtgtgcatatgtatatatatggcttaaataacatgtgtgacaaggatatttggcttggacatacacatatatatggcttggacactggtacacaaaaaagttaagtaagtgtttgctgtggtgatgatgatgatgataatgatcacagcttctcatttagtaactgaggtagaccttctttcagtgagaaatcaacatgacaagaataatatcatccgatgggagcagcagagacaagtcaattttctgagccaattcagaatctgctatttggaaatgacataatgagcaactctctctcaggatcctcttgactatcaaccaaaaaggtggcatccttatcatttatcagaaggtataataaaaagtagatttgccttctagcatgttgtcagacataaagcccttaggtttagaaaatgaatggctccattttgtcttggcctttacagcaattggagaggtattataccccaattccaaggttattatctcttcaaactatcagtattgctgttgttctttattaccacgtaaatgagattaatagaagctacatttgaatgctactctgaaagtcaaaagaggaatcactaaataataaaatcttaacagtgcaggtaatgcttaccattaagctggcataaatctgtattcattatttcaacaccaattacagattgtttttctagttaaataacaaatgtgacaaggatattttaaccagaataagggtagtatttaaactatctcatggaataatttttaaacaaatcattttgtttaaatgccagttactaccattgttctaagataatagaaagttctttactgcagcacctcacttagaaaagaaaaagagctgcggcctataaagaatgacataggaacacttttctttctctcaacgtttggaggtggaacctgaggataagaggaggaaaacatgtcaatgcatatttgtaccatgatcctcctgcagctctcactagagaatagtcgtccatatacaaggagagataaataataggtgctgtcacactgcatcattttttaggacaaaggcacaaacctggggatgtctgtcagcagattgattctgttggctcaggctgaagacctgcactggattcttttgctgacctgagccttgtctcccatcctgtatacatggaaatatataagaaggcagtggtgacttctggaagtacatttctcagagatgacaactgaattactccttctactaaggcaaagagcgttcatccatccacaaagcataagttgccttctgtatgttcagatgtgtgcacttttctcagagaatggtgtggtcaggacagcttcagttgcaaatgaaagaatcctaactcaaagattaagtaacaaagggattttaaaaatattcacccaagtgatgttctagtttctgatgtttcaagatccaagagctcaaacaatatgttctcaggacaccaagcactctgtttccatctctagtgctgctcgcctctgcttggcttcactttcaagagaatcctgcctggcagagcaagacccatatgactcacatggaacttaaagctcataattctcaagaaagagtggggtttcttccctataatctacatcagtccttgaaagttgtctgagaggaggggccccatgattgaaaaaaatcacaaaaagtcaggagggctgcttccccaaacaggaaaatgctagcatacataaaagaagcaggtgtttgctgcatcaggaaagatcttgaattaaagataattatattgtcctgacttagaattcctagccaggattaacatgaaggagcaggaatcttattttgtggaaggagaccaggaaatcatctttgctacttcaggaaaaagagaagttgaacaattcttcttgatggccagtcaatttaggaattttatattccatgctatgctgaattaatagatggccagtatagtagaattgaaatgtaactggccaacattattgctccgagctaacccttcctctctttcactctatgttggtatatctggtaggctcctccaagccaccaacagccttcacactcttacaggttgtttccacaatagaataaaatcacgaaataaatgaattcacattaatgtgcttttggcttgttggccctcctgagtcaggatggtggtgggaaaagacaattatcatcctcagaatttcagaatagatgctttagtggtggaatttggtgtttggaagacgcatttttcttccaaatactctgaaatcataaattaccctctttgcttgactgcaaaaccaatcatgttcaggcttctggccccagttgggatttcaggagcatcttggctttccaattagctggtaatgtcttgcaaatatctcaagctcctcttggtaccagataatcttcagacattttagtgtggcatatatttagaggagaggaggagggcttaataggggacttgttctaggatatcctactaaggctgatcaaggataatctaatccaaggcagtcactagggagaaaagtgaggagccactttgctaccaaaaagtacaaagcagaagccatttctctgaaattgtttctgaatgtcagagttcttataatagtatcaatagttaacactcactgtgttcttactatctgccatccactgctctaagtgttttacatataatttgtcatgtgaccaagcctttgcagacaagtaacttacccaaggtcacacccttagtgaatggcagaagccagaatttgaaatcacatactttgtctctaatacttgtgcccttcatctgaacataagttttatgttatactaatttaaaacaaacaaacaaaaacagtaacaaggccgacaaaaagttaatatacctatgccccattaattcattcatatgcaaaacaaatgtttgttcttctgtatgttttataattcttatttttcaatcctcagacacgggaccagatgtgcaggagaaattgccatgcaagcaaataatcacaaatgcggggttggagttgcatacaattccaaagttggaggtaaaacagaggattgtccctatagcttggcattttaatgtgaagcttacatcacccattgtaaatgggggaggggagcttttctttttaacaactggaggaacaaattagttccatgccaaagttgctacaggacttgaatatgatttgccagcgagtcaatagatatggattcctagaaaatggatagttgaatatagcctatacatctttgcaggaaaaaaaaatgtggaaatgttgaatagcatttgaaccaaatctaattttctctatgttctgatttagaatggtttgttattgagtgcttgctaaggaaacagaaggaggaggtaaatttaggcaaagacttttcctgcctctcaattctgtagaagttcttcactttatagagaagaacagcttcaaaatttaaaaaaagtacatacttattatattaaatagccaaattttatcttttatagcaaggatgtaggatttaattgttttcatcagtgtccttatggggaaacacatggtaagttgcattagggcaactgtggacattttaataaagaaacgatttacaagaattagagaaaaccaacaaggggctaagaagtggtaggcagatgttatcacctttagcctcaaggagcaaagggaagaagtcagcagaaaatagagagggaaagctgtggtcacaggagagagccactggataggccttgagtacaacaacagagccacttctaggcaaaggggattcaggggtataggcacctcattctcctcttgattcccaccctcttgctggtgtcttcagttggctgaacccaatgggaagacagagcccattgatgcagtccatgttctaatggagaagagtggaaagtgtatctgcaggggccaagagaaaagaaaaaactgtctctcctctttatgctatcccaacctcaggctttcatgttatgttataagcttcaagtttagtttggttttcaaaaaccataatcacaaaaagaatcaattgtagaacatttcaattacaataaaaccccattaaactctacatgagtataccttgcatttggttatgcatttctttttagaaaccaaataaatatacatcgtgacatgtaatgcatctttcatgaatatagggcactcttagaattttaagtgtcattcctgattcctttgatactaacatcttcaaagtgttctgttaatttttaaaaaaaatgaagggagaagcacaaattatgtaattagctagtaaaagaattcactcttttagtcataatgaacgaaacagctatagtttgtgaaagaatcatctgatcccttcattttgtagagaaagaatcagaagcaagctgctcaaggtaatgaaagcaagtttgtggcagtgtagaactgaaacacaagattccaagcctactgatgttttccattactccatcctttgatggtctggccccaaatgcattttttaccaataatcttcatttattaggcacctattgtatgtcagttactctacaaatattataggcagtgtatcctggtggttaacagatttaggggctagatttgtagggttcaaattctggctccccagtttcaagctatgtggccttgagcaagtcactatcccttcctggcctcaatctctccatttataaagtgaggagaattacggcacccacctcaaatggtggttgtaaggtttagatgagtttatacatgtaaagcctgtggattggtggctgcatatagactatcatgaatgcacatgagctgttattatcatccctattttacagttgaagaaactgaggcacagagggttaactggcttgcccaagattccacagctggtaagagcagaactgggattttttttttttttttttagacagagtctcactctgtcgcccaggctggagtgcagtggcgcgatctcggctcactgcaagctccgcctcccgggttcatgccattctcctgcctcagcctcctgagtagctaggactacaggaacccgccactacgcccggctaattttttttttttttttttttttttttgtatttttagtggagacagggtttcatcatgttagccaggatggtctcgatctcttgacctcgtgatccgcccgcctcggcctcccaaagtgctgggattacaggcgtgagccaccgcacctggccgattttttttctaaatgcattttttttttttttttttgagacagagtcttgctctgttgcccaggctggagtgcagtggttgcaatcttagctcactgcaacctctgcctcccaggttcaagcatttcttgtgcctcagcctcctgagtagctgggattataggtgcgtgccagcatgcctgactaatttttgtatttttagtaaagatggggtttctccatgttggccaggctggtcttgaactcctggcctcaagtgatccacccacctcggcctcccaaagtgttggtattaaaggcatgagccactgcgcctggctctaaatgcatttttgaacaatttcttttttacaaatacaactttcactgatcatatcaatttcatatcattttacctttgctccatagtaaataagtgtgaaaatctaaggctgtgcactttattgtattatgagcctgaagccagaaataaccaggtagctgcctgtaatctgtccagattgtttttgccttcctggctcttgaattcataagtctgatgacgggtgacagcctgttggaaagcacaaagagctaccgcacctacattgtcctgatgaaaaatgattccccttgggggtgaaatccatggcaatgatttcatccttgagattatttagaagaataggaagcatgttccttgaaaatgtttcttagcaaacacatgaaaggatggcctctgggttatttttaatcagggcttagaaacaaaagtgctttccctatttgttagtttcctgttgtgactagatcttttgaagctacatgtttcctgtccagagtccttgtgtggcgtagactgggccacagccatttgtgggacagccatgaggaggtgcatcaccagagggctgcttggagggtctttctgaaagctggtctgtcatttagttggggtgggagggagggcaaacattttgtaattgacaacaatcacggccacttcctctcatccaaggatgctgctccacttcagactcaatgcccagagcttttgctgggaagagagccttgagtgggaccaaaaaaaaaaaaaaaaaaaaaaacatcacagctgcctacacagtgcatggtattgcatagtattatctctaaagtgcgacaaaaaagcttatgggggcagcaacatgttccttccttctgtggtgtcagtagctgggttacagaaattggggacatctatctagtagttacctggtttttgactcttaaaatcctttaaaaatacaaatagtaagagtattgggcttttgtccatgtacatactgacatcaacctttgtgtgtctttgtttattttgtttctcaggcataagaatgctggatggcattgtgacggatgctattgaggccagttcaattggattcaatcctggacacgtggatatttacagtgcaagctggggccctaatgatgatgggaaaactgtggaggggcctggccggctagcccagaaggcttttgaatatggtgtcaaacaggtaagatgctttacacagacccacatgaaatgaaacctgaccatctggatatgaggagaaggaaagaacacttaggttacatggaataacattgttgtggatttcttaacaaagtcctttacaattttaaatgcacttagagggccaaatcattcttcagagggatgggagttaaggcttaagaaagttttccctatttgtggccaggcgcgatggccaagggaggcagatcaattgaggccaggagtggccaatatggagaaaccccacctctactaaaaacacaaaaattagccaggtgtaactaggttgcactgttctgcaacctagtttagacagtgaaactgtggtctcaacttagatgcctatagtcccagctactcgggaggctgaggcacaagaattgcttgaacccagaaggcggaggtagcagtgagctgagattgcagcattgcactccagcctgggtgacagagtgagaccctgcctcaaaactaaatataaataaataaaatgaattttccctatttgggtctgaggttgaatggaaatttattacttttagcatatttattttaaaagtgcttctggacatttctttctccttactcattttcctgctgcttttgggtttttacactagtaaaaaactactcagtcttcttccaagcgcggaaatgcttttcaaatatagaaacgtgttgccttctgctctgcacgtgcctgttgaatacctgtgccttggttggattgctctgtcacttgggtttactgtattcttgcacagattctaaagccttgtgctccataagatgaaacaaaagtagaaactctggagagcacaaattgaaaaatcatagaaagggcggctttgacgagttccattcaattgaagagtcccttttaatgcagctgcaaggcagatctgaataattcctaattttgtcattctatcagtcagccagaagattgaagcagaaagaaagagaggaagttcaaagatttaagtgcagtgacataaactaagagaagggtggaaaaatatgagcaagtgcaaaacgctagattatgaatctgcataagaaagaaaagcgtgtgctcagccctaccccaggagggcccagagactggcagggccagagtccagtggcttataatacacagccttgtgagatttccaatatcgaagccaaaagatctggaattgaaaatagatcccaaatagctgtctctgagaatttcacacatgtagtcgttggggattttattgggatataacaatgaccccaatagatgataacagataatatgcattctggcttttcctttaggggagacaggggaaggggtccatcttcgtctgggcttcgggaaacggggggcgtcagggagataattgtgactgtgatggctacacagacagcatctacaccatctccatcagcagtgcctcccagcaaggcctatccccctggtacgctgagaagtgctcctccacactggccacctcttacagcagcggagattacaccgaccagagaatcgtatgttgcttttgtctaattctctctgcttagttaggagagcgtggcatgcatgtgaaatgattcccctaactgacctttggtacgactgattcgcttaagcttgatgtctcagttgggagaactcacacttactcacttgaaaggctggcatccatcagaaagttttctctccagggataatgacacttctgccaagatgatcttcccctctgtcatttttaaacccagccttgagaagccaccaaacctgtcattacacacagcggagactccaaatgtcttttctgcttgtctgatgcctccctggaaacagccttaaaggagatctcagggttgtaggggctttatcacccttgtacttgctgatcctttaacagcagggatatagtctgacctgccctgtcgcagatgataaaaatacagagtctacaccagctatgtctcctaagaatggatgacctgcaggaaaatagcagtttcagtgtcccctgaggtgaactgctcagcatctgggtaagcagctcggggaggtcgtatgctcagagagctcctccagcccacgcttgcctgcgcctttgcttccatgagtcagacggccaagggcaattactggatttcccttcaagggcatgacgatggaggggcatttaggggctttgagaacaaagggagacacctttaatttaaaaaatgtaaggcccccaatttaactcctgacacagaaaggaccaactagctaaagtatatagatcctatctcagtgaaatagcaggtcatgatctaattagagggtgggtgaaccctataataatgaccttggaatgcgtgcaagattcctattaatggcatctcaacaaaattgtcaacacgaacatcttcttcatacaggatcacttctgcaagctagtttagacagtaaagctgtggtctcaacttagaagtgtgggcctgcttctcacgcgcatctcttcagctactcaagtaatagacagtggcattctaccgaggggttttatggcaggcacattttaaagggtttgaaaggggcatatcagacatctgccccacttgtcttcagagcccctggctgttgtcatttccctgggtgtccagagctgcctttagaaaatggcctgttgggcatttcagaatcaccatttcacagactgttccttatcttgggtaacctgcactgaagcagaagaaagattttctatctttgtaaaactccctccttaagaaagccagccttaggagagacagctggtggattctatttgagacagtctcagtaacataacctttttcttacgcaaaccttttcctcagcatagtcatctctgggggcttgcttgcgtcaacaggtaaaaagggcaaccttgcttccgcagccctctgaggagcagagccatcataacttgagaaattcagcaactccaagcaggaagccaatggaggtgataatagaacaaattatttttttacacctccctcccacacatcgaaatctcgagctagaacttcggtgctggagcctgggtgggtgtcttgttagtaatcccttggcccaaccagcagcgccgtggtccttaaggcagacaggaagtcttttcagtttcttcccttcatctcagcaatctcttcattaccctaaagttagccagggtaattccttacttgcaagaaaattatgtaaaactactttcacagagaacatctcgggtaagtctcgcatatgagtcagaaaatataaatcgcattttacagatggggagccaaatgacttgcccgaggacaaatctattaagtagcagttagagaatttgaacccagaactaagtccagcacactttccattttaaagacccatcgttttcctcaaagtgtaaatgtggacaccaactcacaggtatcaaatctagttcaacagtgagtgcaaactacatattaagcattttttgtgcaagtagttcaaatggctaaggccaggatgtcttcatatccttgggctgaagaggcagccaaatgtcaatctgaaggcaaaagggaattttgtatgagacagaatttctaaatatgccagaccaaacacaatggacccgatgattaatgggccagcatgattcacagtgattttgaaactttgttttttatagacagcatttcgtttgggaatctcagaaaagaaaatattcgtagtgggagtacttcatccccagaaaaggcatcttgctgccagaattatagagaagttgcatatagagggtgaactaaaatatcagcagatggcaaacatccgcctgtggtttagaggagaaagtaggcaatcgaatcagctgagtttcctggtcatagcagatgcagcctttggtacagttaacccccaagacaggcccacactcctcacgtgttctccctgcctttctctccttcctgacgtcatccagacgagcgctgacctgcacaatgactgcacggagacgcacacaggcacctcggcctctgcacctctggctgctggcatcttcgctctggccctggaagcaaagtaaggcccagaaagcttctaatcacctttacaaaggctgattctccttatttttaataacacttttttttctgaatacatggttacaggagaaattttggaatactgcaaataaagataagctctttcctgccacttcgaggtcactaaccatagttaacatctcaatgtagatttaatacacacacatcttacaaaattgggatcttaatatagacgttattttgtaatctgtttttaaaacccattctacaatatattaaacatactttctcctgtctaaatcaatatgctttgacctttaaaactcatgctatccctcaaatcttcttcccactcagctacaacgccttttgtttattctcttccagcaggattttgtttaaatagtttccagtgggcagtattaggaacaagtttaaaaaactcctttctttgaatatgtaagcctagtcctggagctgatataaccacatcaggggacatgagatttaaaggcaggagttttatattttcacagtgttccattgtataaacacaaatttccttaaagtcatctaatcatgcttaaacaccattgtcagtaaatattagttgtcatctctgacaatttcctcaggataaacactcagaattggaatttctgggtcaaagggcaagcatgttttaatgatttttatatatattgacaagatgctgccttgaatgactataccattttatattccctccaggaatatatgtgtgaaagtgccagtttccaaaacccttgtcaaaactacttttattatcttttaaaatatttgctatgttgataggtgaaaatggtatctcattttaatatgcttgtatttaattactaatgaagctcaatatttcatacccttcagctctttgtcttctggggttgcttctttatggccttagttttgttttatggccttggttcacaaaagctagatgctttataagtttgacatttaccttttaatttgtttctatgtaatttttaatgaaatgtagttaatatgtatgtagttatgtttgtcagtctgtttctttaaggcttcttcctttgcttttatgctcagaaaaaatcttcacaaccccaaattagataaacattaattatatgtcttttattatggtttctttaccatatttaaattctaaatccctctggaatttattttagtgtatgatgttaaaaaaagatttaactttttttttctcataattacccaatagtccaatacttaacacagaggaaaaaaattgaactgtctcacactgcacatcacagctttttatgtgtcctcattcctgctttctgatgtgtggtgacagtgaatcttgaaatgtcaagtcaggtgctatggttgcatattagaagaagtgattaaacttgtaaattactattatccttcctaataaggagattatcctagaataaattacatattctctagagagagaacaaagcagtgtccttatgtcatattcagtagactcagttcgtaataacagaaaggaaaaatatcttggcctttgccatgactggaaaagccctgaggttcctgagcctttgtccaggagagtccagtttatctctaggatccctggggcttcctatggagatggggtatattcctgggtatctcggctgtgagatggctacagtggctaagcaaggaagtctagcaaggctcttaccaagagtccacctacttggaggggctggcaagatgtttggtaagggaagaagtaaattcaggtgctcaattagaaatagatattgggccctccagaaaagctatgttcagaatctaagttcacttataataggaagtagatggacaaaagacaaaaatctatgaacacaagctgagactggcatcagcagatccaaattaaccgagaaataattgtccaagcagtgaaaattgcaaggaacacctggcttcaagttctagctctaccactagctatgtggccttcggcaagttaatttacttgtggggttcagtctttccatctataaaatgaaggggtcaaacgagacctttttttacaaacttcttctcttcctaagattctcagagttgagattgaaaatgtcagcctgcataggtaatccaacatgaattgttggggtcagtgatgaggggtctggactggaagaaaatagggtcctatggattataggatcctgtgcaacagacttattatatttaagatttcaaaacacagactactaccccagggagctgttaaaagaaagcaatcttaaaattttatgtctagagcctttcttctctatccaacacctgtcagatgcatgtaaatataactagccgtgcctagcccatccttgtatagtgaccaatatagtagaaatatccatctgctgaacagaagtaatgccaattttatgtaagagctgaaattgtaaaagtgcaatccttggtttctaaaacctcaaggcttctttttctgtatagtggaaaatgatcctatacagaaaataatcctttccttttctttttcttttggagacagtgtctcactccgtcacccaggctggagtgcagtggcaagatctcggctcactgcaacctcaacccctccggttcaagaaattcttatgcctcagcctcctgagtagctgggattacaggcatgtgccaccatgcctggctaatttgatccttcttttttctatgtaggagaaaatgatctaggaatgatctagcctcattaatctcagtctctgatggacagtctctaaagcaggtgtttcatttctgtgaaacactcagatgggttccaaggggtccatgaatctctttgcaactaaatgcagaattgcttataaatgtatgtatggcatatttctggggaatggcttataggtttcaccagattctcagtgttcgtgatttaagagatattaagagtctatgatctcccaggtgcttatcataagaatttaattcccttcattttgactcaattcatcagtaagataagtatgactgatctatcttaacatttatatccttactgccaaggtacatagaggttattaagatttctgttctcaattgaacatttttctgaactctattcaattgtctataccaaagctgaatgccagaatttctagacatgtgaccaagctttatcccaaggcactcaagaatgagaaaatcatttaatcatgtgccatcccacaggaacaactatggagactgaagagcccttgcctaaacttatcaagaataatggcacccaatattgattaggttcttactgtagaccagacacagctggcctctttatatacaatattaattataacgcttacaacattcttatgacatagaaattattaatttcacctataaatgggaaaaaataaggcttagagaggttgagatatataaccaagatcccacaaagaaattcaaactcaagtctctctgactgcaaagtctgtgctatcagcaaccacaccttgcagcctcccacagccctgtgagggagaggcaatgttgaatggcagcctatcatctcctcaaataaaggagggttcggaagattgaggctgataaatgaacatgcatttatgagtttcttataagttttctgtcacaagcagactactcaatatgctgtgttaaatgttatatagccagagtattggggaatgggaggagaaaaggaaaggagaaggaatggtttctggctgaatatgcacaaagaaatactttccttccccaaagcgatgtttctcaagtaccagcatatatagtcatcacctggggagtttatttaacatgcaggttcccaggtcattttgccagcaactattcagaccttgtatctgcctaggagtttctggtattcaacctaggaattccttttttaacaaatctcccaggcactttttaatgctagtaataccttaaccaagttttgagaaacaaatgctataaagagttacttttaccactgtgttttcctacaacctcatccacctgtgtttgtgtagaaacccattagggtagttagtaggtgtatcttggagataaatatactaagagaagaaggaattccttgcataaatgtttgtggcactattattattatgtagtgagtatacctaagaaagctgtagaaaatagcctcagccttctgaggagagatcaaaagaatcagaataatttttaataggtgaggaaaattctgaagtgaaccattgaatcccttcacacctttggaaatattaaacaaacagataagccaaacttctggtcttattaaaacctggagaaagagaaatggactttcaatgctgcatgaaacctttggaaaaaaatcacaacaaaaaagtcttgacttagtgggttgtgaaatgttagaaagtccaagttagaaaaattttaagatctaggctaatttaggtatgattagaggctgaaccagatagctcctaagacttttcactctggaattttgtctccaaattacattacctacatctcttctaattagaagcaatgcttaattcggtgtttaattccatacccttattttctgtaaacatatctttgattagccactcaatgcagtgtttaaaaatttaattatcgtggatgtcattgagcacaaattaacaaaggaaggctgtcaggaatgagttgcactgttgttagcagctccttttcatttatgaaatacaagcacacgaatgaacaataactctgttagaaaaatacaccggggcctgtcatggggtggggtgagtggagagggatagcattaggagatatacctaatgtaaatgacgagttaacgggtgcagcacaccaacatggcacatgtgtacatatgtaacaaaactgcacgttgtgcacatgtaccctagaacttaaagtataataataataaaaaaagaaaaataggtttttctaattgcatgacaatgaagctccttaatattttgcagagactagataaaggaaatttttaaaacaaaataacctgcaactgcatataaaataaatgctctactacagaaacataggacacacatgctatatgtgataatcatgattatcagcaccttgccttaagcctcctcagtacgcttcctccttcctgcctccacacatgcacctgcacatactgatgatccaaacggaaaactggtgtgttgcccattgactgccttgataagaggcttttacctaaaactccttttaaaagactggaaggaagcaagcatttcaataaaatgtcctattctatttacaagtgtaccaggtgatcatgaggcaagcattctgggactcactgaggatccctaaactggtgtccttccaaggcctctctgtcagtcactctccagggtaaagtggtatgtttgtcgggagctcagctcaggtgagctgagctgtcaggtgtggagtagcctattaattcaacaagccaaaaatgaaagcattgagcctttagtcacttactgctatgacataagcaagagtctgaaaccggagaaaacacttactcgccctgttcctggcatactggttgagtggctcagcacagacttgagggtcatctcactgctgagggagccccgaacaaaaggctctggcaattttatggactctgaggtgtgaggcggggagggaccaagagagtacgggagtggagaagcaccaggcactgagtctgagtgaggaaagtgtctagatgtttcccctcctctctccacgaggaggcctgaccaagggacctaggaaggaaagctctcaccagctaggaatgtcaatatggaaagaacatgaggggccagggggcctgcggccttcatggaaactcctctcagaggctgcgagccacaaactgcacactgtgtctgcatggggagggcagcttccccgtgtgtcgtgccaggtaagacctttgaaatcgcctatggtcaggcctgaaaaatcacacacggtttttaactaggagccggactcttcagtgtttaggaatgtccactgcctctttcttgtcacaggggattactgagccagtacatgatgggctctggggagaaggcagcaaagtgagccagactcccctgatgattgttctccaaccgagtgctgagacaggaaccttgaggagtaaaaactgggcatctacttattacataatgcttgattggcttcagggaacaatacaggtctcaaagtcgaggaaaagtttgagaatctgactgatgactaggagcaatatgttttaaaattatatttggggctagttagcacttaggcatgttcagtctctgaaccaaccatatctgctgagcatatataccctgtgcccagcattcttctgggtgctacacatcagagaacaagatggataaagatctcaccacttctcatggttaaattagaaccagggagagagacatcaacaaaacacaatacaaatgagtttcccgcatgttagaagcctataagtgcaatggaaggagaatatgcacatatagcagaataaaagagctcgggaccatgtgggagagtggaaattttaaataggctgatcaaggaaggcctcatcatagtataatagatccaacaatcccttatatctctgatttatctttatagtgttgctaaattaatcttactaagacttatgattttactatttccttactcaaaaattctcactgattcccactgcccaaaagataaagtataagctccctttctggcatgccaggttctcatcgctctggcccaatactcctcactgcctctcccctgccccagcaaaccaggctgtcatctggccacacctgtactgtcccactttggtgcttttgctccagtggccttcttctctatctccacttcttaacactctaccccctgtcaaagtccagctcaaatatttctcccccacaaagttttcctagatctttctattccatggaaattctttctactctaaactcccacaatgcgttaagctatgaatatagcactcaccagatagaattataaaagccttaattctttttactggattgtaaacttcttttttttttttttttttttttttttgagacggagtcccgctctttagcccaggccggattgcagtggcacaatcttggctcactgcaagctccgcctcccaggttcacgccattctcctgcctcagcctcccgagtagctgggactacaggcgcccgccaccgcgcccggctaattttttgtatttttagtagagacggggtttcaccgtgttagccaagatggtctcgatctcctgaccttgtgatccgcccgcctcggcctcccaaagtgctgggattacaggcgtgagccaccgcgcccagcctggattgtaaacttctaaaagacaagaaccacatccttgaatatccccatggtattagcatagtgccttgcaagagtgagctcaaatagctaagagtttcttgacgcttttgatagataaagaaaaaggcaatacatgtttacagcaggtagccagtctgtgtctttaacatctcactcttcctaagaaggaagtcaaggcctcgtctgtgggttcataatgctgaaagtgctaaggcttttaatggacagcatgagactggagggcataaagaaagtgttaccatttaaaatgtttgctcagttaaatggaagcaattagaaattaaggacaaagttttatacttctatattgctgaggactgaattttactcatagtaaaagcttatatgctctggagagaagtcataacttatatgttacagggagaagttttcagctctgtattctgaattctgaatgaaaagatatatgaacagtaatagacactagaataacataactacaatagcaaaaggcacttcataatccctgaatggagatgcttattgttagcacttgcttttgcaaggaaacttcatttttctctgaaagacactttgggtcacttcccctccagcccaaatctcacctggcgagatatgcagcacctggttgtctggacctctgagtatgacccgctggccaataaccctggatggaaaaagaatggagcaggcttgatggtgaatagtcgatttggatttggcttgctaaatgccaaagctctggtggatttagctgaccccaggacctggaggagcgtgcctgagaagaaagagtgtgttgtaaaggacaatgactttgagcccaggtaagtatctcctggaattttaaacacatgtgtgcccatggcataatttcattactatgtttgccattctgcctgatttttttgtatctacccttctgaagtagatggaggtggaattttctagtgttctctgtgggtatccatggggactaactaagagaccaaagctctagaaaccatgttaaccatttgcatgttcctcttgtagtccacctaccacatagcacccagtctaagatgcaccattgttttattgtcaattaaactgtgatcaaccacccatcagttttaagattcattctaaattcaatgtttaactatttttttaaaatgcatcttagggttgatgaaatgcagtacttgccaaccagttttacccaaaatctgcttgcaaaatagccttgcttcatgccacagtgctgtgtgattcatggcttttcttccatgagggattctttatcatacacttacttagactccctctagcacaccacatcttgtcacagaagaaatttctactaggagtgttttgtaatttctatcaaagcaatcaaaataatactgaagacctgctcacacaaaatatccaaggatgggaggcttggggcatgccttcagaaggccttctagataaaatcatttttttcttaagaggggctttttgatgggtctacaataaatctgcctgaatttgactccacagcaaatagcattgtatttaagtattagtgccccttaccattttcttatgcattaaaattcatgtatacataattctgaattaggttctacacatcacagggagtgacaaaaagcttagttgagcatctagtcaagattgatgcatgcagatatgcataaaatgcaaggaagtttggatatactttattcaatgctgattctttaatgtatttagagccctgaaagctaatggagaagttatcattgaaattccaacaagagcttgtgaaggacaagaaaatgctatcaagtccctggagcatgtacaatttgaagcaacaattgaatattcccgaagaggagaccttcatgtcacacttacttctgctgctggtaaattaaaaaagttctaagccatttatatttttaagtgtaagttgaatgattcaaataactgattgcttttgtttattcatagaacaaagtctcctaatagatattttcaggtcttaaaaaacatgcttattttttcctttttcttggtgttagatctccctctgccctgcccatttccactgatcctttgataagcagagaatgaggcccattcaaataatgctaattaatacacttttctgaagtcatgcattttcaaactgtttacttttccattttactgacctatcacttttctcttagatagcaaattagtgaaagttactctgataattaaccaaactcacagatatatccgaaacatacaaggagtccattgaaaactgggaattcagatcgattagaggagattgagaagattaacaaatttatcatagtaacatgaataaggccattttatatgatgtatgaacatttgctttttcctgcgagggcactaattcagataagatagtggatgggaaagagctcgtgaaccataagccataatctaaccaggaggagcagtcccaatactcctttatgttttagcaggactcaactgactaaatttggtttctgtgggtgatatgtgaggaaagatgagctatctctatgatcttcctcctgaatattaattcttagaggtttggaataggctctgttaattttgaagttatgctttctagatgtattggaattaacctgaaatattggtggaatgcttttttaattgatagacctgcagttatttaacccttccacatagaactattatcaattgatctagaaagggctgggacttaaaaatttacaggtaacctgtcttttaatataagagattgttaaattaatatatctttaagaaattaatacattaattaaataattatgattattaatgattgcataataaattaaataataatttttatgtttaaatcattatggagtcaggcacctactaaattttcaagatttcctctcacacttcagaaatgatagtttcattaaaatatttttagatttttgactctctaattcaatttgtaaatgtagttcgccgagttttccttatttaaataaaccttagtcaacattttcattcattcattcattattttttccacaatatttattgaggcaaataatattattcattattatatatgccaggcaatgtgctaagcactatagataaaaacatcatattttttccttgtgagtgtctctatcctggtcttatactaaaagagaaaattaggagaactcatctttttcagcttttattttcagttatcagatgctagagtgtatcctactatcagagctattaggacattcattaacttgtatttgtttcataggaactagcactgtgctcttggctgaaagagaacgggatacatctcctaatggctttaagaattgggacttcatgtctgttcacacatggggagagaaccctataggtacttggactttgagaattacagacatggtaagtgtgaatgagaggatgaaaaaacacaagcttacttttaaacattttgaagcacttttaaggttgatttcatcattaattagggccctaaagaattgtaccccttcttagtagaagtaagggaaaagtagagtgtttcaagccctgaccacttggttacgtagataatattcaaaaagaaagattaggcttcagccatactataagagggggaaaaacacttatataaacaatgtgacagactgtgggacaaatccaggtgttcccatgtctgcatgcagccagccatctaacctattcagccaacaaaatcaatcatattcacaaagatacttaaatgctcagaccaactttggtgtgacattctgccagagtcacatcttaaaggcatgcttatgattattctgcaatagctatttagatgtagcttaatgtttggagagatatcttatttaatatgacttttttaaacagttttagtcatgaaacaaaccgaaagcatttctcatttctttttcattctgtttactaacattctttgacatccttctgtaattttaacacacagtcacaaaaatgcaagtacagagcaaaagttagaaaaaagccaaatatagcttaattatttatttttgcatcatttctccaacattctctgtaggtgagaatataaatgaataatgttttggctctgagttcttctgtgacaaaagtgtaataaatatcagcagtgtagaattatacgcctaaataacttttttttttttttttgagacggagtcttgctctgtcacccaggctggagttgcagtggcacagtctcggctcactgcaacctctgcctcctgggttcaagcgcttctcctgcctcagcctcccgactagctggaattacaggtacccaccaccaagcctggctaatttttgtatttttagtagaaatggggtttcaccatgttggtcaggctggtctcgagctccttacctcaggtgatttacccacctcggcctcccaaagtggtgggattacaggtgtaagccaccacacccggcctagataactttttgaaaataaatcatttaaagttcttggagatgtcaattaaattaatacaaattctatagtcgtttgttacatttttttctctgaggatagctttctcctaaagactgctaaaattgtgatttagaaatggaagttgtaaaatgtccttctctcatagagcaaaaaaagaatgttcttagcatctgggcctgttcttgaatttggcctctattcttcaactcaatttcaccatcaggaaactaagaaaatctatttaccaaggtgggatttatttcatgtcaagtctgcaaaatctgaccttacacttctaaatttttaaagatattttagattttaacacattatttataattgttgagccttgaaaattatgactattcccccaaatatgcaactttttgtaactgaatttatagacctcttatttatttattttttgtcattgaactttatagacctcttttatttagttttttattatactttaagttctggagtacatgtacagagtgtgcaggtttgttacataggtatacacatgccatggtggtttgctgcacccatcaacccatcatctacattagatatttctcctaatgctatccctccccttgccccctactccctgacaggcccattgtgtgatgttcccctccctgtgcccatatgttcccactgttcaactcccacttatgagtgagaacattcagtgtttggttttctgttcctgtgttggtttgctgagaatgatggtttccagctttatccatgtccctgcagaggacatgaactcactcttttttatggctgcatagtattccacagtgcatatgtgccacacaatttttaagggcttattaatgctagaggttgtttataatactccatagaggctgacttttttcccagtggaatgtttctataagttgataattgggaaatatatttatagaaggtacagtcagctttccaagaacacatccaatatggaaaagaagacttacatagagatttctgatttttaaattaaatgtttgattatgaagcaatcagtttctaaactgttgaacctacaaattgtcaatttttatagcaagagtggatccaatggtttctttcacatgaaatgcacagaatcttaaaatgagattttaacaatgaaatcctttttagctattttgaatgagtttgttttatattatctaaaacacatactaaatgtaggtatgcttatttgttagtctggaagaattcaaaatgaaggaagaattgtgaactggaagctgattttgcacgggacctcttctcagccagagcatatgaagcagcctcgtgtgtacacgtcctacaacactgttcagaatgacagaagaggggtggagaagatggtggatccaggggaggtctgtgtggctctgttcttggcatgctctcttttgaactggggtagacaatgtagtcagtgaagctgtacccaacttccaagcaggaaataagtcaaacatggatggggaggataagaagtgatagtggtaaactattcttttccataggataaaactgtatttttttcattcaatattttatccagaacttagaaatcacaattaatgaattcaaaagtattaaatttcctaacatgaattttctccacttatgacagataacaaatggaaaaaaaagttatctttatgcccaatcacatatatctaacatttgtactgtactttgtttttaagcattttccacattgtctcattaacctataatccctataacctaggaaggatagacattcgtgtatccattttgcagaaagaaaaacaaggctcaaatggccaaatcatgtaggcttctttttattaattcattaactgacacttcttggcaacaccaaggggagcgatagatcacactttttctcaaaaaatttcagaggatagctaaaataagtcgttcacattcctgggtttcagcctgctatggctcctggcttccttctatcagatggtgagaaaagcccacattttctttatctctgtatcccagcatctagcacagtgcctcaggtgtaataggtaggttttcagaattttcagaacgccctgctctgaataggtccagctctgagctgggtgttttggaagatacagaggcaaagtacatattcaagaaacttacacatgaactgtgaaggcctcagcttgaattctagttccatttatattcttcaaagcagcttccctccaggacctgagtcctgagtacttttcttcacagtctgggaagcaggttaaccttgtcagtgttggaatattgaaacacttccacagcagttggccaaggttggcttctctgagctctccagctccctcctccccagcctagcacctcagtctctcccctgaccacttcttacagctcagtggctaaaagggtagttctgaaagccagtgcctccaggaaggcacacccatgctaccgcaaccagtgggtgccttctatatgacttgttagatattttgatatcctctgcttcccaaaatggattccatgacagcaggctgacaagtaaagaaaaccaccatgtactgagtacttacctatacagtctcatctagtcttcaaaaccaccacaaatggaggtactcttattccacctgacaggtgaagttgagggagattaaaaaggttgttaaaggtaccccagagggtaggcaaatgagggttgaagcccaagtccatgtggctcccagtcttgaactctctcccctcccctcattgcctctcaagcggcaggcagcgttcctgtggtagggttgcaactagcttgcctggccataaataatgaaccttcttccctttgtggatggcattctatgttttaggagcagcccacacaagagaaccctaaggagaacaccctggtgtccaaaagccccagcagcagcagcgtagggggccggagggatgagttggaggagggagccccttcccaggccatgctgcgactcctgcaaagtgctttcagtaaaaactcaccgccaaagcaatcaccaaagaagtccccaagtgcaaagctcaacatcccttatgaaaacttctacgaagccctggaaaagctgaacaaaccttcccagcttaaagactctgaagacagtctgtataatgactatgttgatgttttttataacactaaaccttacaagcacagagacgaccggctgcttcaagctctggtggacattctgaatgaggaaaattaaaataagtgtgtggtcccaagttggaaatattcatgcttcttccttaccctgcgattttgcctgtgtctgaagtggttgttttgtcatgaattcttatgcttataatatcctttgtggcaccttttctttttctccctaaactgtacatgtgaaggggatgagctcaagcaggaagttcaacttccagaattgatcataggtatttcaaaacacatctttcctgtctgcacaagtgaagtgttttgttctttctggagtcacagttgacaaaaagctcttacactacattagaacactgcattagagcccatttcaattctcaaaagaaaaggcaaaacctgggatatcaattaatttgaaaacataatctgcaaagaatgagaaggagtcagaaactgtttctgtagcttgttccctgtcttgtccatgtggttcttcaaattttgatgccaagaaagtatttggtaggcctaatgaaggagttcactgtaagactcattccctagatctttctattccaaagtgccactcattcctgtagtcaaaatctggtcatgttggtcaaaagctggattatttagatctagaaacagatcttgaaatctgaatgctctggtttgagcaattttcgaacattctttgcctggtgcactgtgtctgtggtgccagaggcgtccgtggatccagaggtggttatgactcgtgctgcatgcctggtctttcctctgtttctccttctgaaagttttctatacctgtctcctttctcagccacaaaataaatgttgggagaaatgatatataccactttcccagaaaaaaaaaaacttacacttgggacttggcaaattcctagtcacaatttttttcagcagtaacaggaaaccacttatcacatggagacctaatgtaataatagaaaaatactcataatagggagaaaccaagagaagttttgtttttgtttttttccaactgtgttcattagaacagcgtgttctaagtatttgaaactgaatgtttattccttgatactaaaagttcttctccaatcctatcactgatagtgtccaaattctcaccaaattgctcctaagcttcaaatcagaagcagaaactggcaggccatggaccttaattgtccctcaggtagattttgtttggtatgcagaatgtttttaaaatatgagtggttattgaaaatatgatgtttcacataaaacctcattctcggacccatctttgctcatggcaacagttagctggagctgagtagcagctgcctgattagatgactctcagtccccatggcaccctgctccatgttacctagagcaggcacttgattccttgctgggcagtatccaataggcatttgattttgcccactcctacactaagcgaatgtgtacaaagtgtaaatgcattaggaaaaacaaactacccgcatcttctgttaggcaggatctgtacaataataattatgagtttgcttatgtaatctcacctcacctggatgatcactaatactaattcatttattactaaccttctggcttccttctctcaatatgcttacaaagtctccagtcacctacaatgctggctttctcccactgagtttgctgtttgcaatttttccatgaagtttgaacttcataaggtaattcatggcattgaactggttcatgaaaagaacactagagtctgtcatttgctttggcttgaagtatggttggtaacacaaattttcacctgctcttctaccatttgaatttgtgtagagggtgtttgcagagcaatgcccgtaatgcttagagaatgttctcctaaaagacttgcggaatcactctgtccttggaagtttcatatattgtttgatatgaagtgttagatagaatttccaatattggagcatatcaaaaagtattaaaactaaaaaggaccagagaattcttagattggcccggaaaggccaataaagagttagaatgaaaactcattacttttccattcccaatctagtgctagatgtataaatctttcttttgattcttcctaacaaaatattttctgggttaaaaccccagccaactcattgggttgtagccaaaggttcactctcaagaagctttaatatttaaataaaatcatattgaatgtttccaacctggagtataatattcagatataaaacagttttgtcagtctttcttagtgcctgtgtggatttttgtgaaaatgtcaaagagaaaacttatatactatttcccttgaaattttaaactatattttctttacaggtatttataatataccaatgcttttatcaaacagaattttaaagagcataataaattatattaaagaaccaaaagttttcctgagaataagaaagtttcacccaataaaatatttttgaaaggcatgttcctctgtcaatgaaaaaaagtacatgtatgtgttgtgatattaaaagtgacatttgtctaatagcctaatacaacatgtagctgagtttaacatgtgtggtcttggtattcttaagggaacttccacattatacatttgatgtattgaccagaatatgtaaaatatgcttataaatcagaaaaataaattgtttctcactaagtcaaaagaaaaaaagctcatgtttccaccacaaa

SEQ ID NO: 255 - DNA, 32135 bp, Homo sapiens
  source 1..32135: mol_type = genomic DNA; note = NC_000002.12:73926827-73958961 DGUOK [organism=Homo sapiens] [GeneID=1716] [chromosome=2]
acggtgcgctggagcgagtgagcagcgatacctagggcggaagtgctctcggcggaagtgatcgctgtgtgaatcgtgggtgggatggccgcgggccgcctctttctaagtcggcttcgagcacccttcagttccatggccaagagcccactcgagggcgtttcctcctccagaggcctgcacgcggggcgcgggccccgaaggctctccatcgaaggcaacattggtaagggccggaaagcggctgccaagccttggcctccgccacgcaggcgacagaggctgggaaaggagctgggcccggaatggcctgcgtctgatgcggccggcctctttttctgggctgcgaggagagcctttcccctcgcaaagtgcactgtgtatctttgcctccttgtttttaggatatcgggcctcagtacccgcccacaggaacatatttgttggggcataaaagccacgcagttagtggataggacaagaattgtattagctgtttgtaatagatcgaaattgaagcgacaagcgggtgcagtttatttgttctcctagatagggttgccatatttagcagaaattaaaaataatatccagttaaaatagaatttaagataacgaataatttttagtgtgtgtccaatgcaatatttgggacatccttacagcaaaacaacaacgaaatcactcattgaaagttcaaatttaactgtgtcctgtattttatctggcaaccctattcgaagagagttcctaaatttcagtcgttcaaataccacattcacaatttttgccctgtgcctgtgctagttgcataataatttcttaaggcttttcttagaagaacctcactttttaaacttaaaaacatgtattaaattaaaaattattttgttaaaagagtgagatccagtatcttgaataaaaagtagtcagaaagcaaaatgaaggcaaagcatttcgatttaatattaataaattctgacttgatacttttatctaccaagtcactgagcccctaaaaggggcttagcaagtgttgagtactgaagacgtagcagcaaactgagaatttctttttttattcattcaacaaatcaccttttgagccacttccatatgccagcactgttcttggcctggagaatacagctgtgaatagaacaaataaaaatctctgctctcatggaactcaagtagggagagatggacaataaacaacataaattaagcaaggtgaacaatatgttagagagtaataagtatgatggagaaaaattagggatgaagaattgagggaagtttttattttattttatttgagatggagttttgctcttgttacccaggctggagtgcaatgacacgatctcgactcactgcaacctctgcctccctggttcaagcgattctcctgcctcagcctcccgaatagctgggattaggggcacccgccaccacacccagttaatttttgttttgttagtagagacagggtttcaccatgttggccaggctggtctcaaactcctaacctcaggtgatccgcctgcctcggcctcccaaagtgctgggattataggcgttagccactgcacctggccgaagttgtcattttaaataaaataagcaaggcctcactgagaaggtgacatctgagcaaaaaactgaagatgagggagcaaatcacgtggatacctgggagaagaatcttctaggcagagtgaagagcaattggaaaggccctgaggtggaaagtgtgttcggggaataggagggaaatcgttgtgactgaagtcgagtgagcaaggatgggagggaaattagggcaaaagcccaaggggtggccagattttataggccttatcatgggtttttaatcttaccgagatgggtagccattggaaggtttgaggagtcaagtgacagttttacttagattataaaaagatcactgtggctgataacattgaaagtgaagagtgttaagtggtattgcaataattatagtattgtgaaaagtgaaagtggtgagacgtgattggattctagttatacgttaacaaaaattgagttacattttaagtaaaatttaacagtggaagtggtgagaaatgattgggttctagttatattttaagatagggccaattggatttggtgacaggttgaatgcagagtgtaaggtaaagagaggggccaatgatgactccaattattttgacttgagtacttgaaagatagactcctgattttcttttatttcctcctctccttcttcctcccctcccctcgcttcccctcctttggtgtggtcttgccctgttgccaggctagaatacagtgatgcaattgcatctcactgcagcctgcctcccaggctcaagccatcctcccaccttagcctcttgagtagctggatccacaggtgtttgccactatgcgtggctaattttgtatattttttgtagagacagggtctcactatattttccaggctggtcttgatctcctgggctcaattgatcctcctgccttggcttcccaaagtgctgggattacagaagtgagccttggttttaagcatgttaggtttttacatgcctattaatatccaagtagaggtgttgaataggtaattggatatgtaagttcagaattagggtctccccggactggagctgtaaatgtaggtggtatttaatgccagagactatgtgttgatggaaaggactgagccctgagcatgcaaatattatgaaactggggagatgggaaggaataagcagagactgagaaggaatgcctactgaggtaggagaaaaaaacaaaagagaatgatatcctggaagccaagtgaagaaggtattcagtgggagggaatgatcagctgtgttatactgtttaagtaaatgaaggtctttggtgaacttgaaaagaacagttttaggagtgttaggagtgaaagcctaattggtataggttcaaggagaatgggaggtgaggagagtgggttaagataactggaagtttttagaaagggaagtcatggggtggtagctgaaattagaagagggtgtgagtgtttaacatttttaattttctttttgtgaaaagaattagagcatgtttttaagttgacagaagtggtctagtggaaaggaggaaaattggtaaatcgggacagaggatagaattgctggagtgatttttaagcaagaaagaatggaatctattgcccagtgggaaataatttagtcttagctaggagcacaattcatccctagtaacaggcgtgatggcaaaatatatgagcaccaacttcagagggtgtggtgggaacttgggaaggtcttttggttgtgtctgttttcagagtgaagtaggaagaaaggtcatcagctaagagtgaatgtagagacagaagacatgaaatactctagtgaataagcaagagaaatgttgaattactgggtaccatttaggacccacttggagttagtggtcatgaatttaaagtgagaccagtcaccatggctgtgtgtttttctccagccaaatccgaaacattgaaaggaatgggaagggagagtcctgctatttgcctgatgatgttattatttaaatatgatgttttgtactgtactttgagaaacacacccctaaaggaagctctgtcctcaaatcccagagagagaacagggtatgtcacaaagtaagtacttaggacaggtcatcagataaggtttgaactccctctattttcctgacttttgcttcttaaccttgtcaaatttctctgcttcttccttgctttcttgtgcaacagaggcttactgagtgaggactaagagtccactctcatgctgagcacagcagtgaatgggatacagctcctgtccttcaaggagctcacaactcacaactaagtaggagaaaacagattcgacataattttctttttttttttctttttttttttttttttttgagacagagtcttgctctggcacccaggctgcagtgcagtggtgtgatcttggctcactgcagcctccgcctcccaggttcacgccattctcctgcctcaggctcccaagtagctgggactacaggcgcccgccaccatgcccagctaatttcttgtattttttagtagagacggggtttcaccatgttagccaggatggtctcaatctcctgacctcgtgatccgccagcttcggcctcccaaagtgctgggattataggcgttagccaccgtgcctggccgactcgacataattttcatactgtgtggtgagatttgtgattgggcatggaaagccagaatctctggggtaggaattcccaagaggaagaagagggaaaagtgtttcagccatagaaagcaacatgtgccaaggtggtgaagcctgaagaaacacatgcagttttttgggggtttttttgtttgtttgtttgtttttttgatggagtctcattctgtcacccaggctggagtgcagtggtgtgatctcatctcactgcaacctccgcttcccaggttcaagtgattctcctgtctcagcctcccaagtagctgagactacaggcatgtgccaccacgcctagctaacacatgcagttttaatgaaagagaagtagttggatgtgcctggagttgaagggacctgtgaaagggtggcagaacaagaggttggaagggtgggatttgccatatgtcgaagagccttgtggaccatgctagtttatcctgttggcagtgggaggctgttgaacacttgaagccagtgtgtgccatgaccagattaatttaaaaaaggaaattgtgtaggatgagaaagaaagctccataaaacaggcactttctttgtatattttgtttgctgcagtacccatagtgccttgcatccagtttgttggatgaatgaatagatgaattggaacagagttgagtctgtgcactagttttgtggctattggagtaattggagggaggaaagatgcaggcctgaatagaagaactgaaatgacagagaagtgacggtttcagagagattttggaagcgggattgacaggatgtggtggccacttggaggtgaggtaggaggaggagtagaggagggtgacactgaggttcatgaggatgggaataaaggaagaggcggtctggggaggttagagtgatatgttttgtatgaggtgcctgtgagacatagaggtgttctgagacagattggaatatgtgcctgaggtcaagagagtccggagatgggtgctgagatttcagatgtggaagttgttgactggtgggtagaggggtagttggtgaagccttggaagtaaatgcaattgcccaagaaaagggtgatgcgaagtggaatgggaggacctaatctgactctttttactttcatctcccactactcttcatcaccccacacaccctgatgactctccctagacagaattagtcactgcctcctctgtgggctgacataacattttgtacccacaactgctgcagcacttgagttctgctgagcttgtttgcacattcaccaccttccttgggctctgaccactcagtgtgctgttcatctttgtattgctgacacctaacccccgccttgacccagtgtactcagtactgaccagattcttgaatcctgtgctatgatatccatgtggaagttaggcattggtacccacacagggaatgtattaaactgctttttaaatcaagagtgatcatcttctctaatcacaggtaacatcctcaagcaaatcagaatgagagcacccattcaggaaacctgaacagggaaggtgaacccctgtcctgaccaaaattgggtatgtttagagggcttttcttgtattccttctgctctaagtcctattattctgatcctgaaggtgcagacagcggcatgtaaggaaaattgatcagtgaagtagcaactaatggcatctagcatgacttacgaagccatataagatgtgtgattgaaagtcaaaagcttggtacctagaacccctgaaaatctaaaaaataaaacacctagcctgtcttttaagactgttcatccctacagtgtattatcatcttcttgtgattatcttacgattacaagcgtaaattgaagaaaagattgctgtatgaaatctcactgtcagtgagtcatctcagcatttttaccttattttcaaagacccaaccagaaaagaggaaactcttttgcacttttcaatcaagaaacttaaacataaagcagtagagggcttccctaataacatgtttcctccagcattcaaaattagtgacttcacatcactaatatgtgtcttacttattttaagtataaatgattgggcaaagaatccttgggaaaaaatagcctatttatttcaaatactgtatagtggattctctgtgcctgtgactcacctccttccctccatcactgttctcatactcaggatgcaaaggttcagtctctgtcttcaaaagtgagctcccagtctagctggagggagtgatgagtgaacaaataattacagcgtaatcctttggtaaaccagagcaggcagtaattaactctgcctagagatgaagtggcgctggagagagttcaaggaggcttcacagagaaggtggcagtggaaagctgaatcacctggtaggcaaggcgggaggaggggatgtcagatcagtgagggtcttttgtgctgagcagatgagtttggatcataggaaggtgtgagaaaattttttgccttttttttttcgtaaacagtttttcatgaaaaaaggtcatcaaagtaaaatgtattaagttttttttaagcctgctgactgatttttattaactttgcctagaatgcctttaagcttggagcctgtatgatcctgggtactcagtcttggggttggaatataacttgagggcaagctctcagcctagatcatcatttcagttatagtacttacctctgagtagctactccataaacatttgttgattgaatgagtgagtgaatgaatgcagcatcaaatacagtatctgaaataaagacttcaattttttttggaaggactttttaaaaaagacattagacagttttatatgttctgactttgttggattttggtaaaagatttcagaattggattttttttctcatgtttttcatcttgttcaggagatgaaaatgcctagaggtgataaatataggctcctatgaaatacagctgtattagacgtaaaataatgggatctgttattttgggtattacatcatatgctatcttgctgctagattttagcattacatagctatggtaggcattgtcagtttatagaaaattttgtggggagaaaaaaacatgccttagaaaaagatgagtggtaacaacagaactctttgtcccagcttgtggaatgagaatagtggagctaatgaaaatcaacatgttgaagtaatatactcttaagaaagtaccttccacctttttttaaggttgtggcaatataacaacagagaacactggtggccagggtcctaagggaaggtttgatgctgcttgtaagttctgataccttccaaaattcataatactgagagtatattgaaagacaggccgggcgatgtggctaacccctgtcatcccagcactttgggaggctgaggcgggcagatcacctgaggtcaggagttcaagaccagcctggccaacatggcgaaaccctgtctctactaaaaatacaaaaattagtcaggtgtggtggcacgtgcttatagtcccagttactcgggaggctgagaggctggagaatcagttgaacccgggagttggaagttgcagtgagccgagatcaccccactgcactccagcctgggcaatagagcaagactctgtctcaaaaaaaaaaaaaaaggaaagaaagataacagcagtggcccggcgcagtggctcacgcctgtaatcccaacactttgggagaccaaggcaggtggatcgcttgaactcaggagtttgagaccaacctgggcaacatggtgaaaccctgtatctgccaaaaatacaaaaattagccgggcgtggtggcacacacctgtagtggtcccagctactcaagaggctgaggcaggagaatcgcttgaacccaggaaacagaggttgcagtgagccgagattgtgccactgcactccagcctgggcaacagctagactctgtctcaaaaataaataaataaacaaacaatatattggacaggtcaaacatactggacagctactcaggaggctgaggtgagaagatcacctgagcccaggaggcagaggttgctgtgagccaagatcacaccactgcactccagcctgggtgacagagagagacccccatctcaaaaggaaagatagcagctaagctgggatctaactaaattgcagtaagtctgagatagtgatatcataagagattggctgaagaagtatggctttctgtagacaggggtgttctggtcactaggaggaggcttctgaagcaatggagagcaaaacaccaccactcttaggaaccccctgtgaacatcttgaaacatttgtcaaaacaaacaaacaaacaacaccccagcaagaagggaaaaaaaaaatctatgatgatcaggtatcacagcactgagaaagttatactgtgtctggctttaataaaaccatgtaactttgaattattttttaaagtaattattccacatctgtgggtggtacctggcacagctcagttccagtggaattagtttaagaaatactgccctgtagtgaattacccaggctctccaaggctgagaaacatggatggcacagctctcaggacatttcaccaccatttactgtcattgtatgctgaagctgccttgtgattactaaactagctttccagaagccttggaatggggcatgggttacagagtaccctgagtattaggtgttattgttccagtcattggaactgtatatttcctgttacatctaatttgttggcattctagaattaatgtgtttaaattgcatgagtcaatttcttggagtcctgactgctcttagatgaactaatagtgtctgacctcagagcccttcctttccatctgcaacagttttttaaggtaattgtttttaacttttaaaaaatataagtaattctaacaattgttcaatcccagccatctaacaaatcagctacgtttatcttttcatttaattaaaatagctttttagctattaaatagcagggaccatattttagacttgttaaacaacctacaatctaaatattgaccatctgggccaaatattttaagcgagggcttactcagggcagacaggtatctgataatatacacattcaaccacttcgcacctgaccagtgtggtaggaattcagagctagagaagtcctgaagaagtggcaccttaggcttgctgggggaaaggatttagacacaggcctggaagagcaggggagggcatttattcattggagtgtgggaagagcagggatcgaacagatgtgaagaagcacacacaagttaggtggaggtggggactgagagatgagcgtgactgtacaaatccacagattcatgctgtttgttcttatcctgcctattcagagaggagttggggtggcatgtagtaaatgtcatctattaaatgtgtgggttcttatgctgagacatcagcaccccaatcagtaaccataagtggaaggatgccccccttctttcccttgagaaagattacttctgatagaggagattgaggtccagatacagtcttaagatttattttttatttttcacaaatgtaggtttcagagggaactgaaattagtaatatattgtgtattttattcattcagctaggtcattaggttgtaatttgttttctaccctggaggagccccatcctgtagctggagaaacacaatgacaattgcagtgatggagtctcacccagaataccaaccatgcagaaaggaggactagctaatccagcttagaggtgtcaggatctggaaaggcttcacacaggaggttcatctaaacagaaccttgaggattgagtaagagttggtcaggtgaggagaggaggcgcttcaggaaatgggaaagcatatgcaaagtcatatttgcaagagaacatggcatgattggagtttggtcctgcaggagggtaggctacctaaaggaaagccaaggccagagaggcatacacagggatcagatcttcttgtgtcttgcagaccatgttaaagagtttggagtttgtcatgaagcttgttcaggtcttagctcagatgtcactaacttcccattgcacttagaatagaattcagacctcttaccatggccacaaggccctatgtgatctggccccggactgcccatgtggccacacccatcttgagccactcctccattgcttgcccttgctatagccagttagccgatagagagctgtcaaaagattgtaagcagtgttatttcatattcagtctggccacagtatggagcatggattgaagagagcaaggccagcatcagaaaggcaagagatgataagaggctggtcttgagcatggaggtgggaatggagagaaaaggacaaatatgaaaaatgtagaagcaaatgcagaaggatttggtggccactgaggtttggcagaggagggacttctgtcagtgagtggatggtgtgttcataccctgaggtctgggatacaggaggaagctcaatttggtgggaaagatgattagttcatttaggaaatatgttgactttgaggtgtttgtggaatgtcccaagtggagatgtctggagagttcttgaatagtctctggagctcatggaggtatgggccaaacattggtataaatgggaaaagataacttgaatgttgtggtactaggttgatttcatctccaaaatatttctcgaaacaaccactacttttcactcctctgccatcacctcggggcaagctgctatatcttttaactagtctgcctgcttctgcttcagcccattcttacacagctagtggagtgatcttctaaaaatgagaaggagtcttataattttcctacttaaaaccaatcttcactaacttcccattgcccttagaatagaattcagtcttcttaccataactacaaagccctgtatgacctggccctggactccctgtctggccacacccatgttgagccacttctccatcacttgctcatgctgtagccatactgtatggcttcttctagggcctcaaacttctgtattgttgtgtgtcaagttctttctctctttcaggtctttgcatatgctactccctttgcatgaattgtcatcttttaggtcttacctcagatgtcattttttcaagggagtctcctctgacctcctgggctatattagtgccatcctgcattttttcctagcacctaacacaatatgttagtagttaattgtgcgtttgtatcacccatacaagctctgtgacgacaaaatccattctgtgttttgtttaccattgtacccacagttcctgacagtcctgagctcatagtcagcactccatgaatattttttagatttgttgaatgaatgagattataatcatttttattttttgtcttgaaaaacttagaaattttacactgtcacagtacaaatagaatggtgactcaagtgatagaacttatggagctgatttcatctacttttacattttcaactgttattaaatgctctgcctctggaaggttgagacatggaaattgcaaattaaatcttaaaaggaatttttcctccctattggctgtattcattatggtggttctggttagcatgaattgatctgttatcagtctgacaatggtacggctgctgagtttgaaattcagaaaactaatacttgttcccttgagtttgggcgtttgtggcagagtttagtagcagccttctccttcagccctgatttgggaagcatcccaatacatgctatttgcattgcagctgtgggaaagtccacgtttgtgaagttactcacgaaaacttacccagaatggcacgtagctacagaacctgtagcaacatggcagaatatccaggctgctggcacccaaaaagtaagtttttagttgtggtgggtagttggcaggcatgggtgaataatctaattgtcataatttaatttactctcagtgagtaaagtagcccagtttgagtatcctttttaaaatagcttcattccagaaagcagaccacatacaccagagaggatatgacttgtttgaatatgtgcagttttgatttttgtggtttttatatgtctatctaagtgactgcctctgttgtttgtggtttcccaaagcatgtccaaccatcatggatggctttgaagatgaattttgtcattcctacacttaagtatttatattattacttaagctaaccactaggattaatagctaattatagtgattttaactttttaaataaagtcttagaaattagaagggatattagagaggttccagtcacactttgagtcaatgggagaggttacagctaacatttatgagcatgtactatgtgccaggcactgtactatgccaagcacagtacatttcacttacacctcatggcttaggccctggtgtcaagactatggctttggcagaggccatagagttggtttccagccacatcagtctgagtaaggaaagacttgtttcgacatgacccttagagggagcagaagcaccatgcctcctcaggcaccatgaactgctcctgccgccacctgggatattcactgagtggcacattctggttcttaactctaattactaaacagttctgccttttaatgagccatgttgcacccctgtgactctgactcattggttcaagttctacctcttaagtcttttaacttttcgccgtaacaaccctatatatagttgaaggtaatgattttcctgttctttctccccctcaagtctctctccttttttttttttttttgacagtctcattctgtcacccaggctggggtgcaatggtgtgatctcggcccactgtaacctccaactcctgggttcaagtgattctcatgcctcagcctcctgagtagctgggactatgggtgcatgccaccatgctgggatactttttgtatctttagtagagacagggtttcgccatgttggccaggctggtctcaaactcctgggctcaagtgatccacccaccttggcctccaaagtgctgggattataggcatgagccaccatgcctggtcaagtcttctctctttcaagccaaacacctccagttttcctccaggctattctttactctgaagtaactttacctaagtgatgagtcctagtttgttcactttccactttgaatttactaagagtgctacttggaggtgaacaggacattctggatgtagtctaagtgggacagagtatcatggaacttgttctgggtgccatttttttttattccaacccagaattgtgttaccttttgtggctggcatatcatgcctattgaggatttttgctgcttaagttgtctctttatatgtctgtatgtgtgcctgtgtgtgtatttgtgaaattaactttcctatgcaggaataaattacatatctttttctgagtatgccacaggtcacctgtgtgtatttcaaaatacagtcatgggctgcataatgatgtttctgtcaatgatagaccttgtatacaatggtggccccataagattataacaacatatttttactgtaccttttctatgtttagatacacaaatacttaccattgtgttacagttgcctacagtattcaatacagtagcatgcgatacagctttgtagcctaggagcaatagggtgtgtcatatagcataggtgtgtagcaggctatcccatctaggtttgtgtgagtacattttctgatggtcacacagtgacaaaattgtctaacgacacatttctcagaacatattcctgttgttaagtggtacatgattgcatgtccacaattgtttgatattcctcccttctagaagtagagcgtaattcttgccttgaatgcagctggactttgtgatttgtttctagtaaatagaaagtagcaaaaataagaaatacctttctagggtaggtcataagagacactgtagcttccatcttgttctgggggaagccagctgccatgtcaggaagcagccttttcaagggggccacacggaaggaactgaggcctcctgtgaacaggtacgtgagtctttttggaattggatctttcagccacagtccagccttcatacaactgtagcctcagccaacatcttgactgaaacttcatgagaaaccctgaggcccagccacccagctaagctccttcccaaattccttccccatagaaactgagataatgaatgtttttgtttaagccactgaattctggcataatttgttaggcagcaatagataactaatcatcctgtaatcccattattcagaagtaaaatggacatttttctacagagaaaatgtatagatttacatatacttacataaatgtataaaatatatatacatttgctttttgaaacaaaaattttgattgccacctgtatgtcacttaatagacaagatctccctttcacagtgatatcattttaatggttgtagtgtactgcataatatgaatattatcatttagttatccagtcctctattttgaatgtttagttttctaatttcttcctattataagcagtgttgcaatgatgaatatcattgtagctatactgcttgttttttaatataaagccatgttttgtgtatctttttgttctttagtgaattgcctgtccaaaccccttgccttgtttttttctattgagatcttcatctttgtgtaatggcttcataaaaactcattgtatgttaagtatattaactctgtcatatatttgtttgtcattttctttttttttttttttttgaaacggggtctcgccttgtcgcccaggctggagtccagtggtgtgatcttggctcagtgcaacctctgccttccgagttcaagcagttctccctgcctcagcctcctgagtagctgggattacaggtgcctgccaccacacccagctaattattgaatatttagtagagatggggtttcaccatgttggccaggctggtctggaactcctgacctcaggtaatccacctgaattggcctcccaaagtgctgagattacaggcgtgagccactgcgcccgaccatgtcatttttcttttatcttggtatataatatatttttacaatataatacatttcagtttttatgtagtctaacctgtccttctttttcctcatagttagcacctttgatgttaaaattgtagcccaggagtataaaaataatctatttctttttgttgcttttatggttttatgttttatgtggctttacaagttataagactttagttttttcacaaatggttatctacttagccagtagtattcttgtttattcctgagcagaatatatattttgtttttattgtgactgagatcttttttccacatcatcttctgaaactggttattgctgttttaatggaaaacagttgattgttatatttatcttatatgatttaatttctcattatttttttatttgcttgaagttttggaaaataatagttgtctctaaatagtaatcatttgaaagagttttctaatatctgtgccacatttctattttcttgttttctttcattgggtagaacttccagagcaatataaactaatagcagtgagggtagtttccttatcttgttctgtcattaatgaaactgcctctaatatatcagtgttaagtttaatgtttattattcatttcagtagaccgtgtggtacacgtacccttttgttactagaatagtaactgtttttatcatgatcaaatgttgaatttccatcaaaaaccactttagcatctagtgagataaacaaggggtttttctttttaatctcttagtattagtcatagatttaataatggtaccatcctcacatttctagaatgaacttttttttggtcatgatgtactattccattaatttggtaatgtgttgtttggaattttgcatgtatatttatttatacagttggttggtattattatttgtgtgtatggtgatttttgtttgttttgacttttgggttctttttaggcagggtcttcctctgtcacccaggctggagtgtagtggcatgatcatagctcactgcagccttgaagtcctggactcaggtatcttcccacctcagtctcttggtgagttgggactataggtgcataccactgtccccatctacttaaaaatttttttttttttttttttgtagagatagggtctcactttgctgcccaggctggtctcgaactcctgggctcaagcgacccttccacctcggactcccaaggtgttgggaccacagatgtgagctgtgatgcctggcccatgtgtagtttgtgacaggttttaccatcaatgttatgaaaataaatggagaaattttgcatcttttctagcatagaaatgatctattccttgaaggtatgatagaaatcatctttaagattatatggattcagtactgtttgaggggaatcattattggacaactgttttctgcctcagttattcaggtttttttttttttttaagatggagttttgctcctgttgcccaggccagagtgcaatggcacgatctcagctcattgtaacctccgcctcccaggttcaagcgattctcctgcctcagcctcccaagtagttgggattacaggcataccaccatgcccggctaattttgtatttttagtagagacaggctttcaccatgttggccagactggtctcgaattcctaacctcaggcgattcacccactttggcctcccaaagtgccgggattacaggcatgagccaccatgtccagcccctagggagaatttcttaagctgatactcttttctttttctttaaagagtctcactctgtcacccaggctggaatgcagtggccctattatagctcactgcagcattgcttctcagccttttggctaagatcaagtgtatagctcactgtagcactgaactcctgggttcaagcaaatcctcccacctcagccaccagagtagctgggactacaggcatgcaccactatgcccaggtaacttttaaatttttttgtggagacagagtctcactatgttgcccaagttagtcttgaactcttggcctcaagcaatcctcctgccttggcctcccaaagtgcttgggttataggtgtgagcccccatacctagcccttaaactgatactctgtaaggatcttctaattcactaattaggtttactgcattatacagtctgctagctaccatcttcattatcttcattgggtgttttacttgggcaattgcatttttcacctctaagaaagttattttcttattgttccttttttatgatagcttattcttgttttatcagcaaggccgtatcttttgttttctcctgtttctgacaacagccctgtctgagcacagagactagtcctctccttttgaattgctaagtatttttgtgtccaattattgttcatctgtttgcttatatttttggaaggatgtttgcatttgttctgtagctgagatgggttctttcagaaattgtgttggtttcttttacatttttggttccagaagagtctctctttgatagcccaaagcccactggtgcaatagaacccaccagtcaacctattgcatctgccagcacagcactccgctccacatacagtgtgtgaattgtgcaacaggcccagggctgctcccaaccatctctagtgacaccacagagactacaggagacacaaatttgtcctcctacttctacctccagctcttagtcaggggccacgtgtgaggctggtatgtgtgggcttgcggggtcagaaggagggaaatcccgaaaatacctctgagttaaatgcttttctggtccactctgctctatatgtgttgtttctgctgaagcctttcaaagggctaagacccttctttggaatctaatagtgctattttgccaaattggacttcttactgttgttgaatcttttttctccttctgtcctgttgtctctacctgaagtacaatcttcttaatctccatttccatctgtgagaattctactcatcagttacttcccagcttaatgccactttctttcagaaactccctgagattccttccaccatcagtaatcgtcccttcatcacatgttctgccttacattccagcttcgtacatcctcatcaccctcttcctttttgcactgtgagctctttgagttcaggaactgtcttgttcacctttagatggagggtgttggaatgatgaggttagaggaagccaggtttgagtcccttcaacatttactcgccatgaaaccttgcacaagtaagttacttaacctctgagtggattttcccctctggaaaatgggcattacaacagtacctacctcatgaagctgttttgaagattaattgaggtaacataccacagtaaaggttgaaataaatgttaattcctttttctatacccttacggtaccctgcccatgtagcgcctcatccacacaggccttcagtgattggtgattgaataaaaaatacagatccaaagtgcttttgtacaaaattcacttttgcattgttgagtcaatggcagatccagaaaagaatctggggctgggcgtggtggctcacgcctgtaattccagcactttgggaggacaggagttcgagaccagcctggccaacatggtgaaaccctgtctctactaaaaatacaaaaattagcttgtcgtggtggcgggtgcctgtgatcccagccactcaggaggctgaggcaggagaatcacttgaactcggctggggtggggaggagggcggaggttgcagtgagccgggaggttgcagtgagctgagatcgtgccactgcactccagcctgggtggcagagtgagactctgtctcaaaaaaaaaaaaaaaaaatccggggctgctgaacatcccacacttgtgcccacttgcacatgccgagtaagtggaacgttttaattatgtttcataaagtctctagaattaagtagggttttgttttaacaaacaaattgtactccttatatgaaagataaaattctatttggtggttgattggttggattttcaaataagcagttgctttctggtttgccttgacattttataaacataactacagatggaagctcaaaagagaggcaacatagtgttatagtggaaagatttgattcagagttaaattttagatggttgttgactgttaactcctccccagacagacttcacaaatccctcaatcagtgatcgtgttaattctatatatggttcttcctctgcttttgttatattgaagtggcatgtcatctccctttagagagtcttatttaataggtaggaaaatctcatacctgattatgaaattttgactaagctggggatctgattctacctttttggtggaaggaaacttttgtaatttcttctttcattgattattaaacctgtttggggaggtaggggtgtgtgtggaggggtgtaccccatggagtaaatatgctttctaggaaattttcttctttttttcatctccctctaggcctgcactgcccaaagtcttggaaacttgctggatatgatgtaccgggagccagcacgatggtcctacacattccagacattttcctttttgagccgcctgaaagtacagctggagcccttccctgagaaactcttacaggccaggaagccagtacagatctttgagaggtctgtgtacagtgacaggtaaaatgccaagccctccaccagtcacaagccccatgctcagtgctgcctgtttgatcttgcacagatcctgcactgctatggtcactgatgattataatttgaaaaattatcttcttttttaaagacaacactatacagatttgtccagagttgtacttctaccagattgtcatctatgtcaagaaaggaaattgggtttttcatcaactgaatgctttgaatttcttacattgctactgattaccttatgtttccttattttctggcatggagcaagctggtagccacctaatgtaaccatcacatgctaaaaggcacataatagacacttaagtagcagtgtatattctaagaaatcagatgattcagtggttgattatcccctttaagaaaaaagcagacgaaattaaaatttgtgttcctgaaaatgatataagagatattttcagccttttttttttattgttcaagaaaggatgcttaggcagaaatagcacatctgagaaactggcttctgtctcagatttagccctttttgaccccttcttctgtgagagggctttttgctggccagagtctagtggacatcagtgcctgtgtcagatcagggatgggcatcatcctgaccacctgagggagtgagatgtgaagtcactttgaatgcaagctagcagcaccctgggaagtgagcccatctgctccagaagagctaggccgtgcaggctccggaatgcctggctctgctgcagagaccaggctgtgacttgaggttaagccgcctagagacaaagtcaggatggcttgatctggacactgctggagtttttcttatctgaagcctatgaatgaccagtgtcagtgtgaaatagtgctttcaagcaaaacgatctttcttaaggctctttgaattatcaaaatgggaagtggtacattttcattgtcactgctgaagacactcagttggttactcttttaattccaaattagacaaactagttctatttcttagtgcttccggaaagcctcctagaagaaaaaaaataaggatacatttgtaaatgacaagtgatttttctgactttaccctaaaatcatggaagatatgtaaaacaaaccctataggctatccgttccttgtgtacgtaccccgagagagcctactttttataaaagctaaatatgtgaattacaaatggctgggctataggttttacttctttttcagctgttggatatcccacctgcctgttttcctctcttctctcccaagccatgcctctcggactccgaagttgaattacatataaccacatgggttgtttggaaacatagtcagtctttatttctagccgcttcatgaagtaggtgtgtgagaccctcagaggaaaatagagaagtagaaacactttgttaattagaaatgcattaagaagctgcatggatcttaacctttgcttgtaaaggaagaggtaataattgattacactgtgggcatacaacattccaggtgctatcttcagtgagggcattttcgagacagaaaggaaaactaatcacaagttctaatcccgagggtaatttagactttgttcacttgcacagatttattggatgcctcctgtgttgaagcaccaaggctggccctggggctgcagcagtgaataaggcagacccagtccctgcctaacagggactgaacacatgctcacgtgtgtgatatttgttccaaaggaggaacacaggttatctgggagagttgattatagcgaggaagaaatcttagtcttttctgtttgagttaaaggaaacattagcatatggttttagagcagaggccctgactcctagatccttatgccctgttctgtcctgcagcccctgcattcagtctgcagtacttccctcccactcagcaccacacccttctgcccctcaccccatcaccaccacaagctttgaagaaataaaggaagtgctctttctcaagaaagccaagaacccctttcatagggcttattagcaaatctttaatttctctttataagatccttttttgttttaagacagagtctcgctctgtcgcccaggctggagtgcagtggtgtaatcttggctcactgcaacctccgcctcctgggttcaagcaattcttgtgcctcagtctcctgagtagctgggattacagggacacgccatcatgcctggctaatttttgtgtttttagtagaaacggggtttcaccatgttggccaggctggtctcaaactcctggcctcaggtgatccgtccgcctcagcctccaaaagtgctgggattacaggtgtgagccacagtgcgtggccactttataggatcttaatttcatcttctagttatctgtaaagaactcaaaaacattttgagtttaaaatgttacccttttatttgttctcatcaactagactatggctaaaccattccagactgggaaagtttacttgtggagtttctaagttagcttcttcatagcctaacaaaaagcagttataataataactaagatatctagaagactatgtgccagtcactcttctaagcactttgtgaggattattacaagacatcatcataacaggctgagaggatttaggtgacttgcctgaagttacatagctagtgaatgtttcagccagtatcagaccctgaaatgttattctggaaggtattctctcagtggtgacactcacagccttgcagtctgtactttcctgagccatcatacacaagggttctgaattttattttctccaaagtggccagttgctgagcattgccttggaaactggagtcccttgcttaggatgcaaattgtgttttttattaaaatgcctgaggtttgaaagcaggattgacccctggtttgtctgaagccatggtttatgtttagctctgatttcctgtttaccagatgctcttttggttgtagaaataagcagggggcaaagctggtttgatttttagctttagctttcttttatctgaactagaaactcagcagcagaggaagcaagcaagcaggagctcataatgcattttgcaggagagtctgctttcttagtaatactgaaattagtaggaaatgcattttctgctccatagaggacaccacataaatactatttcttctgcatgtctcagctaaacaaaaggatggctcagtagcctggagacttagaagccctcagtccttgtatgaaatttagtgggtggatttatactggattcacttgtttatttgttttgggccttgctataataataataaggaaatctcaaaagttcaagtttacatatatttgctgtatgttctgactggtttctagcagagaaaattgttagggaccaatgatactatcttctgtctcttttcttccagtgaatcaatccatctggaaaggtgtgatttcagcctccaaagtctagatcctatttcccatcttagtactgagcagggagggagatatgggttaagaattcagatttcttaaggattgatgaggagctagaaaggttaagtggtttgaacagacatggaacaagttggttattgatttttctgcttctctctctctctcgtgcctttcattccatttcccattctcctgccctccccattcccatcccacttccaaccaggtatatctttgcaaagaatctttttgaaaatggttccctcagtgacatcgagtggcatatctatcaggactggcattcttttctcctgtgggagtttgccagccggatcacattacatggcttcatctacctccaggcttctccccaggtaacactgaacctacaaccttagactttagggccatatgaaacctaagaagtgacattctccaagcccctgattttctggttggagagattagagcgtagacattacctgcagcacagagagcagtgggggacaccctcctgtcccagcgttgagcaccctgttccccactggcttcgtgtagcagagtgctaaagccattgactatgcataaaaggattgctgttgatgtaggaacaacagagcaaatcgagtgtcatctttatgatgacgcttagggtttgcaggtgggacgctctgacctgtagccacttgcctcagctcctcctttactctgactgggtcatcagagtgtgtagtctcagtggtttccttagtaagatgtgaggaggaagaggagaattttctcacctcatcatgatactgccctaatttatagcccttttttgaactgtgatgccattgggaaggcaggatggactatagcagttccattctgtgactctctggctggtgccatcctacatgaagtaggatgatgtcacggcaggagcaccagagtctctggagatagaagtgagctgtggcttctgctgactggtagtgaccttgggcagcccctggagacctttccactggagagatccttgcctgtaaaatccactggttcaatctagacgatctctaagggctcttctggagtgggattctgagtcaaggtgagttttttttttttagagatgtactgctctcagcttttgagatatacatccaatatatagtcaaatgccagatataccacatactgttagaaggaaggaaagctgtctccaagctagaggctatgctttttagagatggaactgagacttgtgggcagaaaggagccgagaacagactgagcagaaccagaggatgagtgggagagctcccatcacagagcctcacaccagccaacgaggagaggactggaaggaagggtcttgccttaagaaggtggcaaccaggaaaaaaggcccttgaatgtgactggggccagatattggggatctttgtgttgagagtttctggacattttgaggcaaaagctagatcgtacgagggaataagagattctacagaaataaataagggttaaagtttaaaatgaaactgggctggtgcagtggctcatgcctacaatcccagcactttgggaggctggcgtgggaggatcacttgaggccaggagttcaagaccagcataggcgatatagtgcgactccatttctacaaaaaagtttaaaaattagctgagtgtggttatgtgtgcctgtggttttagctattggggaggtgagacaggaggatcacctaagtccaggagctcgaggctacagtgagctgtgatcgtgccactatactccagcccaggtgacagcgtgagaacttgtttctaaaataaaataaaactgaactaaagattcagtgaggccagagggctaataatcttccatggaaagaaccacactaaagttagatgcattgattgcaagttgacaaggtgggtcatgtttatgtgacttctttcaatagtcttcattgcctgagagccagaatagaagaaggggattatactttaggggtagagattagtgtcagcgattgtggggagaggagtcccctctcaaagaggacagtttgaagtgtcaaagtgtagggttcaagttgggagagaagtcctgagccccaggaaggcttgtggcctgggccaaagaggagtgagagtgctgtgaggttggattgagtaaagatcctggttggaatttgaagaagtgacaggtttcctatgggagtcttgggatggctggactgaaagaagcaggaggttctcaggacgagctgagcattaggagaagtgagaatgctgacttaaccttttccaagagaacagcacattcagctcagtgccatgaagccagcattggggaggagtgagagaggaagtgggctgactcattcctgggagtaaaatggggctacttgggccagctgaagaggctcttgtttctggggagtggaagttggacccagcaaggagaacaagaaagtcttaattgcttttcttctttgtgcactctgaatgaccttataacagaatgcctgaaactggttaatttataaagaggcttattttggctcacagttatggagactgggaagtccaaattgggcagccttaacttccattgaggacctcctgctgcctcatcatatgatgaggtggaagggagcaggcatgtgcaaaaggggcaagataggaggagcagccttgctttataacatcccactctcatggcaactggtccaatcccacgagagtgagaactcattccggcgagaattaacccagtcccaagagagtggcattaatctgtcttaacaacctaatcacctcttaaaggccccacctctcagcactaccacactaaggaccaaatttccaacacatgaattctggggggatacactcaaaccatagcaaatggtgatgatgatgatgatgatcatcatcatcatcgtcgtcgtcgtcgtcgtcgtcgtcacttgggggcagatctgcccttttggagaggctaattgaaatatttcagctggagtagaatgagaagagttgaaggattattacaacttaatggcagaaaagaaaaatagcttattcattttgagattagatggggattttaatgctgttttgatggcattagttccagagatgcaggaatgcccatgtttcttccctgaagtcacacttgacctcttctgtgaaattcagaggtaactgtgcccaagggaagagcagaatagaagttgtcctgtcactatgtaaaaagctgtgcaagtgcccaatcttccagttcagagccctcgtaaatactgagtttcgagcatgtcagatggacttcgtaggtccttctgctcctttctacctattcttccctaacttcttttttttttttttttttttttgagacagagttttgctctgttgcccaggctggagtggcacgatctctgctcactgcaagctccgcctcccgggttcacagcattctcctgcctcagcctcccgagtagctgggactacaggcacccgccaccacacccggctaatttttttttgtatttttagtagagacggggtttcaccatgttagccaggatggtctcgatctcctgacgtgatccgcccgcctcggcctcccaaagtgctgggattacaggcatgagccaccgcgtctggccccctaacttcttaaaagccagcaagccgggccagactggaccaggcgggtgcagtggctcatgcctgcaatgccagcactttgggagaccaaggtgggaggactgcttgagcccaggagtttaagacccacctgggcaacatagtgagagccccctgccctctacaaaaaatttaaaaattagccaagcatggtggtgtgtctgtattcccagctactcagcaggctgaggtgggatatcacttgagcctgggagattgaggctgcagtgagtcaggattacaccactgcatttcagcctaggccacaaagcaagaccctgtctcaaataaatgaataaataaatttttttttttagaaaaggcaactcaggccgggcacggtgactcacgcctgtaatcccagcactttgggaggctgagatgggaggattgcttgaggccaggagctcaagacgagcatggtcaacatagggagaccccatctctaaaaattttttttaaaacacaagcaagctaacaattttaaaactcaaaagagaaatagctaggcctcagtgttcctagccagccccatggaatcaagagagtgcagctgatcaatgtacatcaaaaagccaggccctacctgggactggcacagcatggggacagcatgcaggaggtgcatgggacaaatggcacctgggtttgggcttgagaggcatagtgaaaagacccactagcagtcactttccattttctgtttctgactccaagcaagcagagcagcagttcttcttcctgggtgggacaggttaagaagaccagtaaagggtctctccctcgccacttgtagctacactatctttcctgttcacattcaggtgtgtcttcctcatgaggactgagatgaagaggggtcagactaaagcactgtttgcacgggatttttttaaatagaatttgttatagcgatatcagtaaagcaagagttatgccaaatgctcatagtaggagtttacttcgacctctttttttttccccactcaatactgccaccagttaagacttagacttctcagggaaatccatttgctctgttaaggaaattaatagtaaatagaaatatgttagcttattttaatagatcaatgttagtgtcaaggtttgtctgcaagcagtgaatgaataattataaatagctttcctaaaaagaattgttctgcctttgtgtgtgtacttggaaacataaagtcacattttaaaaaaatttattttcacgaaacagacaacattttttttctcagaaaggaaaatgagatgatagctttgctatgcttagaaatcctaaagctacctttctggtgggaatataaattggttaacctctaaggaggcagtctggcagtatataattgcaagtgcatataccttttgatcattaataaaatttgtttctataatttcatttccttagagaaaaggtaagataagagggaaacagcaaagactcccaagtctttgggattattgtgtactacatttggaaattaagttttcatttcttaagtaagttattgaaagagggaagtcctggccgggcacggtggctcacgcctgtaatcccagcattttgagaagccgaagcgggcagatcacgatgccaagagatcgagaccatcctggccgacatggtgaaaccccatctctactaaaaatacaaaaaattagttgggcgtggtggctcccgcctgtagtcccagctacttgagaggctgaggcaagagaatcacttgaacctgggaggcagaggttgcagtgagctgagatcgcgccactgcactccagcctggcaacagagcaagactctgtctcaaaaaaaaagagtgaagtcctaaatcagtgggttaatccatctgttcttccaggacagatgatattgaataatgaaatgtttgtcaagcagagagaggactgaggataattcagtcaaaacaaacatttggagcaaaaattttgaggtgtgaaagagcctggcctgttccccaggaaagaggtcaaatctggctaaagcagtgagtccaggggaagagctaaggcagttgagaagtaggaggggtagctttgtgtgacaggtaaagaagatgtcattttctgagccagtgtgcatcaaacttcactaccagatgaatgcagaatagaattatgtacactctgcaaagcagcgggggaggagagttagtctcaagcctcacttgtttttccacttctttgttttatctttgacctgtgcaaattttacattctattcctgagtgaatgtttggtatgacatgaaagagatatttcaaattacctaacattttataaatgcaatgctattcatacatactgctttgaaccctggggctatggctgtaggcggtaaagagcctgtgaagtattttcagcaaggaaagtcatgtcattatattgccgtactacagacgggtggagtgaaggggaaaaactggaaggagggaacagcttttgccaggagctcaatacaacttacctcagtgacctgtggatgggtagacaatgaggaaatagaagcccacaaggactgcactgctagtaccttatgaaggcaggaatttactcctggactttctgaccttaaggcctgtactctgtccatatgcttccctgcctccaggaggcagaaccagaaggctcttgccataatccaggtaagaagtaaagaggacccgaccagggcagaggtgagaggagaggcaaggagagaacattctagagagatgaaagagaattgagtgacttcccagatatagtagggagaaggaaaaacaaggaaaattccaggtccgtggcttggatgactggatggatgatgttcatcattaaccgacttaggatacttcagaggaagagcaggtttaaggtggagatgggaaaagaatggtgtagatcctctgattgcataagaaaacaagacagcagaagcaaaggcatggcttgtaatgcccaagatagacattatgggtgggcctcagagcccccgaagactgcattgtagcagccaaaacagcaaagagctcatcagggcttggggactgtcttttaggtttgtttgaagagactgtaccagagggccagggaggaggagaaaggaattgagctggcctatctagagcagctgcatggccaacacgaagcctggcttattcacaagacaacgaagtaagtggggagaaaagaatgtatcagagacagagacctggctcccaacagccagttgttaaaaacaagttcagcatgcagccccctgtaggaaggttcagaatatactggaaatggttggaaatgtcaagcattttccaactcagaagtttaatattgctggacaccgtggctcacgcctgtaatcccagcactttgggaggctgaggcagtcacctgaggtcaggattcaagaccagcctggccaacatggtgaaaccctgtctctactaaaaatagaaaaattagccaggtgtggtgtcaggcgcctgtaataccagctactcgggaggctgaggcaggagaatcgcttgaacctgggaggcaaagattgcggtgagccgagatcgcaccactgtactccagcctgggcgacagagtgagatgcccagaagaagtttaatattgaatataatctttacattccaagggcctttttattagattgtatttctccagctttttctttgtttcttaacatttccctagactgaacattgtgattgatggtgatagttggctcagcatgaagggctgaaaatgttagagaaattgtcagtattactaagttggcattcctggtttctgcctgtcctccctttaggcttggtttgttgtccacttaaaatgtttggtgctctgactgtttgttagtatcactctcaagaatgaagagaaacctcaacctttctgtttccggccaactttattgaatttgtttttttaaatgcagtttacatgcagtttctttgaaaagtcatgttgaatttagatctgttctctgagtaagacttggcgagtatgtgaaacttgactcaagttacatttctttttttctgtcccccaaacgttcacgcttcttataggctccactttgaggctctgatgaacattccagtgctggtgttggatgtcaatgatgatttttctgaggaagtaaccaaacaagaagacctcatgagagaggtgggaaggactttaactcctgttttctggtggtttcctttgttgtacttttatctttctggcctttgcttcaaagttcaatatcatgggtcttgtgctttgcatctcacattgcatttcacactccaaggcctatggaatcttgtgcagattacaaatatccctattctctaaagtatgctggactaataattgttaaataattgacttgtaacatgtgcttgccagctgactttcttctctaaggcatcctaaaactagggaaatgagactactggattctattcccagctctgccacttgatgctatatgaccctgggctgcccacatttcttctccatgcctattattttcctttcctcacaaaaacctcatgggcttggctgcatatgcattgggggtggaccattgaaaattctgttaaaaatgtgaaattaaacttctgattttctccttcccacaggtaaacacctttgtaaagaatctgtaaccaataccatgaagttcaggctgtgatctgggctccctgactttctgaagctagaaaaatgttgtgtctcccaaccacctttccatccccagcccctctcatccctggagcactctgccgctcaagagctggtttgttaattattgttagactttgccattgttttcttttgtacctgaagcattttgaaaataaagtttacttaagttatgcttgtttttctaa

SEQ ID NO: 256 - DNA, 11650 bp, Homo sapiens
  source 1..11650: mol_type = genomic DNA; note = NC_000002.12:c200864658-200853009 CLK1 [organism=Homo sapiens] [GeneID=1195] [chromosome=2]
attttgttgttggtgcgcgacgcagtcagctgcgtgattcccgtgattgcgttacaagctttgtctccttcgacttggagtctttgtccaggacggtaagacgcaggagggagcggactaggtgacagggccgttcctgtgagcctcgcgggcgcctggcgatgcccccttttcctgcttgtttgctgcccgccgtccccggcgcgacgactgcctgctcccttcactcccaggctgcacagtggcggcgcgcccctctttcctgcgcggccgagcctgtcgccgccggatccggcctgcgggggtagttacggtgtttgctaggccggccgccctcttggagcttctgccctccgctgaggaagcggcgccgcctgacgcgggacggtcgggcgggcgccatgttgtgaaccgcctcggcggagctgtaagatggcggctgggcggaggccggcttcggccctgtggccggaaaggcgaggctccccgttgaggggggatttgctggggttccagaatgtgcgtgagccaagcagctgtggggaaacgttgtctggagtaagtggagaaagagacggaacccgtaggggttacagttaatgtctaatgatgaaagtgtcggcgtaaacatcgcgagtggctttgtcctcagtggtgttaacaaaaaccagatttaggaacccaaggaaagagaaatgctggggtgtatttgaaggagcgttgtgacagaagtcaggtgaccgagaattttatgcgatggcgtttcagccactcctcttgggttagcagttggagcttttttcttttcttggagtctcgctctgtcgcccaggctagagtgtagtggcgcgatctcgagtcactgcagcctccgcctcccgggttcaagcgattctcctgcttcagcctccgggatagctgggattacaggcgcccgccacgacgccgggctaatgtttgtatttttagtagagacagagtttcaccatattaagctggcctcaaactgttgacctcaggtgatccatccgcttcggcctcccaaagtgctgggattacaggtgtgagccactgcgcccagcctcctttttttcttttttgagacaaggtctcgcccctgtcgccccggccggagtgcaagtggcgcaatgacggctcactgcagcttcgacatctgggctcaggtgatcttcccacctcagcctcctgagtagttgggactacaggcgcgcgccaccactcctggttaattttttattttttatagaggcggggtctctctatattaccctggctggtctcgaattcctgggctcaagcagccctcctgcttcggcctcccaaagtgctggggttacaggcataagccacggcccccgacccaattggagggctttaaaaattatactcaggctggtccaatggtagtgggttatcagaacttaatagttattagtgtcacgaaaattagtatacaacccctaccgctaaatttgactggcgttaaaaaaaaaagaattgtagcggaagacacagaggggtcccgccggtaagaaagaacggcagttgatgaagtaatttctgtataatgtctttttcaagttgttaggttagagattttcgattttgctcgaagcatttctgaaaagaaggtggctcctaccattcccaaaaagattgtgttaacattgcgtttaggataaattatgttgtatgtgcttgggagtggtactggaaagatggtgttttgttgtttttatattctgatgccaccgttgccttcgtgtgtgattaaagtccttggtagtttcatttgtccgtttacggaaatgctctgtaatgatgattctgtcagcaactcagatataactctgattacgtttgcagtaatcagtaatgcggtgttggtgaggaacatttatgattgcatttgagttggagactagtttctggtacacgtttaaacggggagaatgacgtgtgtttcacgtgtctgtgaagagaccactaaaggcaggctttgtgtgagcaacatggctgtttatttcacctgggtgcaggcgggctgagtcagaaaaaggagtcggcaaagggtggtgggattatcattagttcttataggttttgggataggcggtggagttaagagcaatgttttgggagcagggggcggatctcacaaagtacattctcaagggcggggagaattacaaagaaccttcttaagggtgggggagattataaagaaccttcctaagggtgggggagattacaaagtatattgatcagttaggttggggcagaaataaatcacaatggtggaatgtcatcagttaaggctatttttactttttttgtggatcttcagttgcttcaggccatctggatgtatacgtgcaggtcactggggatatgatggcttagcttgggctcagaggcctgacagcgtggacttctatagtgctatatttgtactactgggagggcaggggtaaaatgtaccaaaattagtaaattgtgattcctccctctacttttttcacttttttttttttttgcattcttccaataaatctgggcatgatatggctaatgcagagtgcctgtgaatgaagttcaaactgcagaatatgggacaacacagtaattggatttatcagtgatttcagattgggtgataatgattcttgaattttggtcttaaaacgaggtcacgaggggacctttgtaattacgaattttaaacagctcagtgtggggtacaatttaactaggaaaaacttgccttttatgtagatgagacactcaaagagaacttactgtcctgattgggatgacaaggattgggattatggaaaatggaggagcagcagcagtcataaaagaaggaagagatcacatagcagtgcccaggagaacaagcgctgcaaatacaatcactctaaaatgtgtgataggtaaggaggatacttaaaatgtctgaatataacaatacattactagacaaaactagtatcacttaaaataagtacctgattactaccattcgtttgtttccaatgagagattttgatggtttgtaatgtttgtaaaattaagctgcttgtgggggagtctaggtgctgtcttgaagagaatgtgaggatatttggtcttagcataaaacattgaaaataatttttatttctctagccattatttggaaagcaggtctataaatgagaaagattatcatagtcgacgctacattgatgagtacagaaatgactacactcaaggatgtgaacctggacatcgccaaagagaccatgaaagccggtatcagaaccatagtagcaagtcttctggtagaagtggaagaagtagttataaaagcaaacacaggattcaccacagtacttcacatcgtcgttcacatggggtatgaacgtttttaaaacattttggaaattttatatcccatgtggaacagggaaacttgaatttttgtgtttgattatttgagaaagttttaagatgaaatcatctcagttttaacctgcaggattttttctgtgtttgtgcattggataggaaattccggaaataaagtacacatttagttctataatttaattattggttggctcctaattgacattccagtgaaatgatgggagttaattgatttaatttagattagttgaaaattattacaaaatattctaaaagggttttttgtggtacttcaagaaacctgattagttttgatctattgaaatcacaaaagtagaacagggcattttatttttgtataatttaggattaggtatgcttctttgttctaacaagtcatgttttctaacccttctttcactaagcaaaccagaacagatttgaactgttatgggttatatattagtatggagatcagctcagatgacattaaaaatgccgtagtgttattcttgtatgccaaatctttttttccccaaaattagcactttaattttatttactgttataatatttgttttcttagattaggtaggaaatcttaatttggccaccgcctactttgacaagtaaatattacatcatacgattttgcaacattaaattagaacactagaaactaaaaaattatgtttcagtgaatgctacaactaagcattttttttttttaagaaaaacaattgtattatgttttgttgccttgccactttgagtatcttatctgaaaatctgttccttgccatgtttttctcctgttaacataaactatgtgccctgtgaatttctggggactgaatttgaaattgctcctgccaaccgtttgtggcctggcgtgtatctgaatgcctgaatatctccccgctgaatgaatttcgtattctgccctgaattcactcgggtatattgattggctggatgatcttggtgccgcccacttgacgtttccagaagagtcaccgaaggaaaagaaccaggagtgtagaggatgatgaggagggtcacctgatctgtcagagtggagacgtactaagtgcaagatgtatagaatatttttcaacacttattaacttttcagataacataatctatatatagattaagctttcagggatttggaaatctttttttctttctcttttttgtttttgttttatttttccatttcttttggtgggggggattgtatttttgctttctttagaaatgtaatgtttgttatatagaacttccagaacagtaatcaaattaatgaaattagacctaataattatgttttttgatggtgttgaccaataaaatatctagtgataaggaaatttgtagcatcaactagaataatctacattgatagcatttattgtgataagtacattgtttccacttcttgatatgactgagatttatttctctcttttagatgaaattgttgatactttaggtgaaggagcttttggaaaagttgtggagtgcatcgatcataaagcgtaagtttcccatgttgggattacttttagggaagttggcaatacaggtaattgatttagctttagaaagtggtctgaccatgagttagatacatatctttatacccttttttacttggatgtaagacacttccagttaagaggtacttgccccttcatattttttaaacagctactaatagtatgtataatttctaattttaggctgagaacacactttatattgttttgaaagtattgttttgttgttcaactggacactgttgttaggccatatttttttcccccaccatattagtggttctcagccttggttttatgttaagatcctcctcgagaggtttgcctaccccagaccttttcagggtagttacctaggaatctatatttttaggaagtgctgtaattcattctgataacatagctggagataacttggtgtcccaagtttaattatgtatgtttatcaaactactgattgaaatttttttttttctcgagacagagtctcgctctgtcacccagggtggagtgcagtggcgcaatctcagctcactgcaccctctgcctcccgggttcaggtgattgttctgcctcagcctcctgagtagctggaactacagacacgcgccaccatgcccagctattgtttgtattagtattgtattgtttgtattagtagagactatgttggccaggctggtctcgaactcctgacctcaggtgacctgcccacctcagcctcccaaagtgctgggattacaggcatgagcgcttggctccagccatgaaatttcttaagatagtatagaattttttccgttactctttttttttagttccctgtttgttgttgttgttgttgttgttgttattgttcttcctcttcctgaatggcaaagcatttttgagggggcttcctactattgattggtaaggacatgagagctagagctctttttttgtttatttttcttttccctgagatggagtcttggtctgtcgcccaggctggagtgcagtggtgcaatcttggctcactgcaacctccaccttccgagttcaagtaattctcctgcctcagcctcccaggaagctgggattacaggcacacaccaccgtgcctggctaattttcatatttttggtagaaatagggtttcaccatgttggtcaggctggtctcgaacttctgacctcaagtgatttactaccctcggcctcccaaagtgctgggattataggcgtgagagccactgctcccggtcctagagctctttactctttccccactgtatcctaactcttttggcaacctggactaaaagaacatttgagataatgtttgacagtgacaggtaccatataggaagaagttgtttagctgaaataccaaaaaataactcatgtgagtggtggtttgatgaaagaaatttgtgtcattcagcatgtaatagaatcagaactgaacactaaaccataaattaaaaaaatacagtgggtcagagtagtagtacagtttgaagacagtaatacctggaattgagcatcatgtctgtcattcttaaatttgcatgcatctttctaacaggggaggtagacatgtagcagtaaaaatagttaaaaatgtggatagatactgtgaagctgctcgctcagaaatacaagttctggaacatctgaatacaacagaccccaacagtactttgtaagtatcagattagaacttgggaagtggtatcaggtatatttaaattaggagcaactatacttagctatttttcatgtgtttgtagccgctgtgtccagatgttggaatggtttgagcatcatggtcacatttgcattgtttttgaactattgggacttagtacttacgacttcattaaagaaaatggttttctaccatttcgactggatcatatcagaaagatggcatatcagatatgcaagtctgtgaattgtaagttcttggtatatcttcgttaatttgctggttttatccattccacatatcaaaatgtgcatcctaagtgtgtacaatttttatttgattaaaaataaagggggaggaagaataggtatgaagagatttgattacaggctgttgatccagcagtgtacatttcattcagcaagtaggatatccaccatataacaacgtactttgttgcagactatgatttagacttttctgatgcgcaaaaatagtaacttcgaatgctgggtaaaaattaaggcgtgatatatctcataaaagaaagcttcataagaggtagtaagttttagttactggtgattttctagcagactggaatgttgaccattctttgggaaaggaatcagaggttttttgttgggtttttttgttttttgaaatggagtctcgctttgttgttcaggctgaagtgcagtggcgcagtcttcactcactgcaaactctgcctccccagttcaagtgattctcctgcctcagcctcccgagtagctaggactacaggcacacgccaccacacccggccaatttttgtaattttggtagagacagggtttcaccatattggtcaggctggtctcgaactcctgacctcaggtgattacaggcgtgagccactgcacccggcctgttgtggggttttgtgatttggtttggtttggtgttttctgattacagcaactttctctttattctcagttttgcacagtaataagttgactcacacagacttaaagcctgaaaacatcttatttgtgcagtctgactacacagaggcgtataatcccaaaatagtaagtcttccaaaatattcataaagtatcttatgccttaatagcttatgccttcttaaccatcatttatgattttcagaaacgtgatgaacgcaccttaataaatccagatattaaagttgtagactttggtagtgcaacatatgatgacgaacatcacagtacattggtatctacaagacattatagagcacctgaagttattttaggtgagtattaattgtcctttgagaacctttgtatttccttattgagacttaaaatttttttagcagttttaggtcttacttgtggggctttatcatattctctttaagggataagtatcatgaagtgcattatggattttaagctctcaattgtaccagataattagctctgggaatttgagcaagtggcttaacctttctggaattgttttcacatttgtaatatgtggtagggtttttaaatgtaattgtttaatgccaggtggggcgcggtggctcacatctgtaatctcagcactttgggaggccaagggtggggcgcggtggctcacatctgtaatcccagcactttgggaggccaaggcgggcagaccacatggtcaggaaatcgagaccatcctggctaatatggtgaaaccccatctctactaaaaatacaaaaaattagctgggtgtggtggtacacgtcagtagttccagctactcaggaggctgaggcagaattgcttgaacaccgggaggcggaggttgcagtgagccaagattgcgccactgcactccggcctgggcgacagagcgagactccatctcagaaaattgtttaatgcctattttattccagactatatataacactatataatttatttatttttatcatttatttattttttagacggagacttactctgtcgcccaggctggagtgcagtggtgcaatcttggctcactgcaacttctgcctcctgggttcaagcaattctcctgcctcagcctcctgagtagctgggattataggcacccaccaccacacccggttaattttcttatttttggtagagatggggtttttaccatgttggcaggctggtctcaaactgctgacctggagcaatctgcctgccttggctttgcaaagtgctgggattacaggcataagccactgcgcccggccatatatattgtatttaaccttggattaagtgattgctttaggatcttccagctcaaacatcacattgcatatatatgtgtatatatataattttttggggggggggcggagtcttgctctgtcacccaggctagagtgcagtggcgcgatctcggctcaccgcaagctccgcctatggggttcactccattgtcccacctcagcctcctgagtagctgggactacaggtgcctgccaccatgcctggctaattttgtttttgtatttttagtagagacggagtttcaccgtgtagtcaggatggtcttgatctcctgccctcgtgttccacctgcctcagcctcccaaagggctgggattatgcctgtagcgtgagccactgtgcccggccaattcagatatatatatatcttaatagaggtgggatctcgctgtgttgcccaggctggtcttgaactcctgagctcaagcagttctcccatcttggcctcccaaagtgctgggattacaggtgtgagccactgtgcccagcctacattacatgtgtttttttttttaaagtattagtgttaactaactttttaatttctttaacaaacattgagtattttttttccttaaattttgctttgctttgcagccctagggtggtcccaaccatgtgatgtctggagcataggatgcattcttattgaatactatcttgggtttaccgtatttccagtaagtgacaatgatctatttcaaccttgctttgcacaagaaaggtgcctgtttatatgaataaatacttttgcttcccccattatagactattaattgtagataagcataaataaactaattcatatttctttcataattgttttatttaaaacatctttcagtatataagcaattatccgtgtccatgtagggaatcattggcgagtttgttctgcaagccttaatgttagtttttttgctgtcagctttaactgtgtctgttttggtggtcatcttccccaagtctgtttttattttatttctagacacacgatagtaaggagcatttagcaatgatggaaaggattcttggacctctaccaaaacatatgatacagaaaaccaggtacgttttaagagttagtgacatccttagtatcatttgatcacatctgctgattagaacttaattttttttttttttttgagatggagtcttgctctgttgcccaggctggagtgcagtggcgtgacctcggctcaatgcaagctctccctcctgggttcacgccattttcctgtctcagcctcccgagtagctgggactacaggcactcgccaccacgcccgcctaatttttttgtatttttagtagagacaaggtttcaccatgttagccaggatggtctcgatctcctgaccttgtgatccgcccacctcggcctcccaaagtgctgagattacaggcgtgagccaccgcacctggccagaacttaatttttttttttaaattttcactctaccaagtctcaggcgctgattaggactttataaataatgaagtcaaactaatattttttcagttaaatagtagattaccttggtgcaaagcaggtaacatttctatcccatggctgccatttaaatctctagaaaagtgatctgggaaagcatagtaattgatacctttgctagctgttttaagttttcagtgttataaacatgaatggatattgacttatttttaggaaacgtaaatattttcaccacgatcgattagactgggatgaacacagttctgccggcagatatgtttcaagacgctgtaaacctctgaaggtaagcctttgagacattgctcaaatagtcaaaactgagtttcttctgtttgtcttttgagaccgagccttgcttcgttgtccaggctggagtagagtggcacgatgttggcccagctcactgcaacctctgcatcctaggctcaagcaggtctcagcctcccaagtagctgggattacagatggatgccaccacgcttttttttttttttttttttttttttcaagtaaagacaagttttactatgttggcctggctggtcttgaactcctggcctcaagtgatccacctgccttggcctcccagagtgctgggattataggcgtgagcgaccatgcctggcctcttttctgtttttatggtggttatatatatatggtttactatactgttacatagtgtagtcaatggtagtggaaaaggctgttgaatgaatttctttttttcttccaggaatttatgctttctcaagatgttgaacatgagcgtctctttgacctcattcagaaaatgttggagtatgatccagccaaaagaattactctcagagaagccttaaagcatcctttctttgaccttctgaagaaaagtatatagatctgtaattggacagctctctcgaagagatcttacagactgtatcagtctaatttttaaattttaagttattttgtacagctttgtaaattcttaacatttttatattgccatgtttattttgtttgggtaatttggttcattaagtacatagctaaggtaatgaacatctttttcagtaattgtaaagtgatttattcagaataaattttttgtgcttatgaagttgatatgtatctgaacagtttgttctaagtaccatttttcttcctacttctattaaagaatggacataga

SEQ ID NO: 257 - DNA, 154944 bp, Homo sapiens
  source 1..154944: mol_type = genomic DNA; note = NC_000014.9:c26598033-26443090 NOVA1 [organism=Homo sapiens] [GeneID=4857] [chromosome=14]
agaaccgctccggcagcggcggcggcggcagcaccagcagcgggagcgagcgcaacgctagcgcggcgcggggaccgccgcgctccttcccggctcctgccctcctctgccgctcgctcctctctcggcatccacctccttcccctcctcctgctcattcactctttccctcactctcccctcctcctcggcttctccccgcgccccgccagccctcgcgctctcccactccctctgcctgtcctccccggtcccctcctcccgctcattcactcgcccctctcccttctccactctctccccctgtctcctttcttcttcttctttcaccctccgtctctcacaccccctccattcccctgtctcctttctgacactgcactgcagctgctcctcagccctgccccctccccagtgagaacaaaccagcaacattgctttttttcctaaagagatttatattgatccgattaaaaaaaaaaaaccttaagaaaccccaaacgcaaaaaaaaaaaaaaaaaaaaaagaaaaaagaaaagaaaaagccaaaacaaaagggagaaccttctcccggtagcagcggcaggaactgcaaacatgatggcggcagctcccatccagcagaacgggacccacactggggttcccatagacctggacccgccggactcgcggaaaaggccgctggaagccccccctgaagccggcagcaccaagaggaccaatacgggcggtgggtatcgcttccacctccccgctggccccatcccccgccgcccgcccctgcctccctccctcgccgtcctccctccctccttccctccctccctcccgcggcccggacacctccagcccgaacccggcggcccctgcgcccctgccccgcgccccctcccctgcacctgccccgcgcctaggtgtccccgacacatttccatttctgtgtttatcattcatcaaaatggcgaccagtttttcggaatagacctatctttccatttaatcggtccagaggttgaccatgtaaatatcctagacctgggcaagaaggtccattcaggaggaggaggaggatgaccccggagtgaggtgatggccgcccgaagatgcgcgctgcgtttaacagtctgataaaataaataaataaatggcacttgggtagcggattgcgaatgactggggcgccggagagtttttcctctctccatcctcttgctttgggccacaagtagtatgcaaaatcttgatgagtgcatgcccttaccgcacttagattgtcggtgcaaatatttcattgatttgtcttcaggggggtgcatacgagggtgggggtgtctggaacggtgacttgttagttaacatcctgcgcttccttggaagatgagttttaacgggaccgatatcgcttcttcatttgcactggaatcatcttaacaatgcacccaatgcatcgaagcagaggtgaatttatctccagcatatgcattgtagacggatgggggtcttttgagtggcacaccacaacatttggaacattcattcacattaagaaagctggatttaccggggtgtctcctgtataagatgtgatcaagttgacggaaattaaagtttgtggagttggcttaattttctaaaacgtttcattttatttttcctggttcttccaccccctttccgttttaaaagttgtgattattttgggaaaggaacattacctgttttgtcacttttaagcctatttaatataaatgactcctaagctttttagtattggcagaattcttcttaaggtcctttaattaatgagcttaaacgagatcacggtagactaagaagtgctaaagaaatgcactaggattagttagatttgccagtccaccacactgagttatttcctggcagttattgaagacttggaatacaccccacagtttgggtggattatttggtaggagaatggttgttttgcggactttaagtaggatataggcaatggctaattgtagtccttatgtgtctgctaatgacaaataaatatagctcatcactatttacagtcctgggcttttcttcttttttaatatgttaagtgaaggtttgtcatcttataaacctctgaagttttgttaaagggtcagttcatttcattttgccacagatagaattggaagatttccatgtttggaataacaactggaatttagtcatcagtttttacagtgctgcaaaataatagaatatgtttatattttaattccaagcttgaaagtataaatcctataaaatgggaaacattttgtacctgtttgtttttcaatgtaattggcttattttcattctcaaaaaatgtttaacttcatatttcctgcagttatatacccagtgctttagttgctgtttttctctcttgagggtggagaggggatacaaagtttgaaatactgtgttaaccgagtatatttctttgcatttttcagaagacggccagtattttctaaaggttctcatacctagttatgctgctggatctataattgggaagggaggacagacaattgttcagttgcaaaaagaaactggagccaccatcaagctgtctaagtccaaagatttttacccaggtaggtgcaatggtgaagagattgtttgatgagctccccacaggaaagaaagatctacttgtgttgtgtgctgtcttgaaagaatttttaaacaatactggagactttatttagatattgctttataggaatatattgtggaaaaattttcagattatttctattgttgattatgcctttttcctataattgttgtaccgtgtatgtgaattagaccagttgcaagatgattcgggtatttctgaataattcttattagcaaaaaaactcaaaaatttaaagatagaaacctggacagctggcatcaggaaatagggttcttctgaagttttcagacatcattgtaatgacaattagcttagagtgaattcagaagaggggggtagggaggcttcttaaagaatggaccatttacttctgaatccattatgtacctctttctgcttcattgctttgtttgttggccttggagtgaagtaaagaggacaagtgttgcctcttcagattttttaaatattgcagttttaatgcaattgatataaggaaatttatactgttatgcaagaagtaaaataatgcttcagaattcatgttaacttaagagctaaatttgattaaatatgttgacagtgtagtacagtaacctactggaatatgggaagtttccttggtggtataaattttttgtttttcactttcaagtatgcctttttaagtgttaaatagttctgcatgtccatctttttctatttttttcttacattttgctaatcactatatgtattttaggtttaagggaaaagtctctgtaattgagtagtacatttcctagataaaacattatcagctgatttgcttttatttaaatctagctttctgtgatttttttaaaggttattttatctttatggctgtcaaaaacgttaattcagtgctgagggaaccaatactgctttaatttttttcttcctggtggaaaagaaaagctgatttgctttcagtgatctaattcagtaagagttctttaatacagcaaagacatctggcatgaatgtaagcagaacatttggaggacttctttttcatagccaatcacttggtattagaaatggaccattatactggataagaaggttttagaatggttgaaactatcatttagttttacaaattaaatgtagtattttttgtaaacattaaacttattaaactaaaaagtaatatattagacacgatgttcctctaaagtttgtttcctatgagtgtagttttgcagatggctttccttgtctctgaaactttccttatgcattaagaaagtttgctaacatattcacattcatatgtttaaaaggtatattatgataaaaaaaatcaatgtggaattgtgaaaacccttagtacaaataaaagcactcaaaagagcttgattgcagaattaataacgtgatagttctaggaaaagagctgcaatggtaaattaaattcactgtcaatagatgaaaatgaaatagcttttttgcattatacatgaggtggtatcagatgtgcagggatgttacagaaaattggtgtttatcaaggatattccaaatagtaaattaaatgccttttcatttgaatatagtttattttcagtgggttggaaagggtgcactgagaattagatcttttgtttttagtccacttagttgtacattttttgcttattacattgaaattgattattttatttatagttctgaggcatgttatttgtatagagcaagaatatctgttggaaaaaaatggaaagctggaatgcgttgaataaaattttgtgtgtgtggtgacgtaacctgatcaaatgtgagttgaaatgttggataaaagaagtctatactttaccggtaacaggtggaaaccaatcacacagtatgggatcaattttaaggataaaataaagcctcgtagtttataagaagcttaaagaattctgaacagtttgtattaaaatacaattttaactggattattacctgtttggacagataatctctttgcttcagatagacattaattttaatagtctttctcttcgcacttgaccacaagtcttcagaataattttaagatcccggtattcttcaacatagcctctgagcgcttttcagtttctcttactcagatgtacgtaagggacacttaccttgtacatctcagatgagctaaattataaactgtgatcatatcatcaagttataaagaatttcttagaggattaatgaaatcatttggaagcccgtttttgtgtctttcatacatatatgaagttcttaaagctatatatatgtatatttatgactgtcataatctactggaacaaatatgcctaatgtttatttcatgaagccccttttctgtttctcatttggtaagagcatatttggggaaaagtctactttagttgtataacctaatggattttctcaaattacccaagtttttaagcagaatgtaattgtgtttgtaaggtttagttaaaatactagtgtgttttcggaaactttcttcaggatgtgtaacacagaatacagacacactcgggacattttaatacattttaactcaaacgataggtactttaaagaaattatagccaatataatttccttgtatgcttatttgtttttcttatttcttttgaaaatatcttaagcaaccctgcctttatgagtaatttttaaaattatggttgaaatgaaaaaacatttttgtacactaattgagaatttgtacagctggatattgcattgcatttttcaatgtcgtgtattaaataacaaacttgagaaaattgtgtgatgaggaattgtaaaatgtattcttcaattactgcaatcagataaaatgatctacaagtagatcatttttgctgtactacgtaatccatttatctgttttacaaaatcaaatcttacagagtactgacttaattctggtggtttaggaatatacctttttttttttcttacatgattagagcaagccaatttgatttacttatatatctttttataactaggttatagcaagttaccttgtagtaaaaaacagctttcttggtttgaggaatatattattgtatgccttttcagagtgacgatagtttatttttattcttttatttggcataaggatatgtttagtttttgttaataatcatattggttttatctgtaaaaattatttaatggatggttcaggtaggtaatccgaaaagcttactgcatgcattattggttggaaatgataacggatgtatgcaataaatattttcgtgtattccttagattttagaacatatcatagtatacttatttttattctattatatggtattcgttacatcagtcaaacagaatccttcattatagtgttggaatctgtctattttacactgttttaatatttgtcattataaaactagtatcacatttaataaaaatatttccttttatggttcttaatttaaaatttgaaattattatttgtacattcattatatttcaatttttcttactttccaaattgggtggtgcttttttaaaaaaaacacaaaccattatacatttttttaaatcataaaagagcagaatgtaagtgaaatttttttgtagggaaggaaagacccaacattgcttttattttgaaaaggggaaaatatagtggccaaattaaactttagaactggaattgtataattatgataattttttgcaaatcagaggagataatgaatttaaaacattatttctgtttacatcattgaaggaagagtattatgatattggtagtacatatgaatgtgaatctcttacagcttctaaaagttgcagtctgtactttgatcttagatgcaaagaatattggacatttgttggaatatatattttaaggcaaaattagtgataaatagaactgtaacaagtacagaaaataaaatggtataatttccaacattgttgggtgggtttaataggatagttatcattacactaggttatactttggattttagtgttatcaaagagttgctgacacaaagtgtttttccttgaatcttaaagttgtaatgtttatttgacacactacctattgttagggttacttttatcttttatctctatatctacagttgaaggagaaacataatcttttacttaaacattagtatctctgaaaatttgctgtattttggtttaattttttttaatactttattttcttactttaagcaataggaaatcttaacatatgaaggaacattactggcatagcgcaatctgtattaacattacagtttccaaaagatacaattttattcgtatcttgtgtatgcagatgttttgtggggtttttagaaagatgaattagcactaaaaattttagctgtacattttatttgattcctttttgtatcattttgatgttgacagagtaagttataagacatcattaatttatagtgttggtgttttcatgaatcatatacataatgctactttgaaatttgctttttgatgctttctgggctttggaaaaacagctcatttaaaatttgtgtcactgtaatgaaatatatctacaacattgccttgcaaatactaccccaaaggatttcaggaatagtttaaacatgttggtgatatagttcaatacttatgtattgaagatgtttcatacagcaagaggaaaaatgatctgtgtcttgaaaatgctaaggagtatgtgatatcactaaaaacctgactgacaaccatcagtgaaaaacttatgtattttatgttgtattgtttgggagttttttgctctggcttcagagaattaattttttaaaaaattattaactgacacaaatgacatttattgactacatattatgctacttgttaactaaatttcagcacctaataaatatttttgaccatagaatttttaactgtggagtctcagttttgtccagttcagtggagctatattttaaaacacaacttttatgagtaagttctgcttttcaaaataaaactggggggacgaaggtgggagatttgtgcttgattgccatctcatttccatctttggatactgctttagcataaagttaaacaacatctgcagagatctgactgacaaacatctctctgggactcatcattgcagcctgcagcaggtgcattcagctttgcagtcttttccaaaaagaggttagtttgttttaacatttatcagtagaccagtgggagcaagtgactagagagaagaggttagttgtcacttgttcagtactggaatactacaggtaattggactggactggtgggaactgcaacagtgtgtatctcacattgcactgcagctgctatggagcttaattaacctgaccctcagagactgaagtgtcatggtataaaacgcaacatgcaaggaatgaagtagtgcttttcaatactttctgatgcttgggttgatgaaatttccatattcttcattttattctttaaagatatggcatcagctttcctacgtctttaatatggaaatattttcaactacattgatttttcatgaaactgatagaatgtacataaaacaaggatagggtctttaggtatagaaataacaaaaaaataaccttaagtgagaagcatttacatttcactatgccaccagtacatatgtaaaacatgagtgagtggaaataagtggaagtacttggtagttcttcttaaaatattatctcagattaacatttatttttcataggaagttaaaacattataaaatttaagttgtatctttttagaatattgatggctttggcaagtacactttgcagagtagtttgaagtgttccaacaaacaggacaggtgtagcatattaaaaatatttttaagattttgaacttaattttactgaaatgtttcccacatttaattacaagtaaattaaaatttagtcaaaatctcaaaaaattactgtgtcatttatttctgttgtttttaatttctcaatctgtttgaagtattgactttgagtatgcgtctgtgacatatatacaagtttcttgtgtgttctaatagtattcccagtgaatacagatatgttatcacagtcctgttcattaatcagcccttaaatagacaatatattcaaaggtaaaaatacatttaaacgaaatctggcaaagtctgtactatcttaaaataatttggaatgtaaaaaccatttgaagtctttgtaaagcagttttatagctttgaattttctattaaatttactaatctgaattttttggtatccattgaatataatttattatttaccaaagagtagttaagttttggagtttgcacaggttttttttctatttttttgttttgtaaactatgtatttttcctgaaggaatatttaccagtattggtaataactgtttcatactgaagatactgcttgagaagaaaataatttttactttaattatgaatagttggaatttattggtaattatagctgttaaaagaaataagattaaagctatgctatctagaggtcaagagattcattccagtactttaaaacataaattattttattctcttttgacatgattgactatttttaatcaattcttatcaatataaaaatactttaaaatttcacatatatacttttaccgtgatttttaaatttttgtttaataagacattgaataagaacaaacattttaagactgcaaagtaaaaaagataattatttacactgatcaactttttgagatattttcagtattttccaagtttcacaccactgtatggatatccaaatcttgatcatgaaaacacctactatctccactccatcattgattctttgctgcttcctgcagggcctgtcatagcattgttgacaggaagagatgaaaaatgaaattaatgtcttgaggtttttaacagcaaaatgattaaggtaagattatttggtgtggaaaataaaacatttttgtccatttttcaatgaattttattcaataggttatatttaaaattgatgttatatttttcttttttatttcaagacctattttatgtcttactgatgttcaatatatttctaatttctgataaactgtattgcagactcaataatttaaaaattttagatggtagtgtttttttttttaccttccttgtgaaactgagcatacatttcgaagttctgtggaagaacttttcagttcattttaaagatgtttgagaatagttatactctcatggctccataattttactcacagtgtaagttttcagagaagtttgttaattaaaaagatttcaaatcctgcatttcttctaggatatgacagaagtttacttagtttacttagttctaaaaaatcattctgattttaaagaagattgtcttcatttaaattgttaataatttgctgctgtagaaaatacactggactgagactgtgttttaagatctaatctaggggggaagggcagaatagaaccaatagtagtgcatttcagtaacacagaatagtaggtaatagggtacctactattttaaaaaaaaacatgtttttgttttctttttatgttgctaaatattttagaagaactgtagctttttaattttggtcatattaattcttgaaatacctggttttgaagtggttagtgttggaggtaagtaagctcttactggtagagctcattcacatacttagtccttaattattctttggataacccatgtttttatttttctatgatgatgatttctttaaaaagtggtgaaggtaattttttttgaaacttggtttcattcttaagtgtgaagtctgcctggaagctgtctcttgttaattattatgcatatttatcagatgcttcctgtaaacgctggtgtaggcagctatttggtaatcattacttagaattattacaatgtatcttttctccattcgaggaatataggcatactttgctttaccctgagaaattttgctttgctcttttctccttagatttttgtttttttttttttttatatattttagatccctgttaaagatttaggacaacacttaggaatagctaagagactttttatttaaaagatttggagaaatcatagagttgtggaaatagatcaaagtgatgaagttcagatgatctcttctaaaactttcatttaacagttgagaaaaccaaggtaccaagagattaagtgatttacgtaaggtttctctaatgccagtaattgtcctgtagctttgaaatgtgttttctgaatttgtggtgcaattgtggtaggtacttcattctcttgttttgttctactttttttttccctcccttctggatgtgactctgaggaagtaagtccttacctcctctctctcctagtcttaaaatgaatatatgttctttaaaaaaaaaaaaaaaactgagatgatggcccagtggttattttgccattattattattattttagttcatgtgctacactgaaggaacataggcaggatgctctttggtcattaacaaatttcttttagaaaaggatatcataggttatattgcctggagcatgtagcctggtcattttctctctttccttaattatactgtttgaaagtggcagtgtttttatggtgattagatttctgcagcattgttatttttcttcatttgtactttttttctttcttgctttcatcattccttagctatacttctacattttaatttttggttagagtattgacttattaaaaaagtaggctaagttaaattttgttttcaagaattattttaataatatatgtatttttcatgtttttatgacttttataaaaactcctgtaagtatagtgtatttgggtgaatattcataacatttggttcaacagataaataccatgattaaaaaataagcatgaggctaattgtaaggcaacgtagtaaaaatgtagctgtattgtccagtaattattaatttgaaaacatcactgttttctcctttttggctattcatttcattaaattggtctactcagttaattagaattctgatactattttcattgtgttataggcttaaggactatgttctaatataatcataaaagtacttaatgtgattttgaagacttttccttctacagtgttaaattaaaacaaaaactcttttgtgatagtctttactcacatcagttgagtaattggattaaggtccactgatgtgggggaatttatggcatccttcttgcctgctgtgtgtttaacatacagcgcaattgtttaatcataggtggcactggaaatttaaatgaatgtatgaatgaatgactgaatgaaccatttgagatttcttctgtgaagtgctcatggaataccaatacagtggatatagaaggcagtccatctttagtttttcattacacttctagtttactttaataatgaatttagaaatttaaatgaacaagaaatgcatagaagtgttagggtaggtattggctaggtacagtggagtatgacgggaattttgcgttctgtttagcatgctatcctgtgtgaaagaaactgaaatccaatattatggagagtatgttaaagccacctctgaaatgaagaccacctttaaaataacttaagcaatatgagtttaagaattagttattaataaagtatattaaaagtatatatatattacaagattttatagctgtatcacattgtagtttatttatggccacatggccatatgttcagtaaggaaaaagaccaatcatgatttttcttgagtactaaccatcaaattaaagtgatatattagaagtatgcttactaagtgttttgtttataatatattttaatatcttcttccccaactatagtggggaagttaacatgtgactttgttgggggaggttacattgttacattgagaaactggacaatttacttttctaatgtgccaagaaaaataaaaaataccagctgtatagtagagtggaacttatttgcttatagtttgactaacttaaatatcaaggtattagtatgttactttatttgaaattaaaattttagggaagatattgagtttgggatatttcggagtctttacatactttgtaaatatatgcaatttaaagagatacatgaaataagagtgtttttcttgtattaatacattgtttgatttttatcatagtaaaccagtgaaacatctaagatttaatagatagcactctttcatgccttgtgattagtcttccacatttttgtaaattttatttatattttaaaaagtaatggagaacagtgggttaaaataaccatatcatagtgtttcttgtctgtttccccgtgcccttctttgccacggattttaagtattatgaacattagtgggctttgttggggttagaactaagtatacaatgccctaaaatcttagatggataccaggttacaagtttgataactgtataatggagaattatatctagaagttgaaattatctctgttagtgtcagagtcttgggaggaggggttagatttcgaagaagacttcgaagaggagctgacagggttttggggactgaattttaatttgcttggtgaacaaaagtggaaagtcatttaaggcatatatagacataaagatgtgcaaaaattctgttatattcaggggtctaaaagtagtttggtattgattggataaaaagtggatattgctgttggtgtgggggtcagtggtggtaggaggcactatagatatctgtacaggtaagagacaatctagtgcatatgaaaaagaagaaaagactggctgaaaaatattcttcctagatatattcgttagcaagaatattttttaaatctacatctgctgtgtgtctgtaaaatgactgacagtggtactgtaattaaaaaatatatatttatgtaaatatagtgacacttatagtctggcggatggattgcccagttgttcaaaagtataattgagtatacgattggattctggctttctgcttaggaaatagaaatagaattttataaagacccaatttacttagaaaggaaaaggcaaagggaaagatggggcaactagaaatacagaaaagagatgttaagaaatgtgagttgtgtttaaccagttatgtgccaagtatggaagaaaaaaaaggtggaggacagttagtgaatgacagatttctatgaagaatgttttgctatatgtggggaagatctttaactaatttgcttttgattcatagcagttcagatcatatacaagaagaaatgtttcttgtttcttaaattcattcaatatgtaggcctttcttgctttcttagcatatgaaaatatatacttatttttaattggataaacatgagtgatttatacaatatatgtgtgtgtgtgtgtgtgtgtgtgtgtgtgtgtgtgtgtgaatttgatgctgttcaaacgctaaagttaggtatattgtcaaaacattgttaagctatgtcagtgaaaattaaaacttactatttattagtggattctctgttatgtaatttttttgcttgaatttttgttgattattgagataaagcgggatttttcatcatttataagtatttcacataagaatcaatcttaattaatacccttatcaaattcagatgaatttttaaaagtctgaaaaatatgatactgttttttcatttagaaaatgagattaaaaatctatcttgcattttatactgatttgtgcaattattggctacttgtgtagagaaacattaaaaaattgaacagctgaagtgacattaagcaacagatggggatttaaaataaaaatattcactgtgtaatctttatttaagtgctattcataattcagtaataccagttgtgtaactcaaggttgaattcaatataaaaaaggaagcataagaaaagtcccatttccttaaaattgatatctgtattatggtatgatttcatgatttgtttataaagtgagaaataatctagctaagagttgcatacatgtttttttgcaggtcaaattcaattctttttgagaaaaattttgaagaaattttgaattatttccaaataatatttatttgaatttaacatattttactgtttctgcctttaaaatgatattctattttgtattttagcttatcttctcaactgaaaatttgaaaccatgctttctttacagtagtattttaaactaattgttctgaagcgtatacctattctgtttaaggaaaggtatgttcctctcaaagctttatcacactttcagctatgctggtgtatttgacatcttgtttaaaaactagaatgtctctgcatacgaacacccaaactgtgataatgagctagatatgccatatgtggcactttaggttggcatatatctgaaatggcatgtttaatgtactgtattactaggattagtaattttacagtggaaggctgctacttttatgatatagtctcctgctgctgggcttataagtctgatggactctttactcaaaacctgttttttaatttctgtaaaaatctttttactattgaaattatctgcataagatctatctggctgattgacttattatctgaagtttgtcaagattagtgagaagtaaaaaacatatatagtttgataggtttataaatgtaaatagtaattatgtatattttgttaaggaataataatgctaacatatttagtattgccagcaatggtttagtaaagtacataattgagaattgttcacaatatttttatttttagaaaaaagtgcataggaaaagctttgaggttctatggagtcttggcagtgaagccattaaaaagcaaactgcaataaataatgttcttttatgacagaatgctcaactttaaattcatattccagttctcatggacataatattcattttttatttttaaaattatgcttttatccaagggttttactgaagcaccttcaaatcagtcaggagattgcgttaaaaataagtagatactgcattgcaatgaggataatttagataatttaaatttaaggtataagtaaagaatgtaaacattttttgactacttaaaatatgcagaataagtacaatttcgggtttgggaaatgtttcaactaacagttatctgaattctatatcttttgcaatttctgtgttttaaaaagccagactctgaatttcattatgttttcatttaaactgactctatcacagttaatagaaaatgggattgtgttgtttttaaattctttagactatacaactaaaagttacttgttgatcagttatggcttaatgagaccttacatttctataggattttaattcttaaaacatcagtgtaggtagaagtttttgtcttcattttacagatgaagaatataagatagtgaaaggtaaaattatttgtgatatgtcaagttaataatgaacctgtttattttctgttattgtgtaacagcattctgttattttgtatttgcatcaaattgtgtataaatttgagttcagaaatggagtattcaaaatttaagtaagatttatcaaactgccacatttgcccatcactgggagataatatttctgataggttatacatttttttccaattcatatgtaaatcctacaaaaattttgccattgaaaggaaaatagtaataactaagcaacatggaaacatacaaaagttattttttcagctgaccagacttgtgtatatatatagaaccttgatatctttctattttcctattttcatattgacattaggtcattaagatagtttgaaattgcttacatgaaatgtaaactttgagattgtttacatgaaatgattcaattgccttcatttggccctgtaagattttgtttctcactttttaaattatatataatgtctactttcaagatttgttgaattatagatttaaggttagaaaactctggtcagatcactgtgatatagtactcagtttaataaaaaattttatgaggaaaatatgcaatggatattatacaatgtagtttattaagcaattatcacatcagttcagtacttcttaacgcctctgtggaagtacgacgaatacaagacttctagagaacatgtggtgtcagaccagagtttgaatcccagctctgccacttactaggtgtactattttaatcagtcatttaatcttcttgtacctccagttttttatctgcgtaatgtagtatctgtacctctttcataattataactttaggtactaaaaaggaaaactgtaaaagcatgtcacataataaatatttggtgtataataagcttattatgaccctatcatttttcacctcctttctatgcttgtttcatttaataatactaaatttatagcagagattttaatgtagaataaattacattaatgtggccctaaaaaggacaacatttatataaggatttttaacaattgaagtgtttttttcataattgttgtaaaaatgcaggtgatagaatgccaaagctctgacctatcctcatcccacacctttaagataattaatataaataatttcttatatatttttaaacattctattttaaaatagcagttattgtttttagtggtaattataagtgatcatcgtttttatagataagaatgagttttccgcaaaccacctatgttgattaatgggtttatggagcttctaaatactgtaaggtgtctttccagtctcagctttgtgggtatttttgttgcatagcctaaataagtgttctataatacccctgaagatatgcagagctttttttatttgtttatgtttttgcctatatagtggagaagaaaactaggcatgtgaatttgtaatattaaagcaaattataataatctcatgtgaaacatatggatttatttgttttataactcattaaaattaacttaattagcctctgtcttcatccttgtatatgcaaatacaaaacattaaaaatcattgattagagtcttaattgggatttaacaggaataaatcaggtggcatatagaatatttaatattgtctttcatgatctttttcaggatactaagacttctgaattttttttcctactagcaaaaatgaaagtcataatgcattaaatgatgaagctaaatgtttaataatatagatgataattcataaggcttattttaaagcttttttttttgctgttagtaagatttttttagctggtgcagtgcagtggtgcacacctttcatctcagctacttgggaggctgagatggtagaattgcttgaacccaggagtttgggaatagcctgggcaatatagtgagaccccatctctaaaaataatttaattttgcagtataattatttatgaaaaaataagtaaataaaagtaatttaatttttttaagttttaagatattggctctgtcaaggtcttaaatattttaactcatgttcttgcagcctccataaaggatctaagaaattttagtagtgtaattctactaaacgtatctttcagaggccactttttttattcctttccattccttagcaagtattttccatgagtcattacacatattcttgattgccattacgctaaaattgttttttatgatttgtttgtattttgtcttaattattgtataaacttaattctgtattcagatacttcatatagtaaattaaatattacttacatactaaatattttaagtttcatgtaatactattgcaagatcaactaactgtaagtatgatttttgttttgcgtgactgtgacctggaggacaataaatttaataagattatactgattcttagattgctttgtggaagaaataaaatctttgtatttgtaatagtgtaaattcagttttatatttggaagggtacacctttgaatatataagaatacgatggctgggcaccatggctcatgcctgcaatcccagcatttgggaggccgaggcaggcagatcacgaggtcaacagattgggaccatcctggccaacacggtgaaaccccgtctctacttaaaatacaaaaattggctgggcttgatggcgcgcgcctgtagtcccacctactcgggaggctgaggcgggagagtcacttgaacctgggaggcggaggttccagtgagccaagatcactccactgcactccagcctggcaacagagtgagactctgtctcaaaaaaaaaaaaaaaaaaaaaaagaataccacctgctatggaaaaaaaaaaataaagaaactgagaaactttgttaaagaccatttaattccagaatgattaaatagacttcatctttatggtaatggatttattcttacatctttaaaatctgtagagatgatgacagtgaagtctgattggagtgagggttaaattatatgttgtcagtgtatagacgatgaatctgtgttagtctgtattagggatgactaaaggttatcactgtctttattaatattagggtgtggttttgagtgtgaactctgacattaacccagatttccttctcatttgtaatattttttacttttctttggaattaaagctacacaatatatgatgatattaagtcccaattctgaaagctctttcatgatcttccttgatgatcttattttctatttcactgagagaattctaaaaatttcataagctcctaccaccagatctacctacctaagtatatgagtatctgaatacttttactattttgttaaactatgtgcctagcaaaggcctacctctactttttttctatattccattccattccatcttacctacttagatatcatttagcaattctttctccactttcctgcagtatcaagttcttgccctactggaaattatttttacctacaaatacactgttctttctcccacttaaaaaaaaaaagtgtgtttctttttatcccacttcctgttctggtaattatggcattaacggtaaaattcttcaaatttgttgcccatacttgtgctatctccatttcctctcttttcatttctcttttgaagctattccaattaggactttgacccaacctttcactgaaactactcatgttaaagtcactggtagcttctatactttttattcagtggtcagttctcagtcctcctttttatataaccatcagcagcatttgacacagtgatcactgtctcctttttgaaacatttcattttgcttctggtacacctttatctcattggttgcagccgtatatttcttttgctgtttttttttttctcatttccttggacttctttttttctgtccgtggttactcccttggtgatccaatccagtatcatggatttaaataaccatctgttctttgatgactaccaaatgtttgtgtccattgtggacctttcatctgaactctacactgatgatgcagctgcctgctttatatcacttctatgtctaatatgtatgttagaattaaatatgattttaaatattctgatctttctcttgaccccctcagatcaacttctctcagtcttctccatcttaattgcagcttcatcttttcagggtctgaggacagaaatatttgagtcatctttaccttctctctttctgttgaacttcagatccaatctgtcacaattctgattatatttaagatacttgccttaaaggaaagccatatattcaagccaaaagaagataacagaaacaaaagtaaatgttacagaaatgcactctgctatgtgtaggcaggtaaagaattaacataaagatatggttggctgtgaattcagtattaaaactctggtgaatgacaaaaaaaagtagcctgtcttagttacttggttgaccagactaagctcacaaactatttacaatttcaaagataattcactgggaaatctagattcatgtttaattttgtgttatagggaaccctgtaggaaatttatatttaagaaatatcagtatcgatatatccattatagtagcataattatttttatacctaggggaattgagttttaaagaataagcatgaatatgtatcatggaatgttatttaaccttaaaaaaggagatacagtgctgacgtttgcaatagtatgaatgcatctggagtatattatgccaaatgaaataagccagacacagatagataggtactgtgtgaccttatttgtatgtggaatctagaaaaatgtagaatacctagaaatggagaatagaatagtggttaccagggtggggaggggaaatgggaagagtaggtcaaaaggtacaaacatgcagctatgtagtatgaataagtctagagatctaatgtacaatatgaggatatagttaatattgtgttgtatactaaaatgtactaagagagtagattttacatgctcttatcacaccaaaaaagtagctgtggaaagtgatagataatttatctgactgtagtaatcatttcactatgtatatgcgtatcaaaacatcatgttttacaccttaagtatatacaataataaaaaaaggaggcaagaggagtaagaaagttctgaataatacctgttcattagattatataaaaataaaatctatcattgttagaagacacagttagcttaaaatgtataccttatcaggtggtatgtgtatatatatatacacacacacagacacacacattgtgaatgataaatatatattgaaccatttagaatattgtgctaaatcaataattcatctatttgaggattataccttaaggaaattatatacttaaaaatgtattatcaaaatggtcaatatttgcctgtaaaatattttgagatactgtacatttatgcctgtcagctgggagtttcctcattttagtatccgtaaaaattattctggttgatagagttcatttataatcatttcactatgtatatgcgtatcaaaacatcatgttttacaccttaagtatatacagtaataaaaaaggaagcaagaggagtaagaaagttctgaataatacctgttcatcagattatataaaaataaaatctatcattcttagaagacacagttagcttaaaatgtataccatatcaggtggtatatatatatatacacacacattgtagatgataagtatatattgaaccatttagaatattgtgctaaatcaataattcatctatttgaggattataccttaaggaaattatatacctaaaaatgtattatcaaaatggtcaatatttgcctgtaaaatattttgagatactgtacatttatgcctgtcagctgcgagtttcctcattttagtctccataaaaattattctggttgatagagttcatttatctgttttaatttaaatctcttaggcttaactgtactacttaatgtttttttcattctgtactcaattattaaaaacatttatcttattttccacataagcagaaaaaatgagttgttatagatttaataaaatatttgaaataattatataataacaattttgactttttttctaatcatgcattttatcactatgtcttactggtaaatgatatttaatctctgtaaatgttctgccagaataagacaaaataaatctgtaggcttgttgatatatgtgataaagtagaggagatttgtttaatcactgttgtgaaaaaggaaaactgtagtagttgtggcttcctggattataaggacaagaacttgtgtatgcttttgatttcatttttaacattaaaatttaagtatatggctcaatattaaagcttaaaatctgtgacttaaaacattttatttttcgtggttattaattacatagttatttcttaaatcatcccttagtgttgacttatggaagatgatgtgggtttgctaaaagctttcttatgtattattttggaaatatctatattatattttcacataactgatagagacagattttgtgtagatttatctcactgcaagctccttttcaccacattgtattatgaagtaaaaaatttctttgaaagtactttccccaattcttgtttataaagttcatcacattgggctagattatgaatggacgtttagtcagtgtcaagcaatttgaacttttatttatcttaaattgaattacatacattttaaaaggactgtctaaatctgcagttattacatgttaaaacctatattgatgtcaaaactcctaaacagtagtacgtgtttgcagttttaagagaattatttacttataatttacctagaagatatcccacaatatgattttttcaacataaaaagacagtataggctgggctcagtggctcacgcctgtaatcccagcactttgggaggctgagaggcaggaggattgtgggagaccaggagtttcagaccagcctgggcaacagagtgagactctgtctctacaaaaaaaaaatttttttaaattagtgggcatagtggtgtgagcctgtattcctagctactctggagactgtcataggatgatcacatgagcccaggtgttaagggtgcagtgagcgtgatctcaccgacggagcaagaccctatctctaaaacaaacaaaaagggtggagggagacaatatgaatgagtagtccattaacttaaaacatttgaaattaaagttttatgataacactttaattttaagtaaccactcatttatgcccctctatttaaagcggaaacctaaagctatttgttaataaaatactgttttacattaagacgtcatgggagagaaggatatatggggaaattaacagaattaagttattttaaattaagtatgaatgacatttccaaggtagcagtgaatgctttacaatatacactaataattttattatttttcccaattttatgatactcgtttctatttctgagaatctttaaaaatgtgtaatcttggctgggcgtggtggctcacgcctgtaatcccagcactttgggaggccgagggggcgggggggggggggtggatcacgaggtcaggagttcaagaccagcctggccaagatggtgaaaccccgtctctactgaaaatacaaaaattagccaggcgtggtaacaggtgcctgtaatcccagctgcttgggatgctgaggcaggagaatcgcttgagcccagttggcagaggttgcagtgagctgagattgtgccactgcactccagcctgggtgacagagggagactctgtctcaaaaaaaaaaaaaaaaaaaagtgtaatctttgctttcttgagctgttagtattgaagataaaatgtaagatctcatgtggctcagccttatgtttttattgtcttgcactttgtgtacttttgctgtggggttgctgagcatccttagataaagactgaaatcaggccagttgattctgctactcagtctaacatatcttttcagttgagccagctctgttgctgttatccttttgtttatttctgattagctttacattttgtgcctctttaaacttttttcatctttttcaacccagaaactcaccccaacagatttatactctgtaaatgtacttgcttcacagtttatttaggtcatctttaaggacctccctcaacttccttttatacttcaaattataatttaatttcacctttaatccttgtctacatatatagaatgagaattctctattctttttaggaatcatttatcatgcccccctttatctttttcagattcttatctcattcttttggatcttttaaattttttcatgagatctttctctttggctttataatatgttcagttcttattttatacaaaattaccaaaagctaaatcctttctttaattctggtaatacctgtggtcactttctctcccttttacataccaacaaaattttttgaaagggtagtctactgagtttctttttttctcagcattttattactcctggttatccaactctttcagagttcatggtatctttattagttgcttaattaactgaactatctttttcagtcatgtaaccatcatcctcttttaattttctaaagcattcaatattagtaactattcttcctccattggcttatttgacattgtatgatccagtttctctcattatttctctaactgtactatctcagacatttttatggatttcttttgtttcttgaaatcatcacgtaaatgttagggttacattcgattctgtccttggccccgtagatccctttagctttaattactccctttatgtagatcatgcttaagtcatatgttcagctcaaaactgttttgatcttttgttttatgtacactttattatatttaatgtatttcaaaataaatgtgattgtttataccttacataaagtctttctgtaaattaccttaccctaaaagtacacataatatgttcacataatttggcatgttacttcttccacaggtatttggttatgtatctgtattatttttttaaacgtacagacacacatacacacacacacacacacacacacacacacacacacacactgcggttccttatataaggctgaggtttcagcttatatgatcatccaggaagtctttgctgatcacctcaatctggttgagggacccttcctttgttcttgtgacacatcctatatttttaatgcttcttgtaattacaaatcttttctagctcactagactataagtgctacaaaaatgatgaagaccatgtcacctttattgacattgtacccttaatacttttatagggtcttccacatagtagatgctcaatctgtatgtactgcgtatatgaataatcgagtagataaataactcagtgtcaaaaaatgtattctcttaaatttataaacttgcctttctctgtgtttcctgttttatttattggcaccagtgattttcaagttatccaaactggaaaaattggttaattttgatcttgttcccttttctattctctgtttattctataattgttgccaattcttgtctgttttactcacaacatgtaccttgaattaatcttcccctttatgttcttgatgttttccctaaggtgggttgtttcacttacaactgtactttatatagactctaccagagtagcagagaataatattgtggtgtatttcataacatcccattcattttgattattaaacaaaaacaaacctttagtacagggtaatatgatatatgaatctcatatctaatttaaagctgttccccatctcagcaatagtcaggctttggggcctaagaacttgaaacttggaagctgttgtagtctatgctttcaccttctttatttatatttaagtagggttgtatagatgatttctaagatgtctctctcctcccccaattctgattctaggtttagggaccagatagaaggaaatgggcaaaactttctttttacttaactaggcttgtaataatattctattgagttttgatgcctctgtgatttacactggccattaatgccttcttctatgtgacagttgtccaaatggtagctctctcataggttgcatgctttacatctgtgatggactctgctgaggtcttctactacacagttaaaacctgatgtgagatattcttagttaactctgttgtaggccctctgtgttctagccacgtgggtagacagtttcctggggttgctggagcctcctcgctcttgtggacatcttttttaaggtaggcccatgtgactcatatcatatggtgctagaggtaactgcgtcattgtcatgtcatgtgtttttcctgttatttctctttattgttttttctgcccacttaggaacagagaacatcgttaagtctgatatctaagtattaatttaagccagagtgaaaagatagtatcttctcgtgagtactctcagtatataggaatcatgctcttggcttgcagcaccttaggggaggaatacttccaaaagagactggctggcctcaattttttttcagttctttttagaacgtgaggacacttaattcctcctttttctcttttctgggtcctagtttctaaatcctaggtaacaggaaaagtgtcattaaacatcatatatatatatatattttaatccatattatttaattcaaaatattttaatccatattatttaacctgtaaaccaaagtaacacatcaccaattattgctcttcaccagcctttgtaagtgaagtctgtggattcatagtaaagagagaacagactttgtgattcttgcagctgtgcatgtatgtgaacagtgggttaaacgagaaaaaatacttttcttagacctatttataatatatgaaagaaacatttcatagaattttggaaaattaaacaaagggaaatataacagatataccttaaacttaatagagtaaaggttggtttggaatactttattaggggtgaattatctgtgtaatataaaatttatggaagattctgcttcagcatattacagtattatagcagtgcttcatgacctattaaaagataattcaggaaatgattgacctaccagagtagtttatgtgttgttttaggaacaattgccttctgcaacttttatctattggttttaaatatatgcatatatacatgtgtgtatacatatacatatgtatacacatacagtacacatacacatatgtatacacatacacatatacaaatgtgttatatagatgctagataaccctttttgttttctccttaatctgttcacatgagatattcatattgacaactgcaattttgccattgatgggatttttaatactataaccacagcagttgaggatggattactttgttcagttgagttttttttttttaatttcatagtttatacattttatttattcatttattttctgagttggagtctcactccgttgcccaggctggagtgcagtggcgcgatcatggctcactgcaacctctgcctcccaggttcaagctgttttcctgactcagcctctcaagtatctgggatgacaggtgcccaccaccactgccggctaatttttgtatttttagtagagacagggtttcaccatgttggccaggctgatctcgaacgcctgacctcaggtgatctgcctgcttctgcttcccaaggtattgggattacaggcatgagacactgcatccggccttagtttatacttttatttgaataagcagatggtttccttctattaactttcttagcatttacttttagagaccctttaaggcaaagagccagaaatggaagatacagaattatcatctagcaaaagcactgaccccttgtttaagaatgcattgaatcagaacttcaaaattatttaggttttgttttatttatgatagtgaaagtgaagatcataatataaactaaggaatagtatgctgttgaagaagtaaagatttgaaagaagctagcactgattcttttcaactagaaatttgttttagactgtgctctcaagtttatagaagttgaaattgggtgtgattatttgtcaataatgggccacttttgcttctttgattatgccactttgaagtttttgataaattgtatatatagatctaaggattacctaattgctttctgtggtaaacagaattttctagataaagcaagtaagatttcaagaaacatgtaattttaaaaaattacattggaaacttttcttaacgtatcattcacatctacttctttgtttttgttaatattttaatggtctggtttgttgccaagaaatatttaataagccacagataaatgcatattgtaaatcagatttttaaataattcaaatttgctgctcctatttaatcaaaatgtttgtgttttgaggaggaaaatgggaaataaatgaattaaaatacattatgatattctgtattcaaaatactttacaaggttcattaattgcagttatattttttaaatctagaagtgctgtttgaccctttctcggattttttttactgtaaatgttcaaacctcttatgaaatgtgttaagaatacttattttaaaatactctatctgacagttctgctctgtgttgtttctgctggttctcactcttgccaccatgcttccttgtgtgtttggtgaatgtttgttaagttttcttagcaatttacctgagggaattttttgaatcctaggataaaggtggtttccttcagagtggcttggctttgcgtttagttgtcatttatagttgggaacaacttgaatctaaattcttggcttgagattattttaaccaccaggtatgaattcatgctgaaaatctgcttgaaggcaaacttggggttatgaattcccagataattttttcctgccttctaagtgcatgttaggaattgtcagaggatcagggcgtattttactcttacaatgacagcatagctggttaaagttagtatttactggggattctcatcaggctgcccacctggaacaggaagttcaatagacaaaagatcatattaccttggtttatcaaaagacttcaaggtaaatgtccccttacatgctctagttgctcttccaggttcctgcatttatttaggttttattagtttctggtcagctaacagatgccattgaagaatgtgtttttaatatttttctgtgacatagttgtttcaggcaggagaattggctgggtttccttgcttatactgtcagacataaaaaagcatgttaggttttttgtttgtttacaaaattttcttattttccccagctaccctggaaatatatacgtctattataaccatttcagaaataaggtaagctgaccaaaatcatgcagttggtgaaaaggttgatgtgtactcaagtctgtctgactccagagtccatgctgtacattgtatagcactgcctctatggggtttaaattcttctctcataaatacttgagttcccgggtagtgttcattttgtatatgaatgactgtgtatataaagaaatggaattctaggttactacctgataggaattttgagaaagaagatctaataacagttactacattgtaaagagtagttagcaatatgtgttaaaaacctactgtaaaacattttctgttttacctaaatctctcttattatcttaatatattggcctaccttttcccaagatcccagcagttcccaagattcccttttcattgttatcttttccttgattttatcctttatcagtcctatcagtatttttgtttggttgggaggtatcacacagtaaatatcaagaaactcttcagatgttttaaatacaggcagaaatgactgtaatattggttaagctttgtaaaggtgcagcagttcagagagctttgttgataaccaaatggaaaaactattttttaaaagcataactagtttatcttgagcaataaaaaagttgcttaaaatgttatcagatcgttagcatattgagatgactatttcagatttaatgtatttgaggaaatggaaagttaatgaagcagaagactagaaatgaaacaggtgcagaagaataactatatgaaaaatggaggtgatattattgttctccagattgggatgctctaaccactgtcaaactatttaaatcaagtaagacagtcgggtacagtgactcatgcctataattccagcaatttgagagcttgaggcaggaggatcgcttgagtccaggagttcgagaccagcctgggtaacatagcaagaccttgtctctacaaaaaataaacagaattatttggtgaggtcacgcgtgcctgtagtcccagctacttgggaggctgaggtaggggaatcgtttgagcccaggaggtcggggctgcagtgagccaagattgcgccactgcattccagcttgggtgacagagcaaaaccctgtctcaaaaaaaaaaaaaaaaaaaaaaattaaacaagacacttaaatgttataggataatacatataacagaaactataaatttttctgaaggcagtttttatgaattacaattaaatttgattatactctacattatttttataggatttaaaaatttaaacccaaagtatatgctttaatatattggtttttggattataatttggcatcattttgcacagtttttagggaaaggtgagtttgattgaaggcaagtgtttttatggaaaatgaaagttatttcttccattttcatgttttttatgtgctcatcctatgtaaaaggtatttccaagtagttttgaagatattaacggtattcccagcttctagctttttgcaggggagggggagaaaaattgaatgtttgtctaaggattgatttcttaaggaagattttaaaaagtagcatttagccttttaaaaatgggtaaatgcatttatttttgctgtgttctaacatagtaatatgttttccttataatgatgacttccgtttttccacaatttttattgatgacagaaattgccattgtcaacaagaaatgccaagtgagaaagaagattatggtgggttctgtttcttagcacatgttattttacttttagttttacaatttttgcatctgtagccttggccatattatgggatttatcgccttattagttgagaggtaggctaatagatgataaggaagatgtagtgaaatagtaataatgataataataatagttaactaatgaacatttactattttcaaagccatattcaacacactgtgtatatgttatttacttctttcaaaaactttatgaagaaggatgtattcttaaagatagacaactgaagcacaaaaaattaaatcactttccaaggtactcacttacaatcattggagccaaactagtatatatgtatatatgtatataaatatactctgtgtatgcttgattattaatggtaactattattttgatgacaataaattaaaacgaatttgaagttagtgataagttagttttgttaatagcgttaaataagtatgacatttccttagaaattgtgactggtgttatgtacgatatcttttagtaaccttgaacggtgcttgaactcttttgtcattgcatttctaagattttgctaagctgttatgttatgcattccttatagcattttatagtcttttattttacaacgactctgaaggaatatttcatcattcatataattttagtatccaaattatattttcatccctttgtttgccatgaaacatactcctgcctatctttcaattgcatcatgttctctttctttctcctcatttaaatacccttaaaacaaacatagatcacttttctgaatcattatatttttttctgtatgaaagcccattttgtaaagtatttatttaagaacgccattcagtttgcattctcttgcttttttcttttgtcacattttcagcactaatcaaggattaaagaagattaaaaagaaaactaataaatgagagaatgtggtggtactggtgttagcttatccatttgttggtgatttgcttgtattttatgtaattagtttgattccacacaatatcatttagtctatagtatggcacagtgctaatggctagattacaaaaataagtgaaccatggtccatctttttcttgtctatcaagtttgttgccactttttggctgtcatatcacaccgaattttttgtctttttacgtggaagccaagaaatgacagactgcatacacaaaaaacgaaaaatggtgaaagaaaaggaaagagagtggtggactgtagaattagggaatacactgggacagcagtgggtacaagagaacagaagagtcatctgagggacacgaaagaatgtctttatgactttgaaggatgggatgggcgatagacttctaggcactgtgagataccagaaatccattaagtcataggataattccacagggtctcttttgggggctgatgataactcaaatacctacctgtatttcaaaaagggtaacattttgttcttacaaaactgcaggagtataaaagtacagtgagtgtagataggaagtgaagtcaagcagctattgtgtttttctttctgagacgaagaccaactacaaaagtgaattctctcagcatggtctttttcaaatttacaggactcctgttgacttcaatagctcttaagttttatcttgtactctctacacctgtagctactttcccacacagagtcattactgctcatcatggtgatgaaccagattcatcaagatatgtttgaattgtattcattacattttaagaagttaggtatatgtgtgatacattttagaaagatttccacaaatgtatttaaactttgggtagagtacttaaaggtttaagtgtatctttttatctcacagaaacactaaatgagacttaccagttggacatagttttacaactaaaaaagtccttaaccatattgtttatatattatatagtaaaatagggttggttattgccaatttcaaaggttttgaagtgaggcagaactgggtttgaatttctgtcttgtctcttgcaaactctgtgaattttgtacaagttccttgatctctgttttacaatttcctgatataaaaatggatatgttaatttgtctatcgcgaggagcagtaactagtgatggtgtatgtaaaacctttaacagtactgtataatatttaaaaactcagtttctggagccttctgccacttagtatccacatgaactccagcaagctacttaacctgtgtttctgccccttagtatccacatgaactccagcaagccagttaacctgtgcttccattttttcatgtgtaaagtagggataataactgtacccacctcatgggattgttgtgaggactgaattaatacatatgtataaagcaattggaatagtgcctgatgcgttgtaagtgctattatgctgttagtaccgttagctacaagttcatcaaatctgaagtaccatggtttgtaagatccacaatttttatgaaatggtgaagttatgtacgtcaggccctatgaggtcctgaagtgttttccagataattaaagacaatatgttgtgttcaataggtttataatacatatagtagagcaaaacactaaagaccatgggttctggaactaaattgccagggttaaaatttccactcccacttattaacttgtcttgctatacacactttattttctcatctgtaaaatgatgaaaataatagtgcatacatcacagagttgaagtttatatgtaagactagaagaaactagttcagatacaacctgaaaaccaccggatgaaggcttttttaggtctaaagttatttgagttttttgtatataaacagaataaatctctgaaaacgctcataaagcccatacttgggcttaggctagagcttatactgtttctccagtgctagatcctctatttcctgaatccaatgcttgcttttactttttttaatcctttgttttatagaaatatatttttcacatgcatcctaacaaaggagtcatagaagcttgcatagttgaatatgtcatcattctcacatttaattgaatataagcttatgtatataattgtaggctgaaaataattttgcctcagaattatgaaggcattctgttctgttctctcattttactattctgtatcactgatcatagggctatgttgatctggatttgtcttctgattttcttattttccttctcttttttcattaaaaaaatcttaaaattgtagttattcagggacttactaaactttttctttcattgaatgtttcagttattttcattttctaaaagttcttactgtttctctgattttttacttcccctgcccccattattactgttttttttttttaatgtgacatattgttcttattttgtggttgtaaccatcagttctaatgtctgtgaagatgttaattgttttgccttaaggttgcttctgctctttgtattgtatttcctctgagtttccttccttccttccttccttctttctttcttctggttttagtcttttgtgttggagacgttttgtcaaagctttggcttaatgtggtgctacatatttggttgaaagctgtgtgtctgctagcaagacttgttgcttagatagcttcattagtgtgatcatgcaaaaagctagggattctgtatgacggtagctatatgtctgttatctgagttcttaaactttcactactggattttcagatattctttctgcatggtgtatatctgcctgccaatatttaggaaccgcttctgtccattttaaccttgtcccttgactcctctctgttttgcctggtagttgtagttcaggaacatttctgggtcaagatacctaatattctgaacttcaagggggagaaaagaagagaatatgtaaagtagggtagtaaacctatgtgccaaaatgttctgtatatagatttttagagttccctcagtattcagcgctaacattatcgctgtctttctggggtttcattaggcaaattatcttgctgttgatattagcattctctgttacctagttttcagcttcctctctgtgcagagtgtgttcctagttattctgcttcaatttttcattttccaaaacgatgttgaatttcttgtttgctgttgtttccctcacccttctccttgtctttctgcttttatactattttgccattttagtgatgtttcagaagggagtggagtttaatatgtgtgctcatctgccatacttagcagcaaaaacaacagctagctagcatttgtggagtgccttactatatgctagactttttctaagtgcttttgtatagattttcatttgatactcaaaccaatcccattaaacgcatactactgttatccttattatacaaatgaggaagcagaataagtaactgaccaatttcacagggctagtaagtgacagaaagatttgaatccaggaactgcttgtggaacctgaggtcttgatacttttagtttattaatatggaccagaagcctacaatacatacttctttagacatctgagttacttaaactaatatgacaccttaaaaatgacttccaataaggcaagtcactagattttcatataaccaaaacaaaaacctagcagcttataaatattcagcatacacaaatacatggaaattataacttatagagtgaagagtaatttttctggtaacagaacaaaactttaatataaacgattatcacttaacaccattctcctaaatatttttttaaaagaattggcatttactgactgaactaggacatagtgttctaacacactaggaatgattaaaatcagaaaactaatatgttttagttgatcttagaattttttttgtttaaaaatttgagagtaggagaaatataatatttgtttagaagtattaaacattataaatagacaaaacttttatttctttaagaaacattctagccaaatacttgaaatttaaaatataaatttagttataatttgtgtcattttaccagtttaaaaaaactatgttcaatacagtttgttttatgataatagtaagtcacctctgttttgtgtaatttttctattcttctctttccttagtgtagatagaaacctattgccttcctgctgaggatataatttctgaatctagacgatgtgctgtcagcacagtgaagcaggaaattattctcctgtgtcagctgctgctgttaaagaataaagaagttttgtgataggatgcatttctgttacctctactcacaaatcttatatgacatgcaaatagatttcaaaatcaagagagttcaaagtatttagtaacaaaagatctaaaaattccaagtgtattttaaaatgctgtgctttttatgtttcaatgttagtagtcctcaaacttattcagcttattcaagtaatagggcaggggtccctaaccctgctctggtccggtctgtggcctgctaagaactgggccacacagcaggaggtgagctgtggggccagctagcattaccacctgagctccgcctcctgtcagatcagcagtggcgttagaatctcataggacggaaaccctatcatgaactgagcacgcgaaggatctaggttgcacactccttatgagaatccaactaatgcctgatgttctgaggtagaacagtttcatcccaaaaccatccccccaccctgtaccatgttgtcttctgctgtaatagagcatttggaaattatattcttcaggacactggacatgttagtatattaaattcaacattggttaaagcagcagcagtaataataatagttatatgaaatttactgtgagccagagatggttaaaactacatgcttttcatgtatcagctgaattagttcacaataaatatatgaggaaaagatggcacaaagattaatttgcccacattgtgtgtgtgtattcctttttatatgtaaatgtgtgtgtatggtatgtatatatgtttatgtgtgtaaatatatatatttctaatatctatgcaattagagtcagggatgagatttccttacattccatccccaaagtctgtccttacaactaccacgttaggctaatagaattttatacaaaatctgatagattctattatagtataggcaactggtgggagttatcacatattgaaaattagataaaaatctcaaaacgaggcaattttatcccttaagctaattcttctattaattgaggaagtctgctgttacttgatttttatccccaaaagcctcaggaaattatagaacaccactttgacagtttctttatgtgacatagacagaaagtaaatttatattttcttattcaataaaggcttcattttactaaatttatacaattactgatttcagtaacacatttccacaactttgtggtagatcaactataatctttttcctttgagaaaattatttaaagacatgtattattaaatatgacaaatcatagacatttttttaaagagtgctaaaaaattcatgtacctttcaggcatccttaaagtagggagatagtcttagagtcatgatatcagtttggtgtgtgatctgtctttaaacattatattttaattgatatatagtagatgtgcatatttacaaattatacaaaatgtattaaattacaataatttattacaataatttaatacatacaatgtaatatattacaataatttaatacattttgtataatttgtaaagatcatatcagtgtaattaggatattcacctccttaaatatttatctttctttatgctagaaatattcaaactattcttttgtaattagtttgaaatatacaaaaggttactaaagtcactctactgatgtatcaaacactatcaaactgtatatttgtacccattaatcaacctctttttatccctccactcaacccttcccagcctctgataaccagcagtctactctctgtcttcatgagatccacggttgtagctctcacatatgagtgagaacatgcaatatttgttttttctgtgcttggcttatttcacttaccataatgactaccagttctatccatgttgctgcaaatgacaggatttcattctttgttattgttgaataaacttccatgtgtatgtggtatagaatctatcttgaatatcattcattgatatttgtatttgtaaatgtcaacagcaattaataataagaggatctcatataaaaaaacctgtctacatcattttagaatggcattaacctttacagttatcccatttttataaatggtggttaaataacattctcagaattatactaaccagtattcaataaatgatgacggtaagaataaattccacatttgttggattcccaaacggactttaacgagactctttaatgtggctaccagtatattttatatttttctaaacttgattactatttctctttttaggaaagatgcattatagccatagaagtgacaaaggaaaattaaataggaacattatatacagtagtgatcgtaccaggagtatggatgaatctacatgcttcagagaaataatcgcaactttttttttaactttaaagggtagaaaactactactttcttgttgaaaatttatctcaaagttaatataaaatgatcttctccctataagttttcttttgcatccaagcgaggtgcatgatatgtaggcaaggaggggaaattatccttgtgttcttctaatcagaagtgttctgttttactttgctcaaacaatattaccttattccatcctaatataattatgtaggctagagtattttagaatgatataagtatggtttgaatatttttaaaaatataaccttatgtatcaatattgttatgtctaaggcattatctggctttctgaaatgaaaatagtattttgttaaatgttgcaaaatgacctgtctaaaccatttttaaaaataactttcctatatagaaattatacttttattgagttttatgtcatagtttgtcatagagtatgtcatggattattgactattactgagaaaacagtatttttgcactttaattttttagtttacttctatttccatgtaattatcctaaatcctttgcttcctgaccttcttagtagaagagctacttttctttaattaatggactgttttttagagcagttttaagtttacagaaaaaattgagcagaaagtccaaagtgttgccatgtatttctttttgccccaactccctctgctcctaacacagtttttcttactattaacaacttattattaactactttgtttagccatccacctgtgttgaaggacatctttacttccaagtttggacaattagtgtggtacagttggtacaattgatgagccaaaatggagatattcttattaactgaagtctataatgtatcttgggattcattcattacgttgtacatttttatatgttttcatatatatatatataagatttgtaaaaagaaaacctccctgttttctacctgtccatttccccttttttccctccgaggcacccttggtaaccactgacatttactgtctctatagttttgccttttccagatcatcatttaattggaatcatacagtaggcagcctttttagattgacctttttttttttttcatttaacaagatgcgtttaaggttcctctttgtctttttatggcatgttagctcatgtcttttaatcgtgaaataatattccattgtatggatgtatcactgtttttttatccatccacctgtattgtagggcatctttgcttccatgtttgaacagtcattaataaagctgctgtaaacttttgtgtgcaagttttcgtgtaggcatatgtttttaattaattttttgtaaataccaaggagcatgattgctgtattgtatgttaaaagtatgcttagttttgtaagaaacagttaaactgtcttccaaaatggctgtagtgggctgagcatggtggctcatgcctgtaatcccagcactttgggaggcagaggttggcagatagcttgagctcaggagtccaggactagcctgggcatcatggcgaaaccccgtctccacagaaaatacaaaaaaaaaaaaaaaattagccagtcatggtagcatgtgcctgtagtccctgctacttgggaggctgaggtgggaggattgcttgtgaccgggaggatgtcgaggctgcagtgagcagcctgcactcaagcctgggcaacaaggagagactgtcacaaaaatcaaaatggctctactattttgcattcccaccagcaatttccttctgttgttccgcaacctccccaacatatggtgatgtcagcgttttggattttagctgttctaataggtgtgtaatatggtatcttattgttgttttaattttcacttccctaaggagatactatgtccccacaaaattgatgtgttaaagtcttaaaccccagtacctcagaatgtgaccttatttggagatgtaatcaagttaagggaaggttattgcagtaagtttgaatccattatgactggtatccttataagaggagaaatgtgtacagagatgtgcatgcagagagaatgccatgggaatatgggctgccatctacaagccaaggagagaggcttggaaagatacatcctcaaaagaaatcacccctgacaacaccttattccctcttacaacctccagtacttaagccacccagtttgtagtactttgttataacagtcctgatatacataagatattgagcatcttttcgtacgcttttttgacatcattttatctgtttaatgaggtgtcttttcagaccttttgtccgtcttttctaattgttgaattgtgagtgcttttttgatattttagatactagtactttatgaggtatgtgtttttccctatctgtggcttaccttttcattttcttaatagtgttttccacagagcagaagttttaattttaatgaagtccggctgatcaattttgttcttacatggatctgcttttggtgtatctaaaacatcattatcaagcacaaggtcaccctgattttatcctatgttatcttctaggagttgtagagttttatctttggtgtattttgagttaatttttgtgaaaggtttatgatttgtatttagattagttttttattttattttttattttttggcatgtggatgtcgagttgttccaacactatttgctgaaacaaactatcattgcggtattgaattacctcctctctttagtgaaaaatcagttgactatgttgatgtgggtttgtttctgggctttctttatttctgttctgtccattgatcaagttgtctgttattttaccagtaccacattgtcttgattactattgttttgtaaagttttgagttggatagtgtcagtcttctagctttgttcttttcctttaatattctgggccttttgctttttttgtataaatctttagaatcagttaattgatatctgccaaataactcactggacttttgatgggtattgcattgcatctatagatcaagtagggaagatctgacatgttaacaacagtgagtcttcctctctgagtacatgaaataggtcatttacttagattgtctttgatttctttcattggaatattgtggttcttctcacatagcacatgaacatattttgttagttttatattgaactttttctatttttttggtgttagaacaaccactttttgcacaattgtaagaaacgttaacataagtcttagaactagccccaataattgtgtgataacaaattacggtagcagattatttattcctggttgacataagtgataactgttgttgaattaaatattacttatgctagaaaagcttagaggtatttcatcacaacttgattgttttcaagttatgtaggttgatattattaactaacagtgaattaacgtgttagtttggatgaattgagtttccatgatttttcttacactttaaaatttacttgtaactgatatttctttctacatcctgtgagaaagtagagtagaaaaaacgtataaatttagaacttagttttgtaatttttgactcacactttctcttcagtgtgttgtacctctgagaaggaatgactgataaaatatgtgttgaatatacatgtcataatttaggatgatgagtgattgttaaatgaatgagaacattacatgaacagttataaacatcaatgtaataggattctgtattctcaaaagtgtgacatttaaaaagagacaaggccatgcataatttaatcatgtaaaatactgataccttaatttatttaaaaggaattgcctgatttttaagagaatgcccattaaattttaatttaactattaaatgcctggagagagcatgattccatttaggggaagattctgttattaaactataagtcagagcaaagtattctctacaattgtattttaggttactgcaacatgaatattgaaagtgttcctataaaacaagaatccatctaaactcttttttctttcttttttagtctttccttctgtagagcctttttgatctacaagcttctaagtttggtgtcttatttaggagatattatgttttagcttctgtaaaacctagtattttctacaaatgcacgaaacatattcatgttatttaattgcttaatattactgtttacaaatagacaaatatttctgtagcttttatacgcaaggaaaacgctaagaaatctccacaaaatagccatagttaggtaattgctggttgttcctaagaataataaataagaatgtggtaatttaggtattcagcctagtattcatagaatgttttagagaaatgaatagtcaaaatcactacctcattggtactaaccattttataatacagtatgaattgggatggtgaattaagtgggaatgggaacatggagtggttttatttttctccagtgtgaccttttttgtttatgattagtcaaatcactcttttttgtttcttttactcatctcaagatgatgtcatagatttctgagcacttcaatttaatctgactttaatgtagtaaagtcagtttaacttgaatttaacctcatagccaacctataactcaatttctcttctttcagtcaatatgacttggacttttctaggagattatagagtgttggaagaggttgaagtctagtcattctctttgctcaatccagtgagtggagaatgatctgttttgttttgtttttttttctcatatacctatttctcctcctgtgtgctgatgaagtaaggggaaaggtggaaagggaaaaggctttcttatgtaagtagtaccttttgttccctttttttctgtttgtgctccactgcctcacactgactagtcctccctccctccctccctcccttccttccttctttctttttcttccttttctttctttttcttccttttctttctttttttttttttcacccgtgctggaatgcagtggtgcagtcttggctcagtgcagcctctgcctcccaggttgaagtaattcacctgcctcagcctcctgagcagctgggattacaggtgcatgccaccatgcccagccagttttttttgtatttgtagtagaaacggggtttcaccatgtaggccaggctgatattgaaccggggcctcaagtgatccgcccacctcagccctgcaaagtgctgggattacaggtttgagccacctggcccggcctagtcctccttctatgaggacgggagaggagtactagctctctgatgaggtacatgtacaaaactttggtggggagcatgggggttgtttttggagtgtcataccaaccatttctgaattgtctttttctattctttctcaatttctacctctccactatattcatagcctctggctgcttgagtccccatcaactggaggctcaagtccagctactttcacattcactacactctttgcttttgcagagagggagtccaattatctgtaccttgtcttccaactccatgtcttttctccctctcttcaaataggcacagagaagggaagtgggcatgggataataagcaactctaacacacaagcagaggtccaactgagaggtgagataccagtcttcccttcttactaatcttttagatgaactctcgcttgatttggactctcagcaacagcactattcagctacattaagtcagtgaagcaaactctgatgattgcctcatgatggggacaggagaaggcacttctggataaggaagaactaaggaaggtaaagatgtttaagttatggaggtggagttggctctcatttgtttaagtctgtcttccaaatataaaatacttgatagatgcctttgttcttagccttcggttctaattgccagcccctgggcgattggaaaagtgctacctgatatctcattatgttcttttacctgtcttgcctagtagttttattcttcctagctacagtgaagttcattccactacagctgctgttgtaacccttttaaacaggttatatcattccctcagtcaaaatactgtaatggctttctaaaacagtaaaaacaaaaaacaaacccaaagtccttattatggcttggaaggccccaggtgatctgactgcaggttaagtttttgatcgcatgttcctatctcagagctttgctatcattctaccatctgccatctgtatgtggtattctaaaaccccagagagtagagtcacttcattcattcttcatttaagtaatgctgcttccttagtattctctgaatacatttaaaatagtatatttgttctcttcccatcacttgctttatttttggtttatacactaattttcataccttaaattgtatatttaatagttagttatatcacttacattaacatgattctcaagagggcaggacattgacttctttgttcaccactttactcagtgcctaaaatagttcctgacccataggaaacaatggattttttgttgttgagtgaataaatgaattaatgaattctagctattagattcaatctttagaaaatatatttgacttatcctacattatttacttttccagtgttctacatagtataattttaatttttatcacttttattatttctaactgcatattcccattatcatcaccccagttgaatcatccatacctctaattgattttctatgctgttagaattatttttttataaaatacttacttaaatgccactattggggtaaaacattcgaaaattccttaacataattggtcctgtgcctattcttcttctctccgtggttcttacatgaactctattccactcacatccttttcattgcagtattctgaatgctaaactatgcttctctttacttctgtgcctttttacataaaacctactgctatatatttttcactgtgtgaatacattaatggaacttctactatgagaagagtagaaaacactctttacatttgaagtagttaggaaccacccatatagttgttgtatgctattaatttatatgtattagcaagtctttttcctcactgagtatctttaggatttgttaagaatttacttgtcattttataaatgagtatttaagtcaccacagtcttgaggagcatacactgttttataatactgttttgtaatattgtgaattattttaaaggtgagaataatctttttctttttggaggatatgtatgtatgaatggttattatatctttatatctacagaaaaatacctaaaaggagtagagaaaatgatacatacaaataaaagtattatgtgcattactttttaaaaaaatgtgatcccttgctagattcttcaaatttagattttttgtttgtatactgttatataaataaaagactgataaatgaaatgacattatttatataaaaatcaaagcaaaatgtttattatatctgactctattccaagtaagtacagtgtgtgagaagggaccagtgtggctttttgagaaatgcagaatccataggtatgtggcaggattctaaaacttatacttaacatttttattttgaaaataatgcagaaatgcatagtttgtgatatcgatctattttagaagacatggctaaatcaaaaataatattatgaaattacgtagcagtaaacaaaggtggaatcccaaagttatttgaggtagctcttttgaacaattattactattactggtaataataggccaggtattatatcatgtgtctggtatgcattaattcattttgtagttggactatcccttcaagttactattattcattttacatgagaagaaacagctgctcatttacacatttaattttagaaggattaattctgcttgttcagttgggtttcttgagtataattcatcaaagtttcttaaactacatgagaggttacagagccctttaaaacctaacaaaatcttatggcccatttcccctgaaaatgtatgtatggactcatgtatttttattttagtatgcagtttcctagaattcctagatttcttaaatttcatatgtggactctagattgggaatctctggtctatgtcttttaaaataaagagccacatcttgtcacttaaggaaaataatatatatttacactgtgctttattatagaaagaatttaagaaagctgaaaggaaattgtcagctatctctaactccactgagtatatgccaaatcaaataaattctatttaattaggaagtgagattcagaaaagtttgacttatggtatgctaatggtcaggtttgttggactttgtcacaaagcaccctcagtctgtttcagaaagaaacctaggtgtgaatattttgaataatgtaaagttacctcttcagagtagtatatacatagtagctgtgcctagagctaggagatgagatagtaccttacagccttttgattcagtgatatttctcagagaataattattgaatttgattttctgattccatcaaagataaattgtgtggacaggttgttgtagtaaaagcagaatgtggtaataattttctgtactaatgagctaaagtgatctcaaacttggttgattcattctttatatgggctaaggatgaagactgtgtttagggtctatcttaatttgattttggagaagaaaagttgtctttttataaaacatcagtagttgttgaggactaatttcaaaaaattctttttcaaatataaagtaattcggaatttcagaataactttttaaaaatcccttttagatattttatggtacttgtgcttcagttttgatgtcttacctattttgtttttttctcccttgaattctcatctgaaccaaaaaataattagctgagcagaataaagaatcttgttgtatatgtttgcccggttttaggtaaatttctgtagaaataatgttataaatcaatataagtatttgggttttattttttaacatatacgttttaacatttggtttattgttattttgtgaattgagtaagtatatttctacgtttcctgcaaccattcttagcattcaatttttaaatgaatgacagcccatctgtgtaggtctcttgtgactgagtgatgtattctgttttgctgtggcaaagttttcagacagccactttgttcttatatattttcattttctatagtacttttcatccctgtatgtatgtacaggagtcacttcacccaccaccgaattgcagccacttctgaggtggaacgcagcaactgtttaacagcgcactttcccctaggtgctgacagctgcagaagaaattgtacatggtgctgtacagaaggtatttctccactgtgccatctgcagagtgaaactgactaggagtactacatagactgtaagtttcttgtgtacctgccctagactggaaagcccaataagagaaaataacaaataactgggaaacatcatctaaaagtgtattgaggtcagttaaacttagtgctgctctccctggctctaaattttattttaaggtcttctgattggtacaaaattaaataacaaatagatggatgcactcctttttattctaaaagcaaatgaaactaaaatgcttttatcaatattcttcactttgaatggaacttaatcatattgtttttaaatatttttaagtaaccaaatcaatattataagatttcagagccatgttcttaaaatagcaaaaaaaaaaaaaaaaaaacttgtaattcaacaggaacgtcttaattaaccttgcttccagtgttttatgtcttggttttaatactttcttttggagttttgcaacaaagccagtttatgatgaactagttttgattcttaggattagaaacaccaattttgacttcttttttatttttatttttaatttttctgagatgaggtctctctctgtcacccagtctggaggatggtgatgtgatcatggctcactgcagcctcaacctcttgggcttaagcgatcttcctgcctcagccttgcaagtatcaaagatagcctcccagctatcaaagtagctggaagctggcactacaggcatgcgctaccacaactggctagtttttttcttttttctttttactttctgtagagatagggtctcactgtttgagactaacctgatctcaaactcctgacctcaagcgatcctcctgccttggtctcctgaagtgctgggattataggtgtgagccactgtgctctgctcaatttttttttttctttaacatttggggaaaaaagtggggaagagaaggaacagtaaatatttgaatttctgcttactgtagttttagtctctcccatttaattatttaatgagattttcttttgtaaaagcacttttataagagtgctgtctttagtaatagtttggcatgtttatgccttataaaatagagaaatatcattagaaacagctgtgtctgttgttacacaacatgataaggaatgttatattttgttattttagggtttttttttagtcaatagtatgacattttatctcttttctgctacatttatagactgttctatgtgaagaaattagaatctcaaacttcacagagtcttaatcatattaaatatggtgtcatttggtttaggtaactttaaattatgtgtcataagttaaattataatgtgcacatatctatgtttatatattcttagtcaaagcagataaaaaataacttcattctacagtttgtttacttgtaaaatgaggtaggtagaagaaatgattttctagggacattttaagtgttttccttttaattcagggttagtagtgtatgtatttagaattgtaccttaccaagatatttgggcttaagtgactttattctaattagaatattatttgtgttaattaaatgctgagtgataatgttttagaatcaatagagggggtcggatttcctacaaagatttttaattatctatctaattttgtagtgtagataactccattgttatgaaatataatctttggacaatacagcacagttcttagtatcttattcatcatggaagcataaagtgagtaagaataaaaggctttacttacactgagtggaaatttacttaaaggttaccaaaaactcatattgtaatgaggcttaccctctttacttgcatagatttagtatttcatttaatagtcaaagcactaaagaagtaaatgtcaatacttaaaaatttacagtttacacgtaatatacctatgtatctctagccaagagagtatttttatcaatatatgaaatattcgaattgctataattgattctttggcactttctacagtgtaattgtaagtattacttaatcccattcattttatttactgaagtcatcagtatttgacagaatagattatatgttttatatactaaattttggttgaaaaggcacaaactatacctgctttgtgtgtcctggtatctatttttaaattatacaagttattttttatattttagactttatgtagatgatagaagtttggcaacttacttgattcaatatttagccatatgaatcttgtattttattatacccatagtgtatgggatttgaaaaagaatcagatgggaactttttattgaatatatttctgtattattgaatttaatgaaaatatactgcttgtgtaatcaaaaataaactgtcggtgtttcagttaaattaattttttggaacatttgtttagtttatttagagatgatcaccatttcataaaacagatacctcttatctctattggtgattttcaaagggccttcctcatactgtgaaaggccagaattgtgggcaggattattacttaattagcactcacttaataattttggaattcagaaataaattataggttatgaataattaaactttaaggaaatacttatttttcatcctttctcattataattttctatttgtaataggaaaaatgaagcaaatgcataaattatatgaattttaatttaatttaatttaattttatttttttgagatggagtctcgctgtatccccaggctggagtgcaatggcacgatctcggctcactgcagcctctgcctcgcgggttcaaatgattctcctgcctcagcctcctgagtagctgggactacaggcatgtgccaccacacccagctaattttttctatttgtagtagagatggggtttcaccatgttagccaggatggtcttgatctcctgacctcgtgatcctcccatcttggcctcccaaagtgctgggattacaggtgtgagccactgcacccggccaagttatatgaatttttcagtacttatgtatgaatgataaatacttagacctcttgtgataatgtcctggcaacatctagctttccattagaggctttaagaagagatactagaaccagctgaagaaatagtgaaattggtgagaaaataggaaactatatggcaatatatttttcattgcagaatttattcaatttaaactaattttaaagaacatacattttaaagtagaattttagtccataattttaaattctcagatgttctcagttttacaaaatactcttttaaattaggtacatatttttatatccctctcaaatagataattttttaaaaattatttttcttatcagatttatctgaacaaattttatttgttagagagacgaaacaccttcagatgttttactgtaagcaatagggagatgatttttcaatgtaggattaggtggacaattctttttatcctaagtggtcaatatttgagttacttcatttgataatcaagctttagtattttatacaccatttcttattatccaaaatataatttatattcctagactaatatatggaatttgaatttaaatgttttagaattaaaaatgaaaaatgtttttttctaaatggtttccaatagattaatggagatataatactcatatctttgcttttcttattttatatatcaaatgatttctgcttatttttataaattttgcagttatttttcaatataaattgaattcattgaaaattttaaatgtataagtttgcgtaaaagactactgatgccagaaacctcattatctttaattaatcttaactgaattaagcatttattactttaaaatttttctgtaattctgaaatttctatatgtcttgtgggtaaatgtgtgtgtgtatatatgtgtatataatctttctaatgtattttctgaagtgtgatctcgaatccttactgccactttgtagctattaatcaagtgtaaattgcttaacaactttaaggttgttttttaagtctgttaattgggaatcatttcacctacctcacagggttgttgtgaggaaaaaacaataaaacatatgtgaaagagtgcttagcatataatagatgtgcagtgtatgaaaatgagtgttaccaaaccttcagtggcccccattgtcctcaggataaaatccaaattctgtgtcatggtgtgtgttctggctcacccttatgtcttcagccccatttctttccttgaaaactgcacatattgatttattgatactgtagtctttatagttcccaggatatatcatgctttcttttggcctttattggaatgcaccattcttttaaactacttactttcccctttatccctaggctactatcctctgtataactcaacctcatctgtcaggctttgctttctatttcttcttcactaagatgtcttctgtcccttcttcctcacttatatattttcttggatgatccttctgtgtttattcttttcagcaattattgcatgtaatgtaactgcctttgtacttgtctgtttcctctactagatgtaaagtcagagagggtggagcctgtcttatttgccattttcctccactacttaagagtttctgtaactcaggaaatatttgaacattttataagtagatgtgttccctaaacaaattcacaacatatataatatgagtgctactccttaagtaaagcaatttggattctatatttataaaatgtatttcaggtcccacaataatcataacaaaatgatggccatacaattggtcttctttgcccaccatttatcactctaacgggtttattagaagagatagactcattcagggtgcaagcagagagttactttattctctctagtcactttacatgcagttccattctgaatattatgttttctgctccttgataaaatgctgtttaagtgctgttatttgcatctctactctattcttgcttctctgctgctgcttgctttttttcttctcaatttttttctttctctctctcattctttcattccttcttttctcactctggcattttaaaatagactaaattttcaagtaatgaagaaaatgtttaatgaattaaagttttaaattctcctccaatataaaatgtcttttctacatcaaccttgctcaaagagggtttaaaaacctgaataaggaaggaaataggttggtcagctagtaggctgttgcattaatttttttttttttttaaccttatgttttcaccctcctcactgtgcatcacctaggttttctgaagttcagggattagaagtagggaagaactaattggtagtaaaagtatgttggaagtcttaatggattcttctcttgcttttctggattcatcaaagacttctagtatttggagataacccaactatagttccttgatgcggttgacactttatttgtctggttttgactaccctgcttagtttctgactttctggtttatctctgtcctctttgttttggagttaccttgtttttcttttttctttttttatagtcctttaggtaagttcctttaaaaatggattaatgttttcctaggggttatctgtcccatgggaaaatatatttctttactccaccaacctactaaagtactggccaattctaaagtagtagcccagactgagggcatgagtctttaattagttaccactccttgagtgccctatattctagatcatagactaaattctgagtgcatcacggtgctacttccttctcaatcaatctataagctgccttccctcagtatatgtttatagtttttatttgaaaggtgagctaaagatagcctgagcaatttttggccacattcttaccaactgtagcctagatgatctgtcacctcatttctagtacattgaacttgttctcagctttggatcattggctgaaactgagacaacaagaaaattctcattttaatatcctgttacactaccattgtggcattgaggccataatgggaagcttgcttttctatgaatgtccatccatttctgtaattccatgccttgtcttatgctgttctgtcattttgggatgtcttttctacctttttttccttcggtattctacccagtcttcaatgtccaagttaagtaaagtctttattggtcttggcagttagaataaatatttctctctagtgtgttctcattaatactttgtttcatgtgttattatattacttatagatgtgtctgtctctctgaccagattatgagacagattttgagacagccactgacttacttattgatgaacttcttattgcctagctcctgttatgtgtttgggacattatatgcttaattaatgaatctcttctgaacactcagattgaagtttataaaattgttaagtaattaatacttctatctccttatttatttttctccttgttccaaaaaaagtttgagggatcaacagttagtttctatgccttttatcatattttttgctttttgaatttttaatttttatggatacctaatagttgtacatatgtatggggaatatgtgaaattttgatgcattcatacaatgcgtaacgatcaaatcaggacaattgggatatccatcacctcaagcacttatcgtttctttgtgttaggagaattccaattccactcttctagttattttgaaatatatgattattactttttaactcagtggtgtttatttattcttaggcaaatttattttaggttttagttctggtttgggctaaattaattttctcccattttcctttgacttctttatttttctttctctttaaatttcagtctctgtagctaactatgataaataaagataattagatattccaagtagcttcaagttgcaagtaaaaataactaattaatttaattaaatagctgtaatgatctgtcaccccattactacttttttttttttttttttgccattacaaaattttctgtttcctttttaaattcttcagggtttcagattccatctttagatatggtcagaaatgatgaaagacaagttattggtcataaaaagggttggttgtaaaagaataatattcctataatagaaaattaaattgttatatttattgggagtaaagttctgtttcattcagacattatcctgttattttgagtgattaccctaaataagttgtctcaatttgaaatgcagcaccgaatttctgccattcctcaagagaataataatgcagtctttttataataatgcagtctttattactgaaatttagtcaaaagtagaattatttaatacatgtagtcaggcaaataagtaaaaattagataaccaagaaatccaaaaagcattttaagtagagaaaattgaaaaattacctctatttaaaaattctttttcctggaaagttccagatgagtacagatggtatactaagaaaagagaaagcatattttcccttcaaatcacattgttaaaggctgaaagatgataaatcaacttgccatataatagcccagtgatcttttttcttccttattttcatgttgttggaaatatgaagtttttaatagatatgtttaccttacctaatgacttgcaccaatatgactggtgacattttaatatttaattttgataattttatctgttagcacttattggcttaggaatcttagtgaatggatattctgacctttacattaggttaaatgatatagatggcagatctcagaatcagctcaataaggtgccagatattataatatataatatatatgattacttgtgtgcagtcatacttcttatagcaataacattttgtgtattttcataagaagaaacaaactacaaaatatggccaagtgagtctcagttttaggtatcaagaaacactgtttatccctgtgattttccctgctcctcaacccttgcaataattcaaacattctatttacaacatcagtaaaatacatttttcttgtattttccactgagtttaaggtgaacatcgacttaggatggaactttgagattaggaagaacaaaattctgtttttctgtttttgaaagcatactcggggaaactaaaatgcaatagactttttggcatgcatctagtatgtatcaattataaaataggaaaagtgatgcctaaaaatataatttcctaaaatatgccacctgaagtatatttcttttaaatacttgtttttccctttgtttccttataaatggctcattctgtttttgaattgtaagattgtataggactttagaaaccctcttttagtgggtccagttaaaaagtaagtgattaactgtaaattttttcatataccttgttctttatttcataactaatcctggattgtgttcctatacaaaataccttactcatgttacagggaaagtgcaaataagaaaacagccatcaattgatacttggtttttatgcgtctctttgcaactccaacttcacattttcccactgtgctttaaagtatgacagattcagcatgcctgaaaacccaaatcagaagttccctattctcattctaccttccaaccccaatcattctttgcttatgtcttcaccatatacttgtgactgtttcctctccttttacttaaatatcatccaattttttttctggatcctaaatattttgcctttaagatttgtattgaatcagtatggcttattctatctctgttgataaaactctagctcattacttaccacaagaagtgataagtttttaaaaataggtttgtgtactagttttaccactgtatttccttaagagtggaaagcacgtattgttcacctttgtgctttccatggaggatattctcataaatcatttctgagttcactcaactaattgtgaagtagttgattcctggtatttaagtcttaaaaatattgaatggattgctgaaagtcagatcagtgccacagtttaaaattaatctcacattattccaacttgatgatactcttattagtgttaccaccaggaaagtaccttaaatgaattctgaataattattaagaacacttggtttgctactaatgtgaaaacaaattttacttatagtatgctagtacatgctggtttgtaggcttttactataatttagatgaactgagttgtctttttgtttccatttttaaaaatatggttacatgccattttgaggaaataattgtggcaaaagtcatctaattcagcagcccccgacctttttggcaccagggactggttttgtggaagacgatttttccctgagggggatggtttcaggatgaaactgctccacctcagatcatcaggcattagattctcatgggaagcacgcagcctagatccctgcatgggcagttcataatagggtttgcactcctgtgagaatctaatgccccagttgatctgacaggaggcagagctcaggtggtaatgcttaatgcttgctcacctgtggctcacctcctttgtgtggtcaggctcctaataggtcagggaaggggtgtgggggaagtggggatggctgattggggacccctgatttaattgtttaggtctctttttttacattagtctctttgtggttccttcagagataaaatacaaatgggaaacaagcttccttggaaatgttacaaaagacttaaacccaactactattctgagggtggatctgatttatgctagtaagaggacacaatggcctcctaagaggagtaactctgcagcaggctatttttgcttcttgtgctagaactttagagatagcttgttttttttttcctttgcctcttattattatagtctttgaagataatcactagtttctgaaaaattttattacaaaagtactgtcattcatatcagactgaatttgaatatatgcttatccttgcttttgaaatgtttagttaaattatttgagttgtcagtgttatataaaaataacattttaaatgcagtctcttaaaaatattatttcagtctataactttgaatgctttgattaatataatcctgttttcttcccatttctctcctctttttcttttagtatctatgtgtatatatctttatctacatctatcatctatctataaaggcatatacacatatatatacataagagctcttaattttataaatccactttttatattctgatgtctcagttattttcttggaaaagaacttttcaagtcagtttaattttattttgtcttatttagaaacaaaatctgaagcctgtatgttttgttttccagatttgtctgtatttatattaacgttggtgtgtgttgctttcatattataactatcacaagttttgtggcatttagtgaacctaatgtaatttacattctgttatttgtataatctgttattcttattcatcattcattcattcatttcttcattcagtgtttatttagtaatactgtgtacccggcactgtcctgcatgctggggatacaggaagtctctatgttcgtggagtttgtattcttgtaaaagaagagggagatgtgtaacccaaatagagaattttagagaggcataaatacaatgtaagaaataagggcatggtataaaatatcttgggggtatattttagctaggatataggagaaggatcatttgagttgaactctaaaggatgaggacgacgaaagtcacattctagtcatcaggaatagtaaagaaaaacgtccttggatcagaatgagcttagcatgctcagagaaaagaaagaaatgctgtgtgggttggctatccttcagaaagagaatgtggcaggagttgaggtctttaagataatgtacaggccagatcagtaagtcatagtgaggagttaaaattttaccataattacaatttgaagacattggatagttgaatgttacgaactgattaacactgaggaaattagtttacctgctgtgcagaagatgaacaagggaaaggagtggggggcaagagcattattagggggttattgctgtggtcccagctagaaattatggtgtcttggtgtaagtcttgtagtagtagaaatggtgagaggaaagatgttttggaggagcactattagaatttgtaaatggattagaaatggggtaatcaaaagtatcaaacataattaaacattaaatattctttggaaatacaatttaatcgacataaacttttccatggtaaaaatgtagtataattttttaaattacacatctatttttgattattagttttttccttagttttgctaaaataaatgacatcatgtcattttctcacctctctgccattgaatgtaacaatgatttttgatggcttgtcagtttgaaaggtagaaaattgtatcttgctattttactttgtttgtctttgattactacttagattcaaattttaatgtgtgtattaaccaactgtatttttcagttgtggattatttctagtcttgattgtttgggggatattgggtattttctttattgatttgaaaggccttattaatttcctgagataatctaaaagttccaacttgatttggctctgagtctttctgattctcttatgtcagtttccccctgccgtttatgctgtagacaatctggacacttctcagccaagcaagttttgtattgcctcttagcttttgcacttgttctccatttctggatccctcttcctctacatcttcactcatgactgtgagagaaggttcatcattcatgttccagttcaaatgtcatatccatagaggagctattcccagtttcctaatataatatcccttcttacatctttcacattctatcacattactgtctctgttttgttttctttgttctctcctcatagtcttttaaggtcttcacagcacttatcactgtctgaacttatttattacttacttattgcctgttctttccactaagaatgaaagaaccatggggacaggcatctaatctgatttgtttactgctgtactgtatggggctattgttgggcatatggtgggtaataaatacatattgtggagtggatgatataagggcattaaccatttgttataatcttatacttgtgttctttccctttttgccaattgtctctcatttttgcttatggctttttatatgtagaattttgcactttaatagaatcaaaacaatgaagcttttgaaatttaaaaaaactttccatttgagatcttccatttaccaatattctaatttgaaatgtttttgaatatagagttatcatttatttttgtgaattagggaaagtatttgaagataaaaaatagctcataagtttatttctagtttgattacatattttataacatagaaattatatataatttttttgtttttcttcacttaatattttaccatgtgcatgtttaaataatatacccttcatttttcacaagcatgattttaaaaatttctacactatttcatcttaggcatttgatatatttatcaatcctttattatatatttgtttcagtcttttttgctaatatacatttaacacagggcatattattgtatttaagttattgtgttcatttataatacctccattatgataaattctgaaacataaagtagtggatttcctgagtcattaggagtatagtatacacagtattttaagacattgagtattcattgccaaattatgctccagaaaaattaaatcagtttactctcctagtagtagtgtatgtatgtgtgtgtttatgaaatgttctaattcctgatattgtgtgcttttaaaaacttggcccattcctctccatgaatgccctctccctctaaaactttctcgaaaaactattagaatgtttgtcacatacaaaattaaaaaatttttacatagtaaagtctgttatctttcccccccttttttccattttgtgtttttgcttaaaataacttttcttatttgaaggttatgaatatgctcacttatggtttgatcttattttttatgttatatgcctctaatttatatagaatttaagatttggggggttttgagagtagaagttctcgctttattttttccaaatagtaatctagttatgccagctatatctttttaaattttttttaattttttaacatttttatggctacatattaggtgtatatatttatggagcacatgaaatgttttgatacaggcatgcaatctgaaaaaagtcgcatcattagcaagggggtatccttcccctcaagcatttatcctttgtgttacaaataatacaattacatttttaaagttattttaaaatatacagttaagatattgttgactatagtagccctattatactatcaaatagtaggtcttattcgttctattttttttttttgtacccatttaacatcccgccttctccccaaccgcccaccacccttccgagcctctggtaaccatcctctactttatctgtccatagttcaataaatttgatttttagatcccacaaataagtgagagcatgcagtctttgtcgttctatgcctgtcttatttcacttaacataatcatctccagttccagccatgttactgcaaatgactggacctcattctttttatggctaaatactccattgtgtatatgtaccacatttttttttttttttttgagacggagtctcgctttgttgcccaggctggagtgcagtggagtgatctcggctcactgcaagctctgcctcccaggttcacaccattctcctgcctcagccacctgagtagctgggactacaggcgcccaccaccacgcccggctaattttttgttgttgttgtttttgttttttgtatttttagtagagacgggttttcaccgcgttaaccaggatggttttgatctccaggcctcgtgatctgcccatctcgccctcccaaagtgctgggattacaggcgtgagccaccacgcccggcctatgtaccacattttctttatccagtcatctgtttctgctgatagtaatttttgaataatcatatatactataatcatgctaaatttttttgcttaatttttacatatgccagggttttttgagaaagggctatttattctggtccactgttatattaatccttatttgatgtattgttttttagtctctctgtattgtaaagtatctactagaataataattccctggccctattgtcctttattttaaaaactattctggtatattgctacatttctttttctctacaaacttaaaattattttgccactttatccttcctaaataaaccatatccgtttttattttagtgaagtcacattgaaagtattaactgtttgcataagatattcttgtaatatccaggatttcttataagaactgagattttttaaaaattattttctgtctcagtaaagcttttttctacacagatatctaaatatgtcacttaaggcaattactagttgtttatttcatgtaatattattcctggttgctcttttagtatttcttaatttacatatttagctgattattatgcttctgtagtctattagtttcctgtgatcactataacaattaacattaattttgtgtcctaaaataatgcagatttattctgtttcagttctgatggccaaaagttcaaaatcagccttactgggttaaaatcaagcctcaacaggtctggttcctttggaggcactagggaagaatccctttccttgtcatttctacctttccttgactctcagccccttttaagaatcactccatccttttgcttttgtcatcacattttctacttccttttttaaccttcttgtctccctcttgtgattatatttagggctcactcagataatccatgataatctccccatcagaagatccttaatttaggcacatctgtaggtctcctttgccatataaagtgacattcccaggttctagggattagggtgtgtgtattatgtgagtgacctttattcagcctgcccatatagaataattattaattttatactattttatttccattgattttattgaacattatgttaagtattgttgctttcagttcattttctacccagttataaaatctccatgtgattatatgtttttttatttttatagtagtaattttatacctgtttctatttcatattttattacttctttcaattttaatgcaaatgccaaaaatgttttccttcatgatattttctgttgttttcagacgggtattttttcctaatcatagagaagtaatttgtttcttgctctttaacagtcatcttggacaaacatgtttaacatacatcttggacatatgttttgttgtatttatgtactaccaaatattagcccacacttgcatttctgtattaagctgtatttaactatagtatatcagtttttcaatatacagatggatttaagttgcttatatttagttatgatttttaacgtcttcattcatacatttgtgtatggctgagtttgtgtgtgactttcttttccattttgattatcagagttatgctagttattagtaaagtgaatttaaagacattctatttttcctctatagactagtttatattcagtattgaatactttttgtagcatgaaaattctctttgcatttatagtttgaaatatcacatacagcagtctgagcacagagcttatttgaatatatttatttgataggcctttttcatttcttggctatttttgagtgaattttgataatttaccttgttctcagagagttgtccactctatcaagattttacaggactatttgttgcatacctgctatgtattaagcattgtgctaggtgctgtgcatgcaaagataagaatttcctaggattcttaatctcaggaagcatgtagtgagagaagttaattttcttagggtagagacataagaaatagaaaagaagaaattaacatctaaacagaacttctgataacgatttcctcatgaatacaggcagcatgtacaaagtcataaaaatggttgaatacatgaacaattgagacatttacaagtagatcattacagcttgagtttaggtattggtcaggaaagagtaatgtatacaaattagaagctgtattatggattattcctgaatttgtaccttttcctataaacattgatagactgttaataatgttcattctgggtttatcatcagtatattcacattttaaaagattattctgatggcaatagggagggctttactgaaggaagtgggagtggttaatgctggaaccacttacccattgcattaccgcaaaatgcataagtggctcctaagcgagggctacaaatagagatagaaatgaaggaaagactatatataaacaaatgctaaagaaatagaccaaagattagtttactgattggatacggtagatgagggagaagtcaagacgacttctaacttcctgtcagttgtattagaacaaaatgttttccttgtctttatttcagacgtgatagctctgatttcatttgaaagacttattatattctacacagactgtatcattaacatgaaaatgtgaataggaatatcaatgtcaggatcacatttttagttagaaaccaaagttatctattatagacaatatatctaatagctaggagagaaaaaatagacattctaataagatttctgaaccatatagcatggtgatctaaaaatcacattttatttatgatgtttttagtacatcttcacttggaaaaatgaaataaagaattttatagtaaaagagtttagacatactatttgaaatttgtttgaagttgtttctcaccaaatatattccaggcattcataagatatggatatcaaaatgaaataccctctgccctcaaaaggtacaaaagtctcgtaaaacatgtcttataaaggtgattttcaagtatctgcccattacatacatcagtaatacaagctcatgcaactgccaccatagtcaagctatggtatatttccatcatgccaaaaaatttcattgtgccccttgccagaccatccttcccatccatcctcacttcaacattccttccttaaccccctcctgccataggcaatcagtgatctgttttctgtcactatagatttgacttttccagagtttcatttatatagaagcatacattatgtagccttgtgtctagtttcttttgctctgaatcatgtttctgagattcatccctgattttgcatgtgtaatttattcctttttattgttgaggagtagtcattgtctaggtgtgtgtatacacagtttatttatctattaatggaccttaagtcgtttctagttcttgactattaggaataaaattgctatgaatatttgagtacaagtctttgtgcagagttatgctttcgtttatcttgggtaaatacttaggaatggtatatctgagtcatatggaatattcaactctgtgaaaaaccaccaggaggggttgtgtcattttacattcctgccactatttcatgagctctccaattagtccagatccttaccatgactgtactttgtggtgtcagtctttttaaaattttagccattgtaatttgcgtaattgtatctcattgtgattttaatttttgttttcttagtgggttttcatgtgctttgtgaccattgctttattttcttttgtcaactcttcaaacctttggttgtctctattggattgtttttctactaatcagttagaagagttctttaaatattcaggatacaagtcctttgtcagatatatgtgttgtgaatattttctcctgtgttgttctgtgtcgtggtttaccttttcatttatttgtttgtgtccttccaggagcagaaatttttaattttcatgaagtccagtttgtaaacgctttttaaaaacctgtcttactttttgcatattaagaaatgcttgcaaatgtcagattttctcctacaagttttgttttgttttgttttgttttgagacggagtttcgctgttgttgcttaggctggagtgcaatggcgcgatctcggctcacggcaacctccaccacctgggttcaagcaattctcctgtctcagcctcctgagtagctgggattacaggcatgtgccaccacacccagctaattttgtatttttagtagagacggggtttgttcatgttggtcaggctgatctcaaactcccgacctcaggtgatctgcctgcctcagcctcccaaagtgctgggattacaggcgtgagccaccgcgcccagcctctcctagaggttttatagcttaatttttatggttagatctatggttcattttgaggtcatgttacatattgtgtgaaaacaaatttgatcaataagtatgcttaattaagggaaatctaaaattgctatcatcacacatttgacagactctaaataaagaaggagtagatggatttttttctgctgaagttaatttagtactgacttatgtatgaaatactgctctagtttttgtacccatccaacaaataaaacatgccttgtaaaataatgactttcctattagtagtgggtttaggtggagactgctaacattctgtatagaatgaatgtacatattaatgtctcttcacagtacttgtcacatgcaaaatattcagtaagtgttgtttttggttgttaatgttcattattgttaatgtcattcgtattgttataattattatatttaggattcttgccttgaggaattttagaaaggatgatatttagatgaaataggtttggtttctgtaatttatttacttaatacttacacatagtagtcatactttttatgttttttttctgccctcccaacccctcacacacataagaaacttaattgttaatgggttctaatacataagtaataggaagcagtgtttttagcatcctttgaatgatctcctttgtttgcatggataattcctgaatacttttttgaaaagttcaagaacagtagatgtagaataaacagcgcaagtaacattttacctacgcttccagtcttttcccagagataagtattatagatctgatctgtttgctttcagataattatctatacatttatactgatatatatttatttatatataggcacatttgtaggtgtatttttctttgtaagcctaaatgaacatattatacttgcttttttaatcttaacagaatgtttgataaatctttccgggttgatactttcttcattcatttttactgctgtatattatttaataggatgaatataccataacttatttttcaagcatgcagcaggtagacaagtgcgaggccaagcctaactgacagaatcagctggtaaaggtaaaatgagtcacttttaggctgggcgcgtggctcacgcctgtaatcgcagcactttggaaggccgaggcaggcggatcatgaggtcaggagatcgagaccatcctggctaacatgtgaaaccccgtctctgctaaaaatacaaaaaattagccaggcgtggtggcgggtgcttgtagtcccagctactcgggaggctgaggcaggagaatggcgtgaacccgggaggcggagcttgcagtgagccgagatcgcgccactgctctccagcctgggcgacagagtgaaaaaaaaatgagccatttttagattcagatagtttattatttacatagacagcaaaaggaggggaagctaaaagtatcacatctccaggtcctcatcacatacaggaaaaggacaacatgaaaaacaaaaggctgcatgactgaagtgtgagtcctaggattccccattgctgaagactcaattctagagtacagctaaatacttttatagtgtgccactataccctaaggggttgaagattaggaagagtgaggcaaaaacttcatacctcattagaacctgggagaccatgagaaactgtttgtgatagtctcccattctctcattttccagaggatcacgaaccattctgctaagatacagattacctgcatttaaagccattcactgtgtggcctataagtatacattcaccattgctggagcatcatgatagagccattcccctacaactccaacccttgacctttcccatatcaggtaacaattcctcaaaggcataaccacttcggctgggcgtggtgactcatgcctgtaatcccagcactttgggagacagaagtgggcagatcacctgcagtcaggagttcaagaccagcctggccaacatgatgaaaccccgtctctactaaaaatacaaaaattagctgggcatggtggtgggcgcttgtaatcccagctacttgggaggctgaggccggagaaatgcttgaatctgggaggtggaagttgctgtgagccgagattacaccactgcactccagcctgggtgacagagcgagattctgtctaaaaagaaaaaaaaggaaaaaaaaaaaagcataaccacttcattagatactacacttaattgtacttttaggggctgagagcaaatatgcctcctagtagggtgatcgggtgtacttgttggatagaccttagccaagctcctcatccagagccaagccattcacgtcataaattgagaatgcagcaagtggtgttggcaatcacacatatctcacttcagctggctgggaggaactccagggcttcctagacttttcatcaccactggaccagagagtttagagtggtcagctttaatatgtgaagaatatacaaaagagtttgtctttccttaagtattagaagaagaccacagggcaccaacaatagtaggattcggctaaagggaatcataacagtgtcccgaaaattaatcttgttatgtggcttgttcactcctgcaatcagcagctttccttagattaagattcttcattggtcaacagttgagctgaaagcagtagtctgggtaatactggctcggtggctaagagctgagaaatattaatgtttcttctacccaccctgggtgtgccggtgtctaaggtattcttttttctacagccagggttactgtcttcccatagccatgtgtttcagtccctgcagcatgatcagtccctgcagcaattgtttcactctttttctaatccaccctctaccttacccatactatatggcctggagttggccctacatggcttagcagtttcttcattatatacaatatgcattgtaccatcttagaacatcttttgctccttgaaatgtaggccacattggagataccataggagttgtgacctcatattcatcatcattatcatgattatccctaactgcctaaacctagtaagcataacaggacagtaaaagagtcaacaggttagagtcttccaaccccagtactttactacttgaaaattccagcaccctgattttccagggatacagtatgtgaggaagtggtgtgagaaagattaaccatgtgtttttggtcttttatagcaagtctgggccttctcccttcccctcaaacctcataattaaacattctgtttagctgaaagggacccttctggggaattgccacacttagaacccagactgcttttcttaagtgtgtatgcctctgggagccaagccgtttttaggctctagttaccttttttagtttcttctttgagaatctattctgtctttcattgtacctcttgcctgaagatgatatgggacataaaaggtccagtgaatgtctcaaatatctgctcactgctgggtagttttactctaaaggccacactattgtctgattgggtacatttgagaaatcgacatgtgtgaaatagtccgtctgtctttgaatagtatggcctctctactgtgtggatagagatgacaatggacaacctaggaaggtgtctactgctgtcagtgccaagtagtatccttaagaactatatggtctacttgacagacatgtctggtacccctagctataggctccagagttccctttgctacttaactgtgtagttgatagtcaagagcacacatatccttgaccttacgtgttagagaatcactaaggtttttttttttttatttgtttgttttgttttgtttttggcggtatcctgaattggagatgggttaccatgctctgggcaatgatgtattcaggtgactgtggtctctaccaaggcagtgcaagtctgatcagcttattgattctggtgatgctcatcctcaaagggtactttcccatgggcatcaacatgaatcatgaacaagaaatgtgagacttgtacagcctgcaactataacgctcatctccacagaaactggaacgaggtcatctaaattgtcccactgccaggcttcagaccacacagctagcccattgactcctggtatcagtcattgaaaatataacagactttgggggtgttttccagggaaagcaccatagctcatgacttcacctagtgagcagagttctcttttccatgcacagttttaaacagttttccttggggccacacagctgcagtggcccagagcacctcattggactttaccttaggtgattcttctgtgagctagacccaggcatcctcaggatgcccaaagttctgaagtctccaggatgtccaagattctggtacagactcttgcatttgggatggccgtattttgggagttattagccactttttcacatagctgatgtgcctatgattttctttaataacatacacatcactggtttatcatgcatttgcaagaccacattgccttaagaagtagatttgcccataaattattttggaccacttgaaggtagcaggtattggtgaaaaataacgacaaattgtttttagctcttatccccttgattctaaattcaaggcaaaactgaaacatgcaatttaccacccagtattagtgtttctttcagataaaatgtagctaattatgaaggaataaaatgatgatatggttcatatgctgataaagtgagtatatttttttattttctaacattaaaatttagcaaacctgtcttttaaaaaaatctccaagatttttgtaaacagcgctgggcttttaaataaataaaagtatattttgtctagttttatagatctctccatctaaaaagaaaatagtgccaaggagttttttatttccttctctgaaaagacatggagtgtttatgcaggtttccaagcaacatcagccttgaaattataagaatgactgaatactcaggaaagcaaccaatccaaatttgtaagacttttggaattcagtaattgatgaaaaacagaaccatgttagtcatcaataaattacaccagtttgcagatttaaaaacatattcttatatttaacatttctcaaatttaagttatgtttacttaatatatctggggtgatttcctcaatactgccaaatgagtttaatctcttatttattagcgtattgagagactttccattgagtacattataaattagcaagcagttctttaaaattgaacttttacttaaataagcaacagtagaaaaagaaagtaaaaattatataatatttccaatatataacataagctaaaactaccaggtggaaagaattttgtcttataacttaaagctatttaataacacatttgattttagaatctcaagtaaaagaatgtgtattattggccatactactatatttaaaatgatccctgacgcccctcaagacaaatatattaattttttactttgtgggatagagatcagaaaaagagtagagatgaaaatactggagaaacaatgcaggagatatttatgaggtgagaatgtcaagaaacttgtaaagggagaatactataatgacccctgaagagagagctttagaccagttgaatattagaggttgccacgtggctattcatccactaataaatacaagaaattactaaaatggaagcccctggaaatatgttttgaggaaggtgagaatgtggacctattataaatgggtgaatatgatttctttctcattaagttcataaataactttcagacatgtaacagtttatgaagtgtgccgtagtcatttagtataagttttatacacaaaagtgtttttactaagactgtcacaggttcttttgtgaatcttgtttgtttttcctcattgtaaatactgcaatagaacatttgtgtcttaacataaggcaataaatgaccttaagaaccttcacttttatatagaaagtggaggaaaagttggcagagtaatttgttgattatagataaaagctcttgtaggaattggccacatctgttttattgtttgcagctgagacattcaacacaaaataagttggcttgtaataaaagtacaataattgctaatgtaaaacagacagatgtttttcttattacatagcactggacagatgtatttgggtaagagttgaaatttttaacaaaattaagctggtcttgatcctcagaatttgaatgttttactctgaaatcatgttttgttaaaccatgtaaatattttatctttcccaagaagtatatgtgaaattatttttgtttttggaatttctgaactatagttttgaatacacatggaactagttgcagttaattacattttgggccgtagtatttctgataaggagataattacaaaactgctacccagattgtaataccctgttccacattgtaaaatattgatacctttaaaaaattttatgttgttttaatacttcctccatattcaaatttttaccttttatgaagtgattacttgagttatgcccttgggggctcttcttgactctaccatatatggaaaaccacattaaagagaaaatcttcacatcattgactccttcacattttgcatgggaagaaaagagttccaaatacaacttgaagaacttactgaatattctgacattctttgttattaatcctggaagatgacctaatatagactgctaggtcatgttggctacttttgataaggtgattgaagaaagccctctgtatctccctatgatgtgacagatctaaaatatgcggacattttaatgttgagtagaattcatattattactatataattatttataataatattaaagcattagtggaacatatcatttgagccatttgtcttgtggattacattgttctatgtgaacttacaagaaaactcttttgcctgcatccacaaatacaagtaaaggtcttcctgcagtgtgacttacagtcatcatttaagaagttaattggtcttactctccaaagatatttgatcccgcaggcaccagatccacaaacaggttggcttccatcctgttctagctaatcaaactgttatagctaggttttagaaaacctccttcgttatttttggggtaattagttgtatccatactcaaacacaggggttggtgaattttgttcagtaagccaaatcttaccactgcctgattttgcccagcccacaaagctaaaaattgttttaaaatcttcaagtgggccaggcgtggtggctcccgcctataattggagcactttgggaggccaaggcgggcagatcacgaggtcaggagatcgaggccatcccggctaacacggtgaaaccccgtcactactaaaaatacaaaaaaattagctgggcatggtgtcgggcgcctgtagtcccagctactcaggaggctgaggcaggagaatggcgtgaacccgggaggcggagcttgcagtgagctgagattgtgccactgcacaccagcctgggcgacagagcgagagtccgtctcaaaaaaaaaaaaaaaaaaaatcttcaagtggatagggaaaaaaaagaaaaaaaaaagaatgatatatcaaggaatgtgaaaattatatgcaattcaaatttctctgcccataaataaaaatgtattagtatacaaccatactgattgtttatgactgtttttacattacaatggcagttgagtagttgcaacagagatcgcatatggaggtcttactactttacattgcttctcaatcttagtgacactgtaatgtctcggcaatgtttgccataccatggaattgtacttacgtgttattagcagtacatattcatcatgtcaaaacaagaagagaagagaatgtgagcttctaatgttatggttttaaggaaccatgcagtgtgaattactttgttataaataaggtggcacagtattgtgttatgcagtaacactatagctgcactaaaataataaatgttgacattaccagattacacactcattgcagcattaccaacacacgagaaagcaatggtcagaagcattttaaataaaacatcttattcacaaaaataaaaaatgaggctgcaaccacagtgagtttctgagtaactaatttgttggccaagtaaggaaagtcatttcccagtggtgagtaagttaaaacctatccagagaaaataaactttactgaaggagctaatgccaggttgtttattcaaagaactaatgtgactgagggaaaacttctatgaatagtctgcttggaacaactacggatgagaatattttcagctgagttaagaaaacactaatttaggacaactagaagtagaatctaatgagatgagttgaagctaatggtggcaaaaatatttgtgatattaggagcataataatttgtgtaattagttacagaaatttatgaaacttgtgaaatctgtggttattcatagtaatattattcaccaagtaccttgtggaatatatttgagtctatcatgttattgaaccagtagtatcaatagtaaacttcactcaatttcacagagtgtcagttctgtgaatttttgtcagaaatagaagatgaatattctgacttgccctactatatagcagttcaataatttaaccataataaagcctattgcaatgtagctaagaccaagatggatttttttttctgaatgaaaataacgaatctgactctaacccacatttatcaacattaaatggctacgaaaattagctttttgtgtagacttgataacgtttacaatgaattcaacccagtgttaccaggccaacagcatttacttgcaaaacttaaacttcagtgaagtcatgttaacaatagtttttgaatcacaggttacacttcctgttgtctcaaaaattaaaacaaaatctccaaccctacacaaatttgcagcagatgtattttatgagttcaaactatagttccagcagcatatttcagacctcagtgcagttcaaaagaaatttccatatttcaaaatccatttatctgtgcagttgagcttctgcctaatcttcaattgacagtgattactctgcaatataatggcctgctaaaagcaaatattaagagaaaaatctattataattctatagatgcctcccaagtgatggacatgaccctaaaatattatatgcacattgatatgaatattgatatcaatatttggcagtaactatcttgtgaaagacatttcattttcaaaaataaaatacataagatttcattctagatcagtattaacaggtgaacaattgcaatagatttaatgataaggaacactgactttgaactctaattaaggaaaatgttatacttcatctttctccttagtagatctgtttgctgttcttggttgttagtagcagtattatttgaattttgtcaatataaaaattgcagaaatttattttctcttgtataaactcctacataatacccttgatttaacctcttggcctgcaaaacataaaatatttactttctgaacctatatattaataggaaaagtttgctgacctctgttctaacatatctacttttacaactaaattgttcgatattttcatactattatatctttgattacttatcttttacaataaaaagataaagagtaaattttaagaactaagtttacaaagaatgaaatatatttatacgatgatcaattaaccaaatcctaaacaaagacaaatctgttataaaaggaaaagcaccagtctattagttttctcataccatttaaaaacaaacaaaacctaatgctcagttaaaaaacacaaaggcaaacaatattgtaatagagttcgtgagtctgttttgtttctttctgttttgtaatagcaattaaacgatctaaaattttttaaaactgcatgtcactttttaaattaacttgaatttttactttgagtttactgataatgcataattttcatgtattgttagagtaatatgtccagtaaactcattgtaaggtatgaaatatattaacatgtcagttttcaacctaattctgctgggaaatttacaaagcatgtcactttttctttacaccttttctgcttgtgacctaaaatagtcatgctgaactacctcaaatgagcattgattttcaaattgtactctttggaaagttattatttttgactgatttatcaaatctactttaggaccatacttttattttattttttgatatggatagaatttaccaaatctgatgttagactttggtgttctctaccagagagctctaacatcaacattgtcaaatatgcttgaggattggatgacaggggattaagagttgtacattatggcgttatacagtgtttgagctagaaaagttgataaacttatatagcatttcagtttttcagataagaaattttgtgccttggtcctgattatctagctaattatttttaaaatgagaattaaaactctggccatgtaagtctcattccattaaattcagtcgatcttcattattcttggattccataattgcaaatttgtcccctcactaaaatttatttaaaaccccaaaattagtactcacaagtgctttgcaatcattaacaagcatgtgcatagtgataaaaagaatttgagtcacctgacatattttcatagcttaggtccggcaatgcgatgtcctgccatcttgttttgacaagtgtccttttcagtttattagtgccacggcttaattttgtgctttttgttgttgacttcgttgcttaaaatggcccccaagtgcagtgctgaagtgctgtctaaattggtgtttctaagtgccagaaggaaatgatgtgccctatggagaaaatatagtaatttctcagtatacatcagggattggtttcagcaccttcgtggataccaaaatctaagcatactgaagtcccccagtccaccctggggagcctgcatgtaggaatagctggccctccatatatgggttttgcatcctgtgaatactgtgttttcatctgtgtttatgtagaaagaaatgcaccataagtgaatctattcagtttaaatatgttattgaaaggtcaactttacatgaattaggtgatcctcacacaggcatatttacaaggccgttggccatgagttaaatgttaatgtatcaacaatatatgttaaataaggtgtttttaaatgtaaccagaagttcatagggacctaaccctgtatttcccctagaaataatgttcactatttgttaattcagtgtttgtggcaacttaatagatcataactaccttgaataatgcaaaccaactgcacgtgtatatcaacagaaaatgtaccccattcttcattatttcttgcattatttaacataacttttttctgtgatcacactgataggaatataaattaagaaaaaaatttcttctacttgtagaaaatttatttttctctcttatattttcactaattatctggtcctctcaaagtcatgcagcttttgtttttcccagtcataggattataaagaatacacaggaagagaaattgtcatgcaaatccattataattaccaaaaaaacaattcaaagtacatgttaggaagatacattctattttagtttatcatttcaagagttacttatgattcctgtttctctttcaattattttaccttgttttttctacttcttttgcataggtgttaacagtctaattctacgaaaacaaatttacatggcatcactaacctaagaaccactacatcaaatccggaatcctttttatgaatttcaaagccctttataatctggccctactctacctattcttagtttgtgctgttgattctctaatgcatatcttgccattacagtgattatacccttactgtgtatcctcacttgctctgtacatactcacctttcccattgctcacagtgcctcccaataactttaataatctaactcagtttagttcacaggttgtactgtgattgtttcatttgtgagtgtaacttaatacattattgtcagatcattattaaaggcattgacaaaatatttctaaaattatacattatatagttatattggaggaaatataaatttgaaatacatttcaaaaatactaatttcacgagaagagatttgagtaaatgttttccatttaaaatagaatctcaaaggggaaaatgttttttataggttaatttatccagtacaaaattttgataaagattatttcagttttgaacccaggtatttccttctgaagcaactctatagtaccatagaatgttagatttggaacaaaaatgaaaaagtatataatttagtaatcacattttacacatgaaaaatcgtcgtaatagttccttattgccaaatacaatttaaaaactagagatcatttgtatcccaaacatcagagtcatgcaaatatagccatgtaacaaacctgcatatgtaccccctgaatctaaaataaaagttgaaactaaaatgaggaataagttctggtgttctattgcagaatagggttactatggttaacaatattgtatatttcaaaataactggaatagaggatttcgaatattctcactacaaagaaatgataaatgtgtgaagtgatatgctaaataccctcatttggtttttatatagtgtgtatatgtattgaagcatcacactatacctcattaatatgtacaattagtatgtgtcaattcagagtgaaacttaaaaataagatttagactttttaaagcaagaaatgtgaaatttcaaatgatttgtcgtagcattaaagtgataaggtgttattgataaaagagggctacgtaaaacaagctaatatctttggtctaatttataataataatggcaatacttttaaaatgcttttaccataattattgtatttatatataagtgtactaaactacagaaaacttagataacatagaaaactatggaaaagaaacattactcattatcccaacacagtgtttgtgaaaatgaaatactttttcagaagtagagtaagcaatttatatttaaaatactttcttcatcttgaacagggacatttaaggataatataatatccttaaatattttattacaaaataactctatgatttatcttccctttgaaatgaattatatggcataaataaagtattggacctgtacttatatcatgtttatgatagagattaaaatttggaagtccaattaactgtagtctcatttgtagtttgcatttcatcagaatagttggtgtttttccaattctgcttccagcccagattttgtatacttcttccaacaagtatatttcttcagaatttaaaacaatttcatattatctttattctgaaattcaggaagaggaaactgatagtttgtaaacctcttgtggttcaaaggatgtccttgttggaaatggtgatttacatatgactatgccatggcatggtatatataattcatttatggatatattcttcagatatttactgtttgtgataagattaatttttaaattttatctggaaagtggcaaatggcaaaattgttatttataataaaattaataaaattgttaaagtatcttaacattcttaaagtacatagtccatttagtcttctcaacatatagtttgtattctatctactatattatacagactctcttaattaatacttatttcaacaaatatttaatgaactcttattacatgttcaggtacctgaaataaaacagtaaaacagaatctgtgaaagttcctgcctctatcagtttacattctagtggccaagaaaagtaataagcaagcaattactagcattatttcaggaggaaaagaagctttgtaggcagattggtcagtaaaggcctgtccgaggagcggtattttgtgaggaaataagtcatggtgttaggtggaaaagagcattctagcaaaaagagccaggtacttcaagaaggctggtgtagcagcagcagaatgagcaagggaagagtattaagaggcaaagttggctgggtgtggtggctcacacctgtaatcccagcattttgggaggccgaggcaggcggatcacaaggtcaggagatcgaggctatcctggctaacacagtgaaaccccgtctctactaaaaatacaaaaaattagtcgggcatggtggcacatacctgtagtcccagctactcggaaggctgaggcaggagaatcgcttgaacctggaaggtggaggttgcagtgagccaagatcgtgccactgcactttagcctgggcaacagagcgagactccatctccaaaaaaaaaaaaaaaagaggcaaagtcagagagctaggcagtggccagaacatgaaggccattgtaggccataataaggaatttggactttattcttcttcatttctttaacacataattaaagacaaccacagctagatgatttacattacaaagtcccattgagacagtgtgctgttgctgcaaggataaataagtagaccaatggaaagaaaaaacactgttcaatagagcctaaatacaaacaaaaatatatatagtcagttcctttaggccaaatgttaccttatactgtagttgtgaaagcatagtctgagttaattgagtagccaaataggaaatatgtaaacaaatttgtatcttggctcctacctgacactgttctcaaaaatcagtcacagatggattgcagatctaaatgccaatggaaagaaaacatagctgttggggaaaagaaaaaccacatagaatatctttatgatcttaaattaggcaaacattaaagtggtacataaaagctctaaccataaaggggaaaaaaaacaataaattgggccacatgaaaatccagaacttctgctcatcaagacaccattaacagtgaatagacaagtcacaaagtgagagcatatacttgcaatacagtatgcatagaatgccttcaaatcaataaggaaaaaatataacccaataaaaaattggccaaacaactgaacaggaatttcacaaaagaggatatcctaatggccgataaacactcaataccgttacaaatatattattcattagggaaatgcagattaaaaccataacatgataccactgttcatccacctgaataactaaagtgaaaaagactgacaatactttgttggcaagaatgtggattaactctcataaacaggtggaaggattggaagtggataaaataactttagaaactaatcattttggagcatcctataaagttgaacatacgtttgtgttcttgaaaatttaagatatacacttatgattttgtacttttttatgtatacatgtatacatacctcagtaagtgttaaaatagcaaataacataatttgtagaaatgtatgaatgtaagaatggaaatgtataggcattctaaaatatttcaagcgtagatcactatgatctatttttctttacagataaagtaatacaataattgtagttgaaaagtcaataacgtaaccagtacttgcttttcctttcatcctttttctttaccatgctttttagtaggcataggatacatgtccaaaatcttgtatttttgtaaaaatgtaaagtaaccatgatagactatagatactgataagttttgtaagttaaaagtttgcacagtaatctttgagtctggtcttttattaaacaaagtatttggagtctctgtttgcatatattatgaacaaattgattagtatagtatgtattatgtgcctgacaattgacgactactagtgaatgtaagaaaataaagtttatattgtgcaattgttatcaactttgagtaatgcacatataataagtgttttagaaaatttcctgtatagaacccatttttgaaaattttaaacttaggtaattttttttctttatataaatacaagctcagagcaatcatattgcacaattccaggttacacattacagtcattgttaactggaaccctaaacagaggccctgtgaacctgcgaattttcaaaagtaatcaacctaataatggaataaggaataaaatgagaatttctcttgaaatagttttcatggttcaatatagtaaatgtcataattattgtccacttttgttctttgttggccatttttggactacactttagaagtttgtagagacactggaagaaagaataagtatatagtggataagataaagcaggaaagttattagatgtaggtaaaaagataaatattaaaataatgaaattgtatattaaggtaggtagaatgatagaagaaaatgaaagaaatatactattgggatgtgggtttactttgaaggtaaggacaaatataatagcaaattgatatataaaacaaatgtatatagtttttagtgtgtttgtctcaattcatatgtatttttaattaaaggaatacattttcatcagtaaaagctcatttgaaatatttaaactttgaagaaaaaatgaaataaatcaaggctgtttttatgtagcaaggccgtactggtataataccagtttatatatttctctggcagtttgaatttgatccagtgttcctttaggaggagaaaaaggcaaagtactacttctgtcaactgtctgaagaactgcacacattcctttactgagaagaatgaaccttaagcattacgtacttaaaaatatgtaatgtcttattttaaaatgtttaacatctttatattatattaacaagttaatgcctctatgttgaggaattccattcctccctttaatctgaacactttgttataattatatgaaatattaacattcatattaatatttggtattctgtgagaatacagatttaccataactatgaacatgtagatcagtttttcctcaaggataggaggtacacatggatggtagatacatttaatagagttgatttttttgtctgaagcttttttaaaaatgacaagataaaagataatgtgagagtcaaatctatatattgtgcctatacttacattgacataaatttttaactatatgattttgatataatttggttaagtatttatctaatgttaaatgtgatcaatcctgattccatgaactttcaaatgtaaaacaattttcttgcactttaaaaataagttattgacattcatattaacttagagatatcttttaacatttaattctctttttgaatgttacattcataaattattaaaataacttggctaaaagcaatgcaacaatattataatacactattttattaatgaatgttagctattcgaaaagagttactatgtgcaaatgctacctattgtgtatttttaaagtataaatagtattagcatattacacataatttgtttggatttgtaatttttagaacaatagctggtgaaattaaagttacttttaataatagtttcatttctagttcccaattaatgttcggttgagaatacttttcatttgttttagtattaatatttatcagtatttttatctgtttttttattaaataaaatttacaggaggtaatttagaattttaaaacatttttaaaatattgtactttctttcattgtatttttaaaaattttataagtagcatttattttatattcattcattgttcagaagcactgacattttcttctggatttattgccatttgcacaactgtttccatgacagcagattttctcttgcatacttccagatgatttagaaaatcagattattttaattatgttaataattttttaacatattgccaattgtttatcaggtatccctacttaatttcaaagcattgcatgtaatgccagttgtagcatttcagacatatctttttcatactcttatttctagaaaattactaattttgcataatttttctaagaaatttaatgaaaatccataaattgaatatctttcattcaagcttacagaattaatttgagcctattacattcattttaaaacaaaataataaaatgccctttctgctaaatgctgaatcgcttttataagaacattataggatcattttgtgttaattgttaaaatatagaaggcaaagtgcataaagcattgttgtaaatttcccaatgtcttttaatggttttgtggatgaaaagtttacaccaatctataatgtttagcagttggcaaagtatgtatatacatttctagatgttgaaggcagtagacatttaatattaagacatttaaaaagtattttttatacacttgaaaattaattgcaggtaacagtaacctgaaaggagaaacaatagatccttttatattatagttctcttgaacatgaggtgactatatttaaaaatgtattgattacctcttatgatatgtaaattggaagttgtgcgttttgtagcacttcaagtaaagttttataatatttgcatatatttttctacttttcaaattatgccacatgtatagccagtgaagccacaatttgaagaactaatttgctattgcaaaatttatttattattatgtcataatctttgcgtgcatactacaactatttataatatctaaagcttttagtgtgggtaatatattcaagcaatgagatggtttgactagtgtcttttttgtaattaacattacataatttaaaacattgcaatttaagagtttaattgaagtcacagatgttttaatattatattacaattgttgaagctaactagaaatgtgtgtggttgtgttttaataaaactgtattcacaaaaacaggtggtgagttgtatttggcctgcagcctttagttgactgacccctgctttaaactattccctcagaatcacctcccttatcccaagttttacttactcctttgtagttagaagtactaatgtgaaaaagtatgaaaagcattcttcaacaattcaagtaataggaccagttttgcttagctcataaacttgattttaaaagcagtttaaaagaagtcttaattaaatatttttgagtaattcaggaataaatatatagcttttcagtgagacagatttaaagcaaaatatatactcttattcaagcattaatgtattctttttaaaggtttctttacattatatagcagtatttcccagaatatggtctgtggaatcatagttggaatgaaatcttccatgaaaaagtgttctatctagtttagcaagtttgaaatttgaaaaatgcttaacataatagttttcccaagaatccatgatgtatattattgtactaaatgttcagagggtcaataaacacttttgtttaatgatatttcggtcagtatttactagactacctagactatgaaagggtctttcaatcaaaatctcaatttcctctctccctcccactcttcgtctccctgcctacccaacacaccttaaaactttgggaaactcttctttttttttttcttttgagacacagtctcactctgtcaccaggctggagtgcagtggcgctatctcggcttagtgcaacctctgcctcccaggttcaagcgattctcctgcctcagcctcccgagtagctgggactgcaggcatgcaccaccacgcccagctaatttttgtatttttagtagagacagggtttcaccatgttggccaggatgaccttgtgatctgcccgcctcagcctcccatagtgctgggattacaggcatgagtcaccgcgcccggccaggaagctcttctttaaattaataccctatctgcaaatttttagatgattaaactaaaatctaaggagtgtttaacgatataatgagaatagatgcattgtatgttttggctattgattgaattttaggttaatatgaaaaatattcaaataggtattttttctctatgttagtatatttaactacttcatcaaataatctgaaataattttttttagtataaaaaatattaatttgacctcatgtacatgtggggaacttagccatgcctgttgcacagccttgtatgtattagcaaccattttgttagaagataaaagtgaaccttaaaaagaattttcccaattattcaacaatatcgatcatctcaaatgtgccagatactgtgctaaatggtagtttcatggggctacgttcttatggaggacacagtacagttaactgaatgtgtatttgcagcatagtatggtaattacttttcgacttgtttactttggaaagattttcttaaataatctgtttattgaattgttaaaccaacagtaaccagtctggtttgtccatttatcattatccaccaatgagaaatattatttgaatattatgttaattttaaaaatgtaattttatctaaatttttaccatcttattaatgaaaatataaaatagatttataataactctgacaggtagtctttaattttatgtttgagtgaagaggagaaaccaaaaagtttttgtgatgaactacagtgtttaaagccttttgtccacatgcccattttgcctttagtttgttgttaatgttgttcagataaagcagtgaaacactttctctaccatgactcttcgtttagattttttcaccttctccataatctttatttgtcttttaatgccatccaccatccccaaccctcagtacttctcattttctctctacaaagtatgtgggagccttttaaaagagagtatgtatccttgacctttgcaacttttaagtttcctttatcaagaatttcattttaatcttccccttttattttatgcatgttgtttattattacttattaacccagacccttctgaagtttatttgtacccaggacattatgtttggaaacaatagatagttttatcttctattgttttaccgtttaacattctataaacaataaccaagaccactgagggaggctaactagattataaatggatcatgagctacttgaaggcaggggccattatgtgcttagcttatatttcttgtgtgtgctgtatagaaggaagtcaataaaataaataatgacttaatgaatccaccgtaaagccaaaatgatgtatttttcctgtattcctcttctttcagtgagtatttctgaagtccccttttttccatttctccaatatttttcctgccttctattggtacatgttttctcaagatctagccttgactctattctcttatgtctgtactgtgtactctgaatgaaagaccatattggccaggcgcggtggctcatgcctataatcccgacactttgggaggctgaggcgggcatatcacccgaggtcaggagtttgagaccaacctaaccaacatggtgaaaccccatctctactaaaaagacaaaattagatgggcctggtggcatatgcctgtaatctcagctactcaggaggctgaggcaggagaatcacttgaacccaggaggcagaggttgcagtgagcccagatcatgccattgcactccagcctaggtaataagagcaaaacactgtctcaagaaaaaaccccatatgcatgaataaaagccttcaactgccagcactaaaacaatgtctcctccatctttacatctagagaatgtatcaaatgtgcagtgtgcctaattaaacctaggcacattgtaaattttataaattttatctataaaatctctcttctgtcttgctctgtcaatcgcattacaatgatctaatcatgaagcttgagaactttggaggtaacttttaatcttccttttcattgcttctcatacttaattgctaacttttgacaattttatctttaaaatgtatttcaatcttttcactcccactaccactactctcattttcaatgagtcttacttaggatattcaatatttcataatcttatcaccaatctcattcctccatgtatcctatataactgtgattattccatactctggtttaaaacatttctttcattgtctagcattaaactcacacacattaatgtagtatttcaggctttctgcttactattctcttaaaaaatacatctacaaatatctaaaaatgtactcatctttgaagaaccagcctaatataaggcgatattctgtatgaattgtttcttgagatgtcttactttgaaagaggtgaaattctttcaaggtagagaaacactactgcagttagcaagccaccttagacatattctttgccacattcaatttaattttaactctctttgctttttttctttcctttatttaatatttactacaagttcattttatcctagatgggctagtttgcttatctattcatctttcatatatttaaacatatacacttctattaaattttttcttttattttaaaatttaaaattcatttttaaaatataaagattttttaaaatcatatgttactccatttatttattaattaaatttttagggttcttctgttttgtatgaaatacaagtgatttttaagcacagaatactctactaatcctttattgccttatagttttcatcaactctatgacagttctttccattacatggaatatgctatgtgtgcttaagtgtgtataatgtttacattgtctagtgtgaagtatgcttaagtgtatgcggataaatggtgtgtgtgtgtgtgtgtgtgtatgtacatgtgaaaaatttctcttggtttaatgttggtatttatcaaatcgtaggatatagggttgttctattcctacataaaatcatcaattagagccttcctaattataaacattattattcaatatcatgaatatttatagaaatttgtgacctcaatcccagttccttttctttcttcaagaagctactgaaagcaagaacatacttactctttcacttttcaagaaataccaaactattttttacaacacttaggaaaattatatcctaattctataagaacattttactttatgctcaatctaaaaaatcaaaaatgttataaagaagttaatacaagaatggtgtattcatctttgagggagaaatcaataaccttatctcttgcaatcagtgccatattagttattaataaactaatgtgttagtaatgaaagtagtatgaacaacagcagttgctatgtctattcaaaaagtgcagaactctcaaatataatacatggtttctttgtaagtaatagaaaaactttagagatcactttttttactagaagcttttgctttttttcctcttctattgatataactcttatggtcttgtttaggacagaatttgtttattcttttcagcagcctgtttttttgttttgttttgtttttgtttttgttgtatgtttttgttttggtgaaaggagtggatatttatcaaggatgttttgagtggttttttaagatgaatttataattaaagtcatacacatttatgttttgattttgtttatggattttctggtgtaaaggttaacatgatgaacacatggctatagtaaggtggaaaaacagtaggaaacttgtactcttgctcagtctgttgcatgattatttagatacttacttgatctaacaaactaaagaacacagtgattttatatgaagtaaactaaggctatttgaaaatatctgtttccaaagggtagaattcatgaaacacaataaaaataatgaaatatactgattaatcaaaactttttcagcatctattttactgactttcaaaatttgttttggacaacttcataaaaaacactctttataaaaccctcaacaaagctgggatggatttgtttggccacattaatatataaagtagcagctttatcgactgctagcaggaaacatgcctcaattatcaattctcatctataaactactatgataagattttcagaaatcagccatgccatttaaaacctagttttgacattattttttttttttacaatgagttgaatgtattacactgcagtatgctttagcaatcatcccaattaagtaggtgtgccctttatctgagcgttaagtggatttcttaatgttcgagaattgtgctaagtgcttgtttgttatagcataaaacaaatgctaatttatgataaattagtacttgaggaattttacatttctgctgctgttcaccttagcacatagcaaccaggatacaatccagtttaaaaataaaataatatggtttggatttaactgtgaaaattaaattcaggaaatttcaaataactattgaatgattaaataaaatcattctggaattttattttatttggtatcaaatatctgataccaatcatgtgttgatagtccttaaagaacagttgttggcctggcgcggtggctcatgcctgtaatcccagcactttgggaggcagaggcgggtggatcacctgaggtcaggagtttgagaccagcctggccaacatgatgaatccccgtctctactaaaaatacaaaaattagctgggcgtggtggcaggtgcctgtagtcccagctacttgggaggctgatacaggagaatcccttgaacccgagaggcagaggttgcagtgagccgagttcatgccactgcactccagcctgggtaacaaagagttaaactccatctcaaaaaaaaagaacagttgttggtctttctatctgcagaggccattcagatttaaggtctgcactgattaagattttcttgattggcgaagacaacactcatgaaagaagaagactatgattttactcttttactctggcaatgtggccttactttgactaagcatgaaaagattttgagcttcctgaagcaaatctgttccccaagtttgtcttagtgtcttactagggttgaatttacttctctttattaactccagatccaagcaataccactaaggtatgctggagtaattttacgccctggaagattacctagcctaattttaaaattctataaattcttaacttgggaaaatacctgtagctaaagaaagaatagtttaacaagtgttggtaatttagcatgggcctaagaatgagatttattttctaagacatgataagtaacattgcattattagaaggctctaattactatattctgtctcttttaacatatttttaactgatggtgctatttggttgtaatatttggtaatactagtgttttagataagcatctatttttatgtacaactggtttttaaattaatttctttaaatttcactaaatgtatcatttttaaggtttctaaatattttaatacaaatgaaataaggaaaatgagatttgttaaaggctgtttaaatttcaatcctgtttttctaaatgggttgtaaattacaaaatggaataaaatatttcaaacactatgttttaattatttacagtgttaccgttttatttgttaacatgtgttaatgaatctcaagtaacacatgattataataggaatatttttaaatgcagcttagcaaaaataagaaaaattagatcataccattcagagataattttaacattttcctacatagtgtatatattatcaggcatatatgtgtgtattatgtgtattattttaataaaatgggactgtgtttggtagaagtaaatcaaggaaaggtgttgtgttagtgcattttcacactgctataaacaactacctgagactgggtaatttattaaaaaatcggtttaattgactcacagttccacatggctggggagacttccggaaacttacagtcatggtgggaggctaaagggaagcaaggcacatctttacatggtgacaggagagagagagaagtgggaagagccacacacttagaaaacaaccagatctcacaagaactccactgtcagaacagcatgggggaaactgcccccatgatccaagcacctcccatgaggtccctcctctgacacatggggtttataattcgaggtgagatttgggtcgggccacagtaccaaaccatatcagccatcttcaatttaccgtttagctcattcaaaaattataaataggtaaacattgtgcagcgttcatgttgcttcctttacatatgtaataatgttttggttctgtgtttatttttatatttgagctcattttttacctatctgaatgtgatttactacaggcctctctctggtatgcttttaactcatctgttttacctgagtatggctagctagctcaagacaaaatttctgccgtcactgccaccacctgagatcaaaggcccatgccctctgcttacttagcacaagttaaggaagagagagtgcaaaaaattaattcccttttccctttgtacacacatttcaaagaaccaccctatctcttcctctagaaaccctctctcagttatattttgtaagagcatgaactagcttgttttctgtgagtttggtgccattttttttttttaacttactgtcgtttgttcattcagcagttacgtattggacacctactgtgtattgggcatacttcaaagcactgaagatatcacagtaaaaagtcatacaaggtcactgacctgaagggaagtgaaataattcaataaataatgtatagcataggtaagattttacaaaagcataatataggtgttctctagatcaaaagggaggctcatataacagaggactacctgctttagcagaacacccatctttcttatttaggaatgtttttataggttttgttctaatgagatagctttctcaggttttgagacaaaaagggaagagataaggatgttgaaatacctttactctcttgagctacatgtacttttaatatgctaaatatattggaaatttgattaattgaggtttctatatttacatattaaaagtgtgtatattgaaaatacaaagtggtcccattgctgaaatagacacgttaagtatacatttcatgggaaaaaccatctgttgaataattttatggtgtccagatgtacgctacatagtaaagttgtaggctgtgttgtggaccatgtggctcattggtttttacttgacatcagaaaagccagttgaaattctacaagcgaatggtacttgatagggtgctatttataaattatgaatgacttatacttttatctaaattttaaatggtatatataccttctaggaagttttgattcagaaaatgtcatgttttacaatgtcatattttgagtataaagagagatttatgattttattaaagaaaaatcagcttttctttacattattaaacattgagcaaatatttaagagatgttgttaaagaagcaccaaacataccagggcacttcatttttcggtttgtgcctgttgttctgttatgtaaattttttcatttcattcatcatgaacctctttccatgctgataagtaaagggctacgttataaatttaattttggtttatcatgatgaatcagtttatttagctaacctctggatgttgaaccctaagtttaatttttatattttttgctattagaaaaaatagttatgaataactcagtatttccaactgtatacttttctaattgtttgcttgtgaattttaatttttaaaaaaaaatgattactgggtcaaaaaacgtttggtacttaattgctaagttgccctctagaaagagcatgctaacttaccattccaatagaattgtactagagtatccattcctacatttccatcccaaacttttataattatttgccaatcagagctatatggtgatatttgatggaagtttggtttgattttttaatacaattgaaaatgaatatttttgcattggatgattacattagtcttttcccagtcctttcccttcttccacttcctttggctttcattcttcctttggtgtgattgtgccagggtatgtgtgcatgtgggtgtgtgcgtgagattcagtgaaattgttcatatacctagctcattttcttttggggttgatgtttacctttttcttaaggatttttaaaaacatttcatatattaaggaataaatactagattcaatctaacatttattacatatgttgcaagtttccccagtttcatcgtcgctttctccctttgttttggatctacagaaattataaagtatgtgtttgttaagtgctgtgtggagaacctatgtggaaaagaatcctcttaacacattgctggtaggagactaaaggaaaacaaacagacattgaaagaaatatgatttatgatccttgattgatcctcaattaggagaaaaaacaactatgaagaacattgtttaacatagcactttatgtagaaataaaagatttatcttatcctaaaatgtcatcttgagaactgtagcaaaaaacatgaaactagtgttatcattgtatgtatcatatttcaaataaggtgagaaaacaatggcacatttttattttttgagtttacttaggaaaaattataattgtcaaaatattttatttacaaaatccaattgtttatgtttgaactttgctgccaagtgaatttttaaaagtgaactagcacatcgttaactctccagtttctgcaatatagttaactataagtaggcttttttttttttttctggaaacatgttatgttgaaactcagttatatgcataacctgtaattagatttacatttttcatgaaagctgtatcctaagtatctgccttctctttaaaatatagtcttagcaagttaacgaaaatgctaatactatttaattctaactgttgtatatttaaatacaatgaaaaacagtaaaaaatggatttatatttttaaatttactatggctttaatagctggaattaattgcaaaagaacagctgcatctttagcaccacaggcttaaattaagatcccaaagtcccataggttttacattgcatgacatgttagcaagaaacttacaaatatagaaaggctcatgttctaagacagaacatgatccatataatatccatgattagtaaagcaaataaaattcagtccaacatcagggtctgtaaagaaaataaaatgatgagagctgagaaaaaaaagaaggaactagttagttcctcttacagtttcaataatatcccaaacaattcatttttatctgcggtatttaagaaatggatttgtttagttgattctgtttctcttagttgctaatgtgattattttaaatttctcattttgtttaatctgaagtatttatacatagtccttgctgaaactatttctcttgtagcacttaatgatagaaaatcctcagacatattagtttattccttatctttatttccataaatgagaaacttgagaaaagaatagtagaatactttgattcatagtaaatgggcactttgatttatgattgattattttaatagctgaaaagtcttagaagagcatagtaaatttttttctcctcaaaatagttattaatgtttaaaatcttttgtaccaaatataatttcagtcttcctggaagtttgccaaagcggaactttcaaaacaaaaaggacaataccttgattccttaccaataatgcctgtgtttttttcaaataatataacaatttttaaattacctttatagatgtattaatgagaagataaaataatatattatttctttatacttcatatgtattgccaacattcaaaacaaatctgttgattgcttcaaataaacacacttccagtgatttttttccttaaaaagaaataatagcttgtctgtataccagctattaattttgcttgttgcacacatatatttgaagatgagtttgtatatgtgttcataggcagtcgaatccacatctaactcgtcttccctagcacctatgcaactgtatgccactatgttccctttatcttctgtggcccctgatgtactagtaaactaagaatgatattatcttagcaatgtcaaaatctcaagtaataaggatcctgcctaaccttaaggtgatattttatcttctttttctttttaacatcttgtttagttctacaaatagcactgaattgctaccttcgtaaaattatgaagtgagtacctcaagtacatttgatttgtgatgttttagttttggagaagatgctctataaaataatacttggtaagggtattaagaggtttgacatgcaaaaatgtggcatacataagtttgttgataaaaaactaaatatgtttattgtagcactttattttttaatctgctgatgagcactgtgaatcatttagagctgaggacataaatgcactttttttccctcaaaagtatttgaccagagatatatttttttcataaatcatattatatgacaaatattgtatagaacatacttagagaactgttaggcaaatatttgggagctttaatactttaaaaaatcttgtatcttcaacttatcttaaaacaaaatgattatataacacaattatatttcttactgtaaacaatactttctgcaatttctaaattttcttgaagtgataagttcagaattttatgaatatggtcatatttttccaacttttatctgtttttcttctgcatactgtgtattgcctgtgtatctccatttcttttcatattccccttgaactttttactcagctacactcttcttaaaagagacatcatagttctgacaatcctttttgtttctcttttttttttctcctgggaggtaggatactcttcttttaaatatgttttaaagtgacctttacacatgtagttctcttttcctgggatggccccttacctcaagagcttttgtgatttagaactctggttaagtgtgacccactcagtaagccgagcagtaagcttttcctgccatctatttattctttcatttaatctgttactaaatcacaaatatttagtaagtatttgacacatatgcacatgtgtgctaggctgctgtgagtgtaaagataagaatatgaatatgtaaacagctcacattcttgtgagctctacaggctagtgaacaggcaataattgctgttatgggacagtatagcatagtgggtacacagaaagaacacataatctagactgtggaaaccaggtaacacttctctggtaaactgataactggccaaagattggaaagataaatgggagttagcgaggtaaaaggatgaatgtgcaatcagaacacctaagaaaagtgtaaaaaacttggatagacataaatgaaaaccagtgtaattactaggaaactagccaggaagacactgataatatgtgttaggagaagttttatagtatttatagtattaacaaacatcacggctttaagaactctaagtctggactttgagaccacgctggaattgactgtggctaataagaaggctttctgctatgtacaaaacactttataagtcacacagattgagtttgttttttcatgccatagccatataacactacaatggaaagaaagccctacctaaattgccataagagagtaaattcccaacaaggttggatagattagttgtgtccctctcttccatatcagagaaatgtggaagtgcttaaagtccatatatattttctccagactgagtggtcaaagtccttgtaaaattttttacaggctacacactgatgttacccatagagtttctatatcactttcctgttttccttgaattacacataaagaacagtagcctatagcataaaagtttcttttcaatatggatacctccctgcattattaagtattagacacagaaggaaaaccaatttgctgcatcatacaaattcacattgttttatgtatacttttagactgttggtctctaattttattttttcttacccttatttgtgtttatttaaataaattttactatgtatagttaaggtatacgacataatgttatgagacatatataaaggtttttaaacagtgaaatggttactataatagagcaaattaacatatctgtcatttctcatagttactcatttcgccccctgtggcaagagcagctgtaatctcatttagcaaaagtcctgaaaacaatacactattattagctatagttttatgtagcacattagatagttcatcctacatatttgctactttgtatcatttgccctcatgtactcccaccctggaaactactgttttattctctatctctatatatttgacctttctttttttggtagattctacatatctaagtaagaatatgcagtatttgccttcctgtggctggcttatttcacttagcataatattctccaattccacccaagttgtggcaaatggcaggatgccttccttttaaatctgctttaaaatgtttataaggagactggaggtaaattttcaaaatgttaattcctttccaatcaatcaaagaaaatgttctttaatattctcagaaccaatgcttcagtacacttttgtaggtctccctcagaaataagtctctttgtgaagtagtcagacaaattcacttttaatgtcaaattgggttgtgtttgtttgtttctgtgataggtaagttaggtaatatattacacctgatactacatatacaaatgtctgtaatcatggcttaacagtaggaaaagactagaaatagttttactctaaatataattattttaatattatggtaatatggcattttctgaatattcttgtcagttgattatagatgtttataaaataacgggcttattagagatttactgagtagataaatgatataaggattaatactcagtaaataattaatatgttttttaatttacttagaaatatcccatattaacagccaggcacggtggctcacgcctgtaattccagcactttgggaggccgaggcgggcggatcacgaggttaggagatcgagaccatcctggctaacacagtgaaaccccctttctactaaaaatacaaaaaaaaaaaaattaactgggcgtggtggcgggcgcctgtagtcccagctactcgggaggctgaggcaggagaaaggcgtgaacccaggaggcagagcttgcagtgagctgagatcgcaccactacactccagcctgggtgacagagcaagactatatcccatattagcactttattttttaatctattagtagaatttttattcaacatcatgtatttcagaatttctacattaaaaagtcatgatcaatatagtaacagttctagtataaggtagtataatttggtctgataatttaattgataaagatatttatttcttttcttaacagtatatagttactagcattctagtagatgccattcctggtatgtctgggtttgatatgcagcagtattctaagaaagcctcagtttgtggtcagatttaatatttttttattacggtgactaagtttaattaggaagtttgatttgtactccttacttgactagttcaggaaatcagttcatttgaatctttttccatgcataattattctctggatttgggtatgtgatagaaaatatagtcagaagataattgaataaggaggcattgagctgatcctcagtccttgggtgtttctaaaaggatggatagacagaatcttttggaatagaaatgtatggtaggtatattcattaatacatttcagtaagggagcattatgtgataatccttagtaaatagaaaggtctaatcatgatctttgctttacctcaggccattgatatttcatatacattttccctcttcttttgacatttacgttggattttaatgcagtaattctggatttaaaaagcttgttataaattaccttgggcagtatggccattttcatgatattgattcttcctacccatgagcatggaatgttcttccatttgtttgtatcctcttttatttcattgagcagtggtttgtagttctccttgaagaggtccttcacgtcccttgtaaggtggattcctaggtattttattctcttagaagcaattgtgaatgggagttcactcatgatttggctctctgtttgtctgttattggtgtataagaatgcttgtgatttttgtacattgattttgtatcctgagactttgcagaagttgcttatcagcttatatagattcagtgccatccccatcaagctaccaatgactttcttcacagaattggaaaaaactacttcaaagttcatttggaaccaaaaaagagcccgcatcgccaagtcaatcctaagccaaaagaacaaagctggaggcatcacgctacctgactttaaactatactacaaggctacagtaaccaaaacagcatggtactggtaccaaaacagagatatagatcaatggaacagaacagagccctcagaaataacgccgcatatctacaactatctgatctttgacaaacctgagaaaaacaagcaatggggaaagggtttcctatttaataaatggtgctgggaaaactggctagccatatgtagaaagctgaaactggatcccatccttataccttatacaaaaatcaattcaagatggattaaagacttaaacgttagacctaaaaccataaacagcctggaagaaaacctaggcattaccattcaggacataggcatgggcaaggacttcatgtctaaaacaccaaaagcaatggcaacaaaagccaaaattgacaaatgggatctaattaaactaaagagcttctgcacagcaaaagaaactaccatcagagtgaacaggcaacctacagaatgggagaaaatttttgcaacctacgcatctgacaaagggctaatatccagaatctataatgaactgaaacaaatttacaagaaaaaaacaaccccatcaaaaagtgggcgaaggacatgaacagccacttctcaaaagaagacatttatgcagccaaaaaacacatgaaaaaatgctcaccatcactggtcgtcagagaaatgcaaatcaaaaccacaatgagatatcatctcacaccagttagaatggcaatcattaaaaagtcaggaaacaacaggtgctggagaggatgtggagaaataggaacactttgacactgttggtgggactgtaaactagttcaaccattgtggaagtcagtgtggcgattcctcagggatctagaactagaaataccatttgacccagccatcccattactgggtatatacccaaaggactataaataatgctgctataaagacacatgcacacgtatgtttattgcggcactattcacaatagcaaagacttggaaccaacccaaatgtccaacaatgatagactggattaagaaaatgtggcacatatacaccatggaatactatgcagccataaaaaatgatgagttcatgtcctttgtagggacatggatgaaattggaaatcatcattctcagtaaactatcacaagaacaaaaaaccaaacaccgcatattctcactcataggtgggagttgaacaatgagaatacatggacacaggaaggggaacgtcacactctggggactgttgtggggtggggggagggggtagggatagcattgggtgatatacctaatgctagatgatgagttagtgggtgcagcgcaccagcatgtcacatgtatacatatgtaactaacctgcacattgtgcacatctaccctaaaacttaaagtataataaacaacaacaaaaaaaagcttgttataatagggctcatccaaggtcatagttttatttcattaaatgaatagttatttgttaacaacttgctaagtagtaggctggggatacacatgtgaacaaaacagtccaagttcctgttcatttggaccttttgttccaccagagagaggcaaacaatgaagtaagcaaattacaacaaacaagaatttcagaaaattgtaagggtcataaagaagcataaagtgatagtgatttgaaagaggctgtttatggctgttaagaaagtcttctctgataaggtattattgagctaagtcttttatgatgagaaaggggctgctatgggaaaagccagtggaacagtgttcccaggatggagatcagtgggaaaaaaaaggcctaagagagaataagtgtggcatgtcccaggaactaaaaaagacctaactccctggagtgaagaaaaagagagaaagagtaatatgagatggggactgacgagagctcagcagaggtcagatcttgatgggttttgaaagccatagtaaagggtttagacttaactcttaatatgagatgagaagccgttaagtttttaaacaggtaaattacataatatttacaggttcaaactattattctgagagaggagtggattgtagtggagcaaatagtgaaccaagatggacagtaattagcagaccattgtaatgaacatgtttagagcaaatagtgtctccgactagggaggtgttggtagagagagaaagagagagagagaatgaagtcagattatattttatggtatttacaaccatggggactaaatgaacatcatcctgggaagagagtagcaacacagaagccagaagaggaaactatttccataaggaggaagtggttaatggaagtcactacatgaaaaggaaaggtaaaatgccataatactatagcacttgatatttttcctcatggctacagtttaccagtatctctgtcattttgccttattgactgaaaactgatttaatgtctgcctctacacctatacatctgttcagcctttgcttccaaacactttgaagaaaagaggaaaggctatgacaactttaacaaagaagtggcaaagtggaccaaggaaaatagccaaaatttcatgcccctcccccaaaacctgggatttgagagagaagagaaagacaacagcttccctacctgctccataggacataaagagctaaggacacagtctaattttgcctaagagacaaagctaaaagaaacattcataaaagaggttttggatatgaggcatatgctcaaacttgaggtaaccaagagcactatgaagaaatttagagggacagggaaggatacagaattgggtgagattcagagatatatggattactatgaggataagagtctgatgatggctgaagaaacagacttctggtaacttcgatatgtagaaatatgaggaatagcagtctcttagaggaagatgggcagttagagttataatccagcttgttattttaagggtatgataccactgacctttcttttctgctccttgtaattatgtggtgagttttgatgggggaggagcaggggtagtgaaatactgaagtcactaaaggttaggggaagagttggctcaaatgaactaactgaaggatacccaagaacttgttcacagggggcagattaatgagtaggggcaggagatcaaaaactgcagggagagtatacaggaaaccagactcagagattcccctctaaaggaaaggccagatggtgacagagagccagtcatctgtcctcacttggattagaggctagtgagtgaccaggagtccaaggatctgtcttcaagtgtattagaagtcagaagacagtccagaggaagactgggtttgacactgtggatgattgtgtattcctgtgatagtgcatgaatatacctgacagggatcacactctgttacatccaggtaatatctactctgggattctgccagttgtcaggccttatctatagcattttaataattcagaataaaagagacaaggataggagagagacttatatgaaagaagaattggaattaacagaaatacattatggaaacatagatctgtaatattctgagacttgtatttttaaaactgtttgtaatggctaagtcagattttgttcatagtgtcacagaaacttacctgaattgtagttacctattttgacctgtactcaaacaggtgtctgacagatgtattatctattttcacatgtcactattagcccctataactcttaagatattctgatattctttaatttataattctataataattaatgttgaaaaaataggtaataagatactccattgtgtttcacatcagggcatacaaaaataatttttagcaaatgagttgagttgcagaatttctgagcagaatttctgagctttgccttcatacccaaagtcacattttttttctaaatatgttgtggtatgctgaagctatttacttatttttaattttaattttaattttttttttgagacagagcctcactctgtagcccaggctggagtgcagtggcacaatcccagctcactgaaacctccacctctcgagtaactgggattacaggtgcacacccccatgcctggctaatttttatgtttagtagagatggggtttcaccatgttggccaggctggtcttgaactcctgacttcaagtgatccgcctacctcggcctcccaagtgttgggattacaggcgtgaaccaccgtgcccagccgctatttattttaactaagtgttttgttatttgttctcagcattatagtcataggatagctttaatgcgctggaaaaatatagattaccaggaaaaatatagattaccacagtgtattaatgataggtttgtaatttttttcgtgataaaacattacacattttttgttaaaatggtaaaaggaatttatggaaaagccgcagctaacatcacactcaatagtgaagactgaaagcttttcccatgataagaaacaagacatggatgcctgctttcaccactgttattaaacatttttctggtacttgtagccagaataattggacaagaaaacaaaaatggtatccaaattggaaaggaagaagtaccactatctctatttgcggatgacatcttcctgtatatacaaaactccagagaatcaagcaagccactagagctaataaattaagcaaagttttagaacaaacaaaaatcagttcctatacaccacagtgaacagtccaaaaaggaaattaagaaataaatttcgtttacagtagcatctaaaatagtaaaatgcctgcaaataaatttaaccaaggaggtacaaaactgaagacctaaggaaaggcatcccatttaatgggtgagtacacttaatgttgttaaaatatcagtactacccaaagtatacagactcgacttaattgctatcaaaattctaaatgtttttttttttttacagaaatgggaagcctgattctgaaaatgcatacggaattgcaaggttcctagaatagataaaacaatattgaaaaattacagagttgaggattcacacttcctgacttcaaaacttactgtaaagatacagtaaccaaaagagtctggtactgtcattaggaaagacaataattaatggagtctagaaataattccacataactatagccaattgatttttgacaagggtatcaagttcattcaatgggaagagaacaatctcttcaacaagtgttgttgggacacctggatttccacatgcaagagtggagttagaaccctcctcatatcatattaaaatatcaaaattaattcaaaatagatcaacaacctaaatataagagctaaaaccataaaactgtagaaggaaatgtagaaatagttctccatgaccttggatttgggaatggattattcagtaacaaaaatgggaacaaaaaataaattggacttcatcaaaattttaaaacttctgtgcatcaaaggacattattaacgtccattaccaaaggacattaacaaagacaacctacagaatgagagaaaatgtttgaaaataatttatacaataactttaatatccagaatatataaacaactcctaaaactcaacgaataaaaccccagtggctcatgcctgtaatcccagcacattgggaggtcaaggcagtgggatcacttgagtccagaatttggagaccagcttgggtaacattgcgagaccccatctcaaaaaaaatttttttaattaaaaaaaaattagccagatgtggccgggcacggtggctcacgcctgtaatcccagcactttgggaggccgaggcaggcggatcatgaggccaggagatcgaggccatcctggctaacacggtgaaaccccgtctctactaaaaatacaaaaaaattatccgggcgtggtggcgggcgcctgtagtcccagctacttgggaggctgaggcaggagaatggcgggaacccaggaggtggagcttgcagtgagccgagattgcgccactgcactccagcctgggcgacagagcgagactccgtctcaaaaaaaaaaaaaaaaaaaaaaaaactagccagatgtgatggtgcgcacctgtagttcacctacttggggctgagctgggaggattgcttgagtccaggagtttgtggctgcagtaagcaatgatcacgctactgcactcacagttgggcaacacagtgagaccctgtctcatacacacaaaaagacaccatttgaaaagtgtgcaaatgatgtgaacagatatttctctaaagaaaatatacaaatgaacagtaagcacgtgcaaaaatgttcgacattattagtcattagtaaagtgcaaatcgaaactccaagatagctcttcacacctattaggatggctattactaaaaaataataataaatgttggctaagacttacagaaattggaacccttttacactgttgttggggatgtaaaatggtgccgcggcttgggacagtttatctgttcctcaaaaggctagaattaccatattagtcaacaattccactcctaggtttgtacacagaataattgagaacaagcactgaagcagatgctaccagtgttcattgcagcagtattcacaatagccaaaaggtgtaaacaacccacgtgtccaccaacaggtaaatggataaataaaatatggtatgtaacatgcaatggaatattgttacgctgtaataagggaatgaatttttgagatatgctacatcagtgcatcttgaaaatattatcctaagtaaaataagccagacaccagacagatattgtgtgattccatttatacgaaatatctagaattttgacatagagacaaaaagtagattagaggtaactgggggatataggaaggaagggatggaaatttatttcttaatggttagagttacagtttgtgataatgaaaaacttttggaaagagatagtgagagtatatgtacaacatttgaatttaattaataccactgaattgtacacctaaagatgggtaaaaggaccagttttgtatgtagcacaatttttattttttatttatttattgagacagagtatcactctgttgcccaggctggagtgcagtggcatgatctctggtcactgtaacctgtgcctcgcaaattcaagtgattctccaccctcagcctcccaagtagctgggactacaggcgtgcaccactaaaaaataacaaaatttttttagtagagatggagttctcactgtgtagaccaggctggtctcaaactcctgacttcaggtcatccactcgccttggtatatgtacagtttttaaattgccatttttctattatcttagcatcctaaaactataaaaaattaatacattttaatattaataataatataatacttttaaataatagattacatatacgcttaaatttctgttgtttttccgactatagtctactctcctatattacttctcccaccaagttaaacagtcaaaattctttatcctacctctacatttatttgatatagtgcatgtagtcagtgatatgatattcattgattattcactgatttaaataattcagtccttgaaatttcaacaaatgcaggccttgtcttcagttgaatttgtaggcttatgattaaaaaatggatcattctataaactctatatttttaaaaaatatgacataaagttactgcttaattttgtctaatgcattaatctatattaggtctcaaagttgacaactttgttacatgtcagaaattaatgtaagagacattaattttcttgctctcatctcgtaagcaatctctgattcgttaccatgctgcatgtccattgcaatgctgctccccttacctttacatgactctgattagctatgcattccaccactggtcacacttctgagtttcttagcttgagttggtatcacatgtttggtgcaaactgttttcccagctgggacatgtgatatcaaatcaagctttgcaaaagtgaattcctattaatacataaaggatagatagaagaatttcaagtgccatttttctcatagcaaaaatttaaaagtacaaattactgtcaaaaatggtgatattgagggggagtggagacaagtcagcaaatctctatttattatgtacatataaaatgtaattgcactttaataaaaatttgttatggcagttttatatttctgtaattgtggaaattaaaaggttatactattgacataactaggattgctatagtgatcctaaatttagcataaacctatgctgaggatgaatgaatcgtcatcatcttaactgttttttgcatggcctcaaaatttaaaaactagaaataaattgcaatatatttgagaataattgcagttgttatataaaattttcagatatatctgttttcagggttcttcagaagttagattcctcagctgtgcagatgctactttatgggaatagctagttaagtaaattagtattccatttgcatgatgagacagagaatgaatgaacgacaagctggacaacatctactttgccattcattctctcttcctaaggtctctgaagaatgaatatttttagatttttctgaaaaatatactctcatcctttgacttgatttgtgatattttaatgtgaaaacatgttgtataaacagaatcaggccttcactatgttgactttggattaagcatgttatatggccttttgcaaatttttgcagtttaaaagtagagagataattgtgtagagttaatcacctagagaagaaacccaattattactttacatcataagatgtcaattcctatgatttctttttttaaaagaccttttcttgaaatagtgtattttctcctcagtaattgtagggtaggaggaagtattatcaaatgtgcgtaactgtacagtggtataaaagctgcaattacaaattgaacttacttttaatggcaattttatcaagtacttttgttgatctgaaaacttgtcctaaaaaatcttactaatagcccacatagttattaaccatctcctgtggtggtctgttctctgcaagaagggtcaatcatttctttttatgacagatttggaataaatcttggagaaatgttaatggtattaagacaatgctttttaaagaaacatcaaagttacatgaaaataatttttccacaatcaactgaaacatatgcgattttcttaaatgtgttaaatttgctatctggcctaatattacattcttaggaggtatgtggtataatgataaaaaattgtttttgacaagacttttactgttctctgtgtttgctatatgtctttgcacagttgcttccatttccatacatgtaagttggagatatctgtcctgattattgtgaacattaaatgagattttatgtgtgtcaatcaattatactaacaatatataaatatatgtattataattcatatttatatatcttctgtaaatcacaaattggcttatgaagataaggaaggatgattactgttaaaagtcacttaaaagaatattctgagatgcatattgttaaattgcttcaaattttaagttattccgtatgcgtatagggacatagaaaggaaacaaaaggtctgtagttgtgagcttcagagaagacctttgaattgcttcatttcttgaaattggttaagtatatactttcccctgaaagaatgtactactacattgctgcgactagaaaacccttcaatgtccttcagtggagcttttgctgactcattatcttaaatactcataaatgagacttttgcttatgtaattatagcaataaatttggtaacctaagaaatgaatgtaaatcatctatttataaagacaatatgaaaagtgattatcatatatagactattatgggtgatttttattaaataaatggtaacatagtctgttgaaaggatactttgtgttttagttttaaaaattaagatgcttgtatagaattttaaatcttttaagaagaaagcattaaagtaatattttatctatttacactgaccccaaacttggaaataaagaaaaatgaaatcaaaaatgatttcataaaggccacatattccctatggttgtcactaggaacaagaaaactacttggttttttttttgtttgtttggctttttttttttttttttttttttttgagtctgtcacccaggctggagtgcagtggtgtgatctcggctcactgcaagctctgcctcccaggttcatgccattctcctgcctcagcctcccaagtagctaggactacaggtgcccaccaccacgcctggctaattttttgtatttttagtggagacggggtttcaccgtgttagccaggatggtcttgatctcctgacctcatgatccgcccgcctcagcctcccaaagtgttgggattacaagcgtgagccaccatgcccggcccggaacctacttgttaatagtttatataattttaacagtcttatttaactgtatattattaggttgctgaggactagaaacagcaaattataagagaagagcctgttataatcagatattttagcaaacagcaaaaataagtggcaaaaagaggaaaaatatgaaaactaaaagaatagataccactcacaaagcactgtttgtgtaagagtaaacagacagacatacctccaaatagcaaggaaatttaaatgtatttgaaaatatatattgcaagatatttcttgatatgatagaaactaaatgtttacttgcatgaaataaaaacatgttgatcacaatattagctatccaaaattagtaatttctctgcataataagtagcagttatctctataaattatctgtatatcatgttgttttaaatatcagcttttgcctgttagagttaattggtatttacattttcttaagttattttggaggccaaaattattgctatagattgtcatagaagtgttaataaattttctactacatttttgtattattgttttattttgtgatgtttcagtgtcactcatccaaccaaatgacttactctacactaacattaatatttcctaaataattatgtctgtattctttcataagatactgagttatatttccagtaggaatataaactgatgcattttcttttatatgaacagaatgttcactaattttcattatagatgacaattgaaactatgtggatcaaatcattagcatatgttcgttattctagaatagtcttactctggtttgaataatgtctcaggtatctaaacagttttttatagcactttagaccacaacaaaaaatatttttctccctaacaatattattttaggtagagttcattttcagagtttgtctatttttttctaccctaggaaaaagaaaaaaattgttaaattatccattatttctcctagtacctgtctcaaaaaacttttaccacgtgccctttttaaatgataaattataacttattatagtttttaaatcattttccgaaatatatctgctttttatgttcgttgaatgatcttataaaccgagagatttactggctttatagatattttgtagataaaaaaggccttagaaatcaatcacatatatgtttcaaaatacagacaagaaattttagactcaggaagttgtttatttaaaaaaaaaatacttgttgagtatctgtagtgtgccaggcactcttctgggcactggagatacagtggtaaacatgacaaagtccctttcatactgttgtttttgtctctgctgagcctgtcattgtctctcagtgtttttcataacagttattttcttttactattctttctctgtgttttatttctcttatgtatagtgtctgtccacatgaactagaatatgagctccatgaaggcagggtttgttcgttttttttttcctgtttggtcattgctgtaccttcagcttctaatatgatacttatttagtagggactcaatacatttttatcaaatgagttaatgaactgagtaaaaaccatgagctaggagcatgtggcattctgaaagccaagtgaagtgtttttagaacagaatggtcacctactgacagcataaaatgctgctgacgaggcaaacaacatgaagacttgaagattagatttatccaggtacagctgtgatgaatgctttcagtagagttgtagaatctactagattcaaggagaaaaaaagccatattggagtatattcaggattgggtgatgaggaagtagaaagagagtatctataaaactcattcaaggaattttgagggataaggaaattgagctgcaactagaagaggggtatgaggtcaatgagattttttaaatgtttttaaatgaaaattgtaagcatgtataaaatagaacaattaatttcttttttttttttttttttttttttttttttttttcgagacggagtctcgcccaggctggagtgcagtggcgcgatcttggctcactgcaagctccgcctcacgggttcgcgtcattctcctgcctcagcctcctgagtagctgggactacaggtgcccgccaccatgcccggctatttttttttgtatttttagtagagatggggtttcaccgtgttagccaggatggcctcgatcttctggcctcatgatccgcctgcctcggtctcccaaagtgctgggattacaggtgtgagccaccgcacccggccaattaatttctttatacccttcatctatatcaacagtatcaagatttgtcatgcctaaaaagtttactcattttttgttgttgcagaaatattttgatgcaagttcagttacattttacctgtacatatttcagtattcatctcagaaaagaaaaaaaaatgacactttctgtaaactgatgccataatctcacatgttgaagttaacagtaattatttggtgccaaaactctgtccttgtcattgcctcaattttgtttcaagtgaaaattgtttaatttgggacccaaccaaattctgccttacatttagtcataacatattttaagtcttcttttgtctggagagtaatctcttctttattgacgaagctgcatcagttgtcttataaactatttttgtgtctttgcttccttatggtatcgtttattgttctgttttcagtattaatctatagtgctaaatgtttgattagatttaggttcaactacttttaggtacatcataattggttctgtgtgttttttattacatcacatcaagaagcatataatgtttggttttcatactcgtcatgctaatgttgatcattgaaatcagttggtaatacctgatgtttttattgaaaattttatattaacctttcatctgatgattttatccatttatgatctttaccaaacttaattttgtcattaggtttgcaaaagagtaattttctaactctatcaatgtctttaaaaattgtagaaattacaacatatttcctactgatgggaatattcaatagaaaaaaattatgatgtaagaaataactctaactggagaagcagtggacttggtaggtaagggggcacagggcccagtgcataagtgatggatcaccttaggtagaaacaggaactgtgtaactgacttacctaaacttatagtagcactgaatatattttattaaatttctgtgaaaacttttctattaaaactgataattgtatgtaattttagaaacctgtgcatttttagcatttaatactgtatgttaaatcaaaacttaaagtcattgtaaatgtcaatgcctgtatttgacattgccccttcttattatactttttgtgatttctttcttaaaagtgcagttttaaattaatggtctcttaagccgggcgtggtggctcacacctgtaatcctagcactttgggaggctgaggtgggcagatcacttgagctcagaagagcagcctatgccacatgtcgaaactctgtctctacaaaaaaatccaaaaaattagccaggcatggtggtgccttcctgtagtcccagctgcttggagggccaaggcatgaggatcactcttgagcccaggtggtcgaggctgcagtgagccaagatctcaccactgcactccagcctgagtgataaagtgagactctgtctcaaaaaaattaattaattaatggtatcttatatacctctatcttatacaaaatatgggcatgtacttttatgtaactggttttcacctctcgttgctagtgtgtttcaaagagaaataaatgctactgttaaataaaatgataaataacaggcagtttagtttagatactaattgagcctaaatcctttaaaatgacaaaaccagcaacttttatgatttataggctcattttttttaacacagtttgatcatacacctgacagtctcccttttttgtgactttctcctaaaaattacggttttgtgttttctgagtgaaaaggccataagttcagtagaagaatatgatagcatctcttctgaggattgtagcatttctgagtggtagatatagaatctccttttttctttcctttttttatgttaatagttctaatgcaaattatgtaatttaattttcaaacagtatgtactgcaattgtgaacctgtgaactattttcaattgtcccacagatgctaatatgtgaaatttagctttagacagtcataattctttatggctcagtaatttccactcactatctgttagtctctgcaatctgaaaagtataggggctactgtgtggtctgacatggtttgtattatcagaattttattgacagcatagatttataatctctttagttatttagagccatgttttttttttttttttttttttttttatctctatctaagttagactgttttggcatccacaaaagagcactctgtagttgtctccaaaaacaagaatgtaatctgatctgttttcatattgtctgctgacctggataagaacactttgtattagctacattgatcagttcctatcctttctagtcatttattggacacttaatacaaccttgtaaagactccctagagtatccccataaactagatcattttatgcaggaaccacaatatgtatatcaagatagacaagaatgagaaaagctgattaagagaaactggaaaaattaaacccacagactcacattatgtttttcaggctttatccacccttacaaatgaaagccatatacatggtctattgaaatgttttgtaaaatccaggaaacttagatttttatagatctgaattttcattgtttaaaatatgacaattttatttaggtatatctctaagtttttcttttatttctgcttctaattcctgtaatctaattctgtcttctagaagtattaatgatattcttttactattattttaatttcaaaactactagaaaattggtctgtgtgtcagaatctttaaagcagtataaactccttatgactttttaaatatttgtagtttcacaaatttgtccttcagaatgtattttaaaacattttacaaagtaccttgaaattttgaaacagtagcaccaaaaggaaatatgttaggtaattgaaaatatttccattaattcaaaaactcttttataaattttaaaatcccattttttggaaaattttaacaactgtttagaaaagaaatacttatttcttagaagcaagttcatgtgttatgttgggtcactgagaagattacagtggaataccaggcttctacaataagcctgagaataatctgaaaaactaatttatttttattgccttaatgtatatctgtaaagtataaaataggtgatacgacctgtgtgttagacacagtttcaccttagtcttgtcttgcatcatatatttacattttattcacaagatattaaataaatactattaataatatctttaacaaatatttgtgaatttcaagtttcataaactatttaaatttcatgtttagtcctaatattctttttattaaaattatatcatcaataaagacagcactgattcatttatccaacaaatgtttacagtgtacctattgtgtgccagaagctattctaaactttgaggatactacagcacaaaacaaaacaaatttacactccacgtagagcttatattctagtgaaaaagtaaaaaaaaaaacaatgtaaaatatcgggtaacaagtgttgctatgattaaaggaagagcgtggtaagtgatggaacaacttgtaccatctatgttgttaccaccattattttcagactgtaatgtcctacaattctctggttttatgtcggtttttttccccctgaagagtaagctctttgaaaactgggtttatagatctttactggcatgttaccagtttctaaccctaagttcttttataagtactcaataagtatttgttatgtcaatgaatcagtgatatgttcacaacttctctggatctctgattgagctgcaatccaaatgccctttttgagaccaaaacaactagaacggaatttataaaaggaatcatgagaagagacatgtatatattacgtgtggttcaattaaatgttttacgttagagttctgcattttacatttttttggcgttatgatatcatcctttttcataatttttttaatgcaaagtgtggaatattttctgaaaatcaatgttttatccacaggtactactgagcgagtgtgcttgatccagggaacggttgaagcactgaatgcagttcatggattcattgcagaaaaaattcgagaaatgccccaaaatgtggccaagacagaaccagtcagcattctacaaccccagaccaccgttaatccagatcgcatcaaacaagtgagtgtttagttgagaaatcaaagagaaatatccacagcatagtataagttccttacaaaagaagccttaaagtgttagcataaaacttttattttaagcacacataaaacataccagagttgtcatttagttatttaaagactatcaaggtctcatccttagattgatcagttaatttattgatcaattgaattattcatttattagtgttacattgaggagcacttatgtgactcttagtgattgccctttttaaatttatagacacaaatttaatttataggaattgaatctgtttaaaattatatcactttttaaataaagtataagtatttcaatgatacattcaaaatttccaataccctatttttagtgatatttgtagttttcaggatagttattatgcatagaggctcctgttttgttaattttgttgtcatgttctcattttttatcaaaaaaatgtatagtaaatttatgtacctaccatacagtcctttgttacaaatcagttactgtgttttgtgtaacttatgtagtatttaaacatatgtcataaagggccaatgttcatttttaatgtacgagattttttgtaaaaaattttacttgggaaaaactgatgtgagtttttaagattgaataatgggtgacatgatgtagggggaaaatgacattatttcatgttaaataaggtggattcttccaccgtaaactcttttacgtctataaatttattatgttcataattattgtttctgcctttgcctttttataattagcgtcttaatttgtgacgtaattttactatcacagactatggcttcaaaagaaatgtattattcttcagtaattcacagaatatttaatttacagaatactcatgttcattgtaataaatttgaaatgtagctcaaagtcttattaatttcatgtttctgaatttaaaaagtattatactgaacagtgttatgaatcctataattttaccaatatatagataaatataatgttgaataatgaaatataaacatagaaattgataattaggcaatatattttcaaattatagactaatgtctaattttatactaattacttttttaaaaaaatccctttatgtttaaatcatgagtaggtagttgttattctatacaaaaatgttcatattataatctttgtcagtgtcaaatggttcagtttatacccttcataagtcttaaaagaagtatcccttaatgtatacatgggagaatataaatattttaaagctgtaaaatcagtggatattttatttttcacagtcatttatagttgtgtttattttttttaccctcagtgaatacaaagagtagtttgaagactgaattcttgaaagtaatactgtgactttaatcagagtttaaaagtagaagtgtagttaaagacttaggttaaaatcacctggggctaagagtttacagaataagcactgaagtataaggtctattggctttctgccttaatccagcctataagttcctccttttcttttgtaatttctgtgagaaaattcaaacatttagggatagaagccaatatcttgatttttttttaagtaaaacataaaatttagtagtatgataccattgacaatatgttcaggacggtgatatgaattattattattttttataagaataaatatctcataccaccaaataatggtctatgaatcattgttaaaattctaatttgctatatggcagtatgagatttacaggctatcatatatccagtgccagtatagatttatgaagactagaattttaaaatatttgctttatttttatttgcctttttggatgttatttaacttcaagataagtataaaaaataatagtgatttattgacttttgtgtatttgcatccatttgtaagacttgtaggtattcatggaattagaagtattgttggttatttaatattttcatgtaatcaataatgtatgtgacagtgtatcatttaaaaggatttattaaaaagacaacactaaatctaataagacattgtatttaacacttacatattttctttatattataaaagttgaaaattttacttgaaaaatctagtaaagcagtgaaatgtatttccaaaatattataaatcagtcagaccttttgctctaagtttgggattctctgactttctaggtatccaattttaccaacgtagtactctttgctggattattctctaaataataaatatataaatttaaatgaccttaattttacttctgaaaaattatgctgttattcagtataaaatagttatgtctaaaatcattttgcaatagaatagattaaaatacattttgtatgtttcttatgtatgttttaaactaagtaaattgaatgaaccaggtattttatccaattgaaaactgcccttattgactgagtgggttctcagacaagtataatttcttgggaaagtagtgcctgctggtctctcaggtctttcatatagtagaataatgaaatttagcacaatggccttatatataacttgatatattagatcttgtggaatatttaattcttaattcatatatgtattttttctaaaagctacatcagggaagaagtagttatggacatttaaagaattctcttgtatttaaaaaaaatcaaagtaagatatcaaaaatatttcatttaaccctaagagttttactgtcgtcatgataaattgacaaaaatagcacttgttaatttgtttgttcattattcatgggcatgaataattatgaatttactaaatgccttcttagtaagtagcaaaatatactaaactgtagcccttgcagaccagtttgtgagataagtacttaaaataacttataaaaattaaaattgtatttatataccaaaactacaatgtaaacaatatgctataaaaattcagaggcgtggccaggcactgtggctcacgcctgtaatcccagcactttgggagactgaggcgagcagagcacctgaggtcgggagtttgagaccagcctgaccaacatagagaaaccccatctctactaaaaatacaaaattagccgggtgtggtggcgcatgcctgtagtcacagctgctgggaggctgaggcaggagaatcgcttgaaccctggttgtggaggttgcagtgagccaagatcgcgccattgtactccagcctgggcaacaagagcgaagctctgtctcaaaaaaaaaaaaaaagaaaagaaaaaaattcagaggcgtgtaaaagaaatacaggtcagagtgacagttaatagtcttgtaaatagatgaaaacttgactggaccttgaagaatgtataggaatagcctaattagagtagaagaaagaaaaacacttattttaggaaggtgaaatgatgtgaatttggggagaagggtatcatatttgttgaatagtaaggagactgtattggcagaagtgggacatttatgttgcagtcgagagggaattaatgttagatagatgttagggagccagataatgaaaaaccttggatgtctaatcaaaggacatcctatggaatacagatttgccaaacattttcctaaagagcccttttaatttatctggaagattttgggggggaaaaaaaagaagtcacttatgctgtttgttctctcttgcattaaaaatccagacagactcttagggtgcttgtaggtacagctattcataggaaaagagaactgtgaattgactagttcagatgctggaagacagttcacatgttggaaagaggaagatatttgtcagaaattaaaaactaaagatgacagttaaatatttaaatattttattcattttggtacagtatgtatacaaatgttacagtacacagatttatttaacagaactcaaaataggggattgggaaggtgattacttcagtaatgttacttcactagtaatagattttgaattacaattgagatttgttgttcgtcgctgttttcactttgcctataaataccagaggttcttgacagtctattactgcagacttgcttgaaagcaagctctgtttattacagtgtttattaataataatattctctggcccagcaaaactgtcatttgttaacaagaattcatctcataatttgtaatagtcacacttatttccaaaagcctagttatgtctacatttaattacctactgttaaattcttgattttttaaaaaactatattccaaaagatccactgttttaaaattgttaataattattctgcattaagtattttcacccttcagcgtctaaagaattattaaacagccattcaagtaatgtagataaaatatatattatgcttttccgtttgaaagaaaaaatggcactgaaaactgagtctgtccttcacattcattatttgaaaaatgtagaaaaaaatttttgtaggactgtgtgctttgttctaactaatatatcagtatataatgttatgtggatattcagttaattacatcttcatgatgtatatcagaaattttactaaaggatatttaacatgaaaccactaaactttaactctgtacagtaaatggatgtaaacagtttgcttataaaatgttaaggcaacaggccaggtgcagtggctcttgccagtaatctgagcacttttaggaggccaagacagaggattgcttgaagccaggagtttgagaccagcctgggcaacaaagcgagaccctgtctgtataaaataatgatgataataataatataataaaatattaaggaaataaacaacttgtacatttatattgcacattgaaatatttcttacggatttttgttttataagaaatctgtatggctttatctgtatggttgagaacaactatcacacctgttccattaatttaataatcttttacaagtattactttagtatatttacatttagctgtttatgagaacactttttctcctagtatttaaaaaacaatcaactgaaaggaaactttcgagggtatttttattgttataaattgaatttataaagcaggggtctttttgtgcttaaaagtatttatatgaataatagctgcaaaacttgtcacatctttatttcattacattttcattattttaataatttaaactaagaaaatatagagacaacttactgtaacatttcaacactcttacaacttgaaacccaaacttacataatttttacttgtttattaaatatattaaaatgtaacctcttaacagattatgatgtttaccaaccaaaagtttaattatcttaggcacattgatattgtctagaaatttaaaatcattgattttattcctgtaggaaagaaacagcatcacaattattagggataattttgatgaatgtaagttctatcaattattaatacatgtccaatattttatatatatgccaagcaaaaagaaaggcaataaaaatcgacagattgtattaatctaagtgattacaaattctgagccattcgatattaaattttaattttaattaaaagttcaatttgcaattaaactttttctacatggttctttgcagttaagaccttgttgagaatttgtatccaagacaaggtggatgtcatattaaacctgtagtacttcagaattattttccattagatagtacttctaatggaaatagaagagctcaacacacatagaatcgtgcttctgtaggttaatcaacatggattctaacctgtattgggagaaatgatctctagatttaacacatacttagtcaccagactcattattaatctgagattagtactgaatagatttttacatgtatgttaactcctcccaggtatcctctgtagtaacagttgtaaccaatggtagaaaaataaaacctttactgttcaattcatagaacaatcatagcatggagtcattagcatatgtctcagcaaagtattgcatggaaaataaaatattagggaaatttttaatgattggaaatgaagtctctcttgagaaatagcaagaattaattataaaaaacaaaaatagaaaacaaaagatttaaaacttttttagaattttgaggatttactgattactatagctgtcctaccccttttttgtatgatttggtaaaaatcttggtttgactcactattgtaggtttcctagaagtacttaggttttaactttagaagaatcaggaattatttgaggagtggactatgtaaaacatggtatgatgttagaaacagtagtattttgttactggagggcagtgaattaaccagaagcctggaaatttcttattctttttttttatttttaactcttaatggctttattgtacgcaaattacaacttttgaaatgtcaaatgcaaaaatatgacttcaagtaatttcatctgcttttcctgacactgctgaacctttaaagttatgcttttgctcatatctgagtaattttgacaaatagatattaatataatataaaacataatgtccatatacaagtgtatcttcaatataaaaacctatcccatttcacctgtttagaaatattatctattgaggacgtaacataagcaatgctattttgcttagtgagcatatgacacttaaaaaaattctaaacatcttacacttttaaggtatttctgttagacataagaacttttttaaaaatcttaatgaattgttcaacatgtgtagatggccttatacaacatattatatatatatagtaagtgtatatgtttagaagtgaacaataaatatgattcctaatatttttgtgtttatttttaacacagctgatgatgctatattatactcttcatctatattaaatttactctttaagataaataataaaaatattatgatgatttgttagaatgctattagttacctgtttattaatatgaggttaatgtttacattttcagacgggccttaaatttattaaaaattaatattttagaagataatgtgatattaagaactcagaacttcaaatttaattgcttttaagtatggatccctaaattcatgtggaatcaacttgttggtgatgttcaacatattaagtaggtggataattttatgccaaagtaaacttcatttcaccacttcttcaaatctccgactgtattcatcgataggaaagtgactcttttggttttattcattgaacttcttgaattttttttttttttacatctcttttccccaagaaaacaagagggaaagaaatgaaactactattcatgaatatggtcaggatacttttagtactcatgtgaatttttatcagtcaccatcatgatttcaagtcatgaatttatttttacatgcttatgcatgcatctttacatgcattagttacttaattgatgttaaaatccattaaattcaaatgaataggagaaaaatttgttcataggattttgttctcgttatattacattttattttattttgttttatttaaataatcagtttaaggcttataaaggttgatttgctcctgaactgctttgtttcccagacattgccatcttccccaactaccaccaagtcctctccatctgatcccatgaccacctccagagctaatcaggtacagtatcatcctgtcatctacaccatacttttcacgggtgattgcctgcaaactggagaaaaagataatggtgggttaaggatttattcgttcattcacatatatgcaccatagtcagattccaaataacctaagaaagaaatatcaattatttctaaaattttatatgcatttttaattttagataacaaatactatattcagatattaaactactctaattttttattatttttccttaaaatttgactacctaatggagcactgaagcctatttattgaattggtatttttaatctcccttattgtatcttcctagaatttttcatatgtaagttaaggatatcatatatgtaaaaaaaaaaatgtataaattgagcaaaggtatatctttaaaagtgaatgcaattttatttgctttttatttgagacatgccttatgatgtaaacaactttcaactattgatgaaaagcatttctagcaatctaaaagaaactgaaaattggtatttgtggtaattttaatgtttaacaactcaggagatggtgttttcttagtattttaaaaaattctaagcattttcattgctctgctgacaaactttgcaagtagaatatattttattagtttgatttatgattgttttggtactatttgtaggtcattcttcaaaaatgtagttatttttgacaaatataagaagattatctaaaatatttgtgtaattcagagccatactgtactttaatttgacaatgttgaataatatatttattaaaattattaaacacatttttattttgtgtgagttgagcttcatttaggtgagaaatgttattttctttaatatttttgctttttttaataataaaaggctttatggggttatttaaatattaaatataagcttatctgtttaatatatttttcatatagttgactaacaaattattaactttgaactatatttgctaaatatattaaatgtggcttttgcgtattatctaatataagactatcagaactattttgctgatttttttatcctaatacttttgcaacctgaagaaagatttaaatataataactggaagcaaaactaacatttaggatgatattttatactacaggtttgattttcattttatgcaatagcgttcccttcaaacaaaagcattttataatgcaaacatttttaggcccagtaaagtggttagtaaatacacatctgcagtgttgtaaaacccaacacttctctttgaaggaaatggtactacataaagtgacaaccaagcttgtattacaaatgcatgaagtttaaaagtatacttacatttttactctacataccttgtcttttactgagttttaattatatggtataaaaaccttttaggaaaacaactgattttgtgtttttaatatttcttttgtactttattgttcagtcttttccaaatgtaaacgtgacaaacacaaccacaatacaaataaaacgaatgatttttctcaaggtaaaaaaccttggatctagaaaagaaaacctccttaataattttgcctttgaagctaaatttgtattttctttcatttattcttatatgaacttgtgaatctttataaaatggtttctttaaaaggcaaattatatattttagtttactaatgttgtattttcaccctctagataaagtgctacatttacccttgccaaatctaaattttgctattttgaaataataagtcatttgtaattttatattctgtccactatactctgttatattgttacttatactctgttttcttctgttcttgtacaaagaagcataatatctcctggatatcatgaagcaagatataagagaagaacaaaacaaaatccgtaattcattgaaagaattgtaatcatcaatctttcatattattaatactttgtaattattttctccccaacagtattttccagtagattctaatcatgtggtagggcagaaggaaatgtgttttttgttgttcatttgtttcttgtcaatagtcctgattaatttagctttgctatactgacttatatctggaagtatataaccaagataagaaaataggttttaatatgatcatcttaagctaattgtaatgaaaagaactaatggactgtcaatattcagaaaaccaaaaataaaaaatacagaaaactattcaaagagtaagtttgatctgcatttccaatatttaaaaatactttttattattttaaaaatgatgacatgtttcagtacataccgaattttactttattaaccttgagaccccttaacacgtttccgtaggtcagactgacagactctgactacagtgttgtcctataataatttccttcttaaaactgaaagactatatgagaagccttataaaatgatggcatggtggctcacacctgtaatttcaacactttggaaggccgaggcaggagaatcacttgaggccaggagtttgagaccatcctgggcaacataacatagccaagaccctgtctctaaaaatgtatacattttgaaaattaactgggcatggtggcacttgcctataatcctagctacctggaggctgaggcggaaggagtgcctgaggccaggagttcgaggctgcagtgagccatgatcatgccactgctctccagtcttgtgtgttaccttaagtctcagttttcccgtctgtgaaattcaaataatattgcctcataggattgacataagaaatgaagaacagttacctcttcctagaacagtgtcttgaatgtaataaacatcatataaatgttaggttatgtttatttaatttcttatctgtcaagtgctaatgaaaaagattattctttaacgtagtaaataataaagcaaatggcttattaaagcttttgagttttgcctttggaaagattctagtattagtattggctgttttttcaactctaaaatatttctgtaattaaagcctgtctgctttaaactactttacaattattttctagtaagaatactcagttacttgttgcctaaaaatacataaaattgctcttcttcccctactgaagaagaaacgttataagaactaacagttttacaacttgtatttctgtgcatgtgtttcatattgtaaggtacaagtttgatattcttctacacgtggagttttaaatatgaagcagatataaagatatagcaaatagatcaaattatttaaagcaacatgttttaactttcaaataaaacttaaacagaatcagtagcgttcaatcagttctaagttattaatactaagttactcagtcactccattaagattcaacaaaatggttttgttaatcagtggtaccaaaaattaaattttggttttaaccttagtccttgttagctctcctggaatttttctgaaatttcatgaaaagaataaaagaatgatttcagaaatatgtgtttataaacatttgtttatttactgataagtttgaaattataagcatttatcaaattgtataaaacacatgaaaataggtagctcatatatagtacccttactatggttgcagaaaaataaaaataaaaataattggtctcactttaaattcatgaccacaagtcacaaatggattcttaattctgtcatttgtaagctcattgactttcttattctcttattctctagatgactatttcacaacctctcctctcttttcaatcctgtattagttttctattgctgtataacaaattaccacaaacttagtggcttaagcaacacacatttattttcttataatttctgtaggtcaagagcccatgcatgacttaagccaggcaggctgagccctttgcttgtgacctcacagggctgcaatcagtgttggctgggctgcattctcacctgtaggtttgactaatatgcgtccctgttcatccaggttgttggcagcattcaatttttgtgagggttttttttttttttaacctgtttgactgagggccacaacttataactggctattggctacaggcaactctcagattctagaggccacccacagttgcctgccacacgtccctctccacaggaccttcaaaacttggctgtttgcttcttgcaaggccagtaggagaatctctccacattgtgtgccagcaaaaatggagtcttatatattgaaccaaatcacaggagtaacgttctcaccacctctaccctacaacataatttaatcatgctaatgacattgcatcacttttgccatattcttgtagtgagaagtaagtcatgtgtcccactcacactcaaggggagaagattgtacaggttgtaacaccagtgggtagagatcatggaagttttcaaagaattgtccctaccacaacccccacaatgtttcttgcttcttattctctcccggctaatgaccttacttcctttcctacttcactgagaagattgaagcaatcaaaagtaacttccacaaactcataccaacacatacttaatgaagcagcatttgtacccacatagtctgccttctcatcaattactataggtaaattttccctgctcttgtctaaaaccattcatttcagttgtccattaaacttcattcttcctttactcaagaacattcctgcagcaattctaccttctctctcctttttctgtcaagtttttgctctctacagaatcattcccatcagtgtgcaactgttttttctctcatcttagaaaaccaaacaaaactttcttaatgtcacttcccccaccagctaatgccctatttcttctactcctttgtagtaaaacttacaaagtattatctctactctctatttcccagtgtctgtattcccattcttaaatccacttcagtcaaatttttgcctccgccattccaccaaaactctttgccaaggacatcaatgatgagcactttgctaattccagtagtctgttcttagtctacatattactttatctaccaacagtatttgttaaaatttatcacttccacctccttggcatactttgtttacttggcttccaggatactacccacgtttgattttcctcctgcctggttccattttgcttcttctcagaatcctttgctagtttattctcttatttttatctacttaatggtgaagtgctccaggtctcaatacttgggaattcttctgagtcttctttctccattaccttggcttttatatgctgacatctgtgaaatttgtgtctccactgtgggacaaatgtactgttatcttagtccattttggtccattttgtgctgctgtaacagaatacctgtgatggtaatttataaagaacagaacattttttctcacagctctgaaggctgggaagtccaagatcaaggcactggcatctgatgagggctttcttgctgtgtcttgaaatcgcagaagacagaagtacaaaatggggatgaatgctgtgttcctacatggcagaagaggagaagagagaaaactcaactcctgaaagctcattttgtagtgttattaatcaagtcctcatgaattaaacacctcccaaaaggccccacctcccaaaactgttgcattgaggattaagtttccaacacatgaattttggaatggacaaaaacattttaaccatagcaaccatgaactaaagaagcttaatctttattattcctcacatgtgcagaattattacctaattttatgttcacaattttaaattttgttttcccaaagatgtcctctaaaattgtatatgcttcaggccccacataacttgtgttcacctttatctctggtccagttctcacagtaaaactccagactatgtccagttccccactcaggctttccacttacatacctaattgacatcttaaatacagtaagtccaaaaactacccctaacctgttccttttaaaataactcagttttttatttctttgctgccacctgaaatagtttaccgtttcgctgagtaaaagccaacatgtcaaaaatggccttagttaacttataagaaaaggcctttgccacataatctctttatttcctgccactggcctcctcactcatgttggcccaaccacattgacatttgttgccccttgcagacatcaggcataccctcacctcagtatttttctcttgcttttctctgcatgaaattctcttaccatagagatctgcttggctaacatcttcatcgctttctagtctattcaaaattcaccttctccataaggcttacctgacctccttatatggcaacctggcctcccccttccccccctgtactcctgattccctttatcgtgctgttttttaagcttttttccattgcctcatgaatactgtatacttggcttattatcatgtgtattgtgtattgtgtttcttactctctgagtaaagtaaattgcatgaggatagggtttttttctgttttattctctgatgtatgtgaagcactagcctggagcataataggtcctcagtaaatatttgttgaatgactagcgttagttgaaagaataggcttacaagtctatatgctctaaaattctttttttttacaatatttgaaatgaaattttgcatagaattctctctaacaatataaaccaactagaaaagaatacttatagttgaatgaagagattaagctaaaagaacatagccttcttggcttgatgtctattttatgccttacagtattcagagcacaatttgaaaaccagctgggcacttgtctcaaatacgaatattatcataattctccaacaaaatataaaaattagggccgggtgcagtggctcacgcctgtaatcccagcactttgggaggccgaggcgagtggatcacttgaagtcaggagttcaagaccagcctggccaacatggtgaaaccttctactaaaaatacaaaaattagctgggtgtggtggtgcacgcctttaatcccagctgctcaggaggctgagggaggagaattgcttgaacccgggaggcggaggttccagtgagctgagatcacgccattgcactccagcctgggcaacagagcaagactccatctcaaaaaaagaaaaattaatttgtatttctttcagcatatgtgtgagtagtgtattgtgtttgtgtgatatcaagataatgttcatcagaaatatataagaaggtcctagaaatatcgtgacatccattttttaatgaacttatttattttgttatgtctattagattttatgtgttttgcttatcactaggatgagagttatgaaattgctgatatttgattgtaatttcctgtggctcaacctagtatgtatcatatacatatcaaaattgcaaacattcttaggaataaattgaaccaaaaacactgaattcatattaagtaatatacaatttttatataaaggcctgaaacactcccttaatggatagacttactataattttcgtggggaagatttaatataggaatatcaatcctttttaaattaaaatataaatatattacaattttcatcatattcccatttttctggtttctgaggtaaaatgattttaatattcatatagaaacaaatccctgataattaccatcaatcagctaataaaagaaatatcaagaaactagtaatattgagatcagccagcattaaaatttactataaatgtgtcacaataaaagtggcgtacaaatagatgcaattggtaaatgaagtaaatagatatttctgaaatagatccaagtaaggtcatgtatcacggatatgttctgagaaaagtatcctaaacgatattgttgtgtgaacatcatagagtgtatttacatgaacctagatggtatagcccattacaatacacaacctgttgctcctaggctacaaacctatacagcatgttactgtactgaatgctgcaggcaactgtaacagtggtatttgtatatctaaagatatctaaacagaaaaggtaatgctttggctgctacatcactaggcagtaggaactttgcagctccattataatctcatgggaccaccatatatgtggcctgtcattgatgaaaatgtcacaatgcagcacatgactatatatgggaacttaatgtatgataaagaaaaagtgtgatctagggatttggagaactgtggtcttgagccataatacctggcttccaatcaaatctttgttacatccgaattttataatgtgtgaggccacatttttttattttgccatgcgtgttttctcattgtaaaatgtgactacctacctcgcagagttgtcatgacttttaaatgaacaaatacatgagaagtatttagaacactgcctggtccagagtaatgtataagtgtaattttaattcattattaaaaaggatgttttattttatgaatggtgctggtatattgactgtccacctgaaagaaaataaatttccacctcagacgatatgcagaaataaatcccaatgcattcaagattgaaactgtaagactatttgaaattatggtgtacgaaatcaaggatgacttaagcaaggaagaaatccaaaacataaaaagttaccagatttgagtatataaacatttattatttttggtatagcagaatatgccattaataagcaaaagaaaacagtacatttggaaaaaatatcttgaacacatgacagttaattcgtatcacggctatacaaagaactcctaggttcatatgaaaacccaatataaaaatgaaaagacaatttacagaggagggagtggaaatgtccaatacagatataaaaacatgtttaactcaccagtcatcagggaaattggaatcaacatcacacagttgcactactttatatcagatagacaaaactttatgtttgtgtataatacacatatcagaaattcaagacgtgtgtgtgtttataaatctaaagtgctggcaaagatacaagaaataaacatgctcatacaatgttgatacaagaaatgctacattacagcttttgagatctatcctgtaaaacttactgcaccaatacttagaaacaaataaaagaacgtatgtatgataaaagttggaaaccaatttcacccttaatcacaggagagtgattaaataaattctgatattgcagaatagtatctggtgaagctatttaaaatgctgagttagatctgcataaactagcctagaatattgtcatacaatatgaagaaaattaagttgctaagaaacatttggccctatctttaatagtcaaagaactttgttcatgtattattagagtgatgacaaggaatatgaaaatcactacatttcccttcttatatctctactttgtttttaaaatataacagaggatacaaaagataatggaaaacaaatccttatttcagttgtggtatatgcaatgttttaagggaaagaaggtaatttcccaagtggaaaattggttgtctttgacattacatatgctttaaagctacttggcgtcttgatttcctacttttttgatgctttattgaggtcaagaagactcactggggagaggcttcaggcctagaggaagcacttactgactggcaaagggagtggcaattgcttcatattttaaagttatgccgaattaaatgattgtgtaacatatgtaatatttttatttatccttttgagttaaaacatgaaaaatactcaactctagctttatatcaaaattacctatgtagattcttaattaatagacctattatgagattttgcatctatatttgaacagtcggataaaatatttcatgacgcctcttgaaatgtttgagaaacactatcacatgataagagcacattagtttataataaattgataattgtgtactatatgacactgtctcttttttttcaagtgttaattcattgagactttaccatgaaacaatatacatactttgtgatttgaaaaatactaaatttgtacaaaagttgaagggtaggtattagtttcagcattgagaatagttggtgtttactaattaatacaacttaaatctatgaagggttattatacaaaggatgattatccttttagatataattagtgaatgtgaaggcctgggacgttattgtatactgctgtagactataaacactatacgcttagggcacactgaatttacaaaaaaaaaatctttttgtcaataataaatttaccttagcttaatacttttgactattattaaatacagttagaggttctcttagagatttttatatgcagattacattaggagttttgtgggatgtttttgtttttgttttttgagacggagtttcactcttgttgcccaggctggagtgcaatgatgcgatctcggctcacctgaacctcccactcccaggttcaagagattctcctgcctcagcctcctgagtagctgggatgacaggcatgagccaccatgcatgcctggcaaattttttttttttttttttttagtaaagatgggctttctccatgttggtcaggctggtcttgaactctcgacctcaggtgatctgcccgcctcagcctcccaaagtgctcggattacaggcatgagccaccaagcccagcctacattaggagtttttaaggtcgtttagcaatattcttgccaaaaattatggatatgattaaataagtgcttcctgcccatactcattccattgcagacttctgagtttgctagtgtgctgtagtgtaggtagtctattatccacaccagtgacgggaatcggatctcccttagggcaagttaaatagtatgtggtgaagctatttaaaataccactgaaagcagcacaccagtaatgttttcaggttagtattttaacacaatatttggtaaatatcaggttatgtgacctcccaaaatcccttttaaatgtgtgattttatatgaagacgtttttaagtttatgaaacgcctaagactttaagattgaagaaagtggtacacatcaggggaaagagttaatgaaatagtcgctctgtaacattcctttttttacatcccatatatggctcaggcattggtaaaatgcatagaatcctgtgtctagtattggctcatactaggtagatttgcaagattctctggaccacttggtaggcaaaggtggtttctctgtttcatcaaagttttccctgcagccatagctgcagtaattcttgcacacaacatgttctcaagacagaacattatgcatgcctttatataaccaaaccacttaatgtctccttattccacaatgtgtagttatcttcttgctttgtgtgtgtgtgtatacagttcaatagaatttttcatttttcaagcaaagccatataaaattgaaaatatctaaaatagtagaattggatagttatcaagtttattttaaacattttaatttttttaaagaatgcttagatacatgaatgtcttcacattattctctcagataaaagtaattttgcaaaactggggagtttgataccttctcgttttggaattaaaaaaagtgtttttccttgttttgacctcagaaatctataattgccctttttggttattagtttttctaattttttatcattgaatttttccggagacaataaattgatcatttttgtttattctgaacctaatgccatataattcattttattggtgtttggtttagctcatatttcttattcaattactctttaaaaatatttttgaaaaagaaaacgttcctttttattacctggcttcaaattgcttttagccaagtaacagaagtttaaaaattagtatattttatatatgatttatgaaatattataaatgaactatttcacccatatatatgaaaagaatatagttttgtgactaatagtacagtttgttaaatggcagatgtgtttcagtaatcttttaaatgttaatgtttatatggttatttatgtcaagtattaatgaaatactaatgtataacattttcattttcttaatgacagtcatttgggatagtaaataatcaacctcccattactagtaagatactgaaatatctttattttattttttaaaatggatgtagctggaggccaaattaatgcagaaacagaaagccaaatactgcttgttctccctaatgagagggaacttattttttaaaataagtattgcctttaggaaaactgttggtgaaattaaaataataagaaatatataattcacctaatcagtaaatataaaatacccataagcaactacaatttaataaatcatttcaaaaatatggcacatcagacttttaactaataatatttaattttaatggtaaaaatgacaataaaaaatgtataaaggtacaataaaaatccaaattgtgaaagttttccttataacttaattccctagttacataagtttaaatggagatggattttcaaacatagttgagacatttacttccaatgttacttagtttggttatgtcatagagtattaatccataaacaactcaaaattttaaaaagttctttattcctagattaactttattttcttacataaagtgttttttataaatgggcattcaggttaaatgcatgattttcatttaaaactatgattttgaattttcctacttaaaaattttaaaatattttctaaatgttcttttctgtcatttatcaactcactatttacagtcatgcatattttacagtcatttgcttaatgatgggaatatattcagaaaaatgcagcattaggtgtttctgtcattgtgcatacatcatggaatgtacttacacaaacctggaaggtatagcctaatacacacctaggcccttggtgtaacctattgcttctaagttacaaatctgtacagcatgttaccttactaaatactgtaggcagttgtaacacaatgttaactatttgtatatctaaatgtatcaaaacaaaaagcacattaaaagtattaaaaatacagaataaaagataaaaaatgatactcctgtatatatgatacgtgtataacatgtaatataatataatatactcctgtatagggaactaaccatgaatagaatttgctgaattctgttcattcacccagagctggaaattgctctgggtgagtcagtgattcagtagtgagtgaatgtgaaggtctgggacattactgtacactgctgtagactttatcaacactgtacacttagggcacactaattgtataaaaataaactttctttaataattagccttaggttagtataactttttgcttcgtatattttttaatgtttttactttttggctcttttgacttctaaacacttagcttaaaacactaacatgttgtccaaaaatatgttctttttccttattctgtacactgttttcttaattttgtttcctttcagcatttattttagatttgggggtatgtgtacaggttttttgcatgggtaatttgcatgtcgttgaggtttggtgtatgaatgatcccaaatagtgagcatagtgcccgataggtagtttttcaacccattccccctcccaacctctcccttctgggagtcccagtgtctattgttgccatctttatgtccatgtttactcagtgtttagttccctctcataagggagaacaagcagtatttggctttctgtttctgcattaatttggcctccagctacatccatgttgctgcaatggacataattttcttcctttttacaactgtatagtattccatagtgtatatataccacattttacttatccagtccaccattgatgggcatataggttgatcccatgtctttgctattttgaatagtgttgtgatgaacatactagtacatgtgtcttttatgtaaagtgatttattttcctttgtatatatatacccagtggtgagattgctgggtcaaatagtagctctgttttaagttctttgagaaatctccacactgctttccacagtggctgaactaatttacattcccaccagtaatatataaatgttcccttttctctgtaacctctccaatatctgtaattttctggctttttaataaccattctgagtggtgtcagatgatatctcattgtggatttgatttgcatttctctaacgattagtgatgttgaacattttttcatatgtatgttggccacatgtatgtcttcttttgaggcatgtctgttcatgtcctttgcccatttttaatggggttgtttgttgctttttttctatttagtttcttttcattttgttttagttttaaaactttttaattaaaagctaagacacaaaaactaagacacacattagcctactcctatacagggatggtatcatcagtgccactgtcttccctgtccacatcttgtcctactgaaagatctttgggggcactaatacacatggagctatcctctcctgtgatgacaatgtgttcttctggattacttcctgaaggacctgcctgaggctgtgttatctttaacttttcttttttaataagtaaatggagtacagtctagaataatgataagaagtatagtgtagtaaatatataagccagtaacagtcatttatcatcattatcaggttttatgtactgtacacaattgtatgtgcaatactttgtgtacaactagcagagcagtaggtttgtttacaccagcatcaccacaaacatatgagaaatgccttgtgataggacattaacaacggttacaatgtcgctaggtgacagaaatttttcagctccattataatcctgtaagatcaccattgaatacatggtctgtggttgaaccaaactttgttatttggtgcatgactgtgtatacatttaaatattttgttatttttattataccactggactgtaaaacctatgaaaacagagatcttatcctttttatttacccctacatccccaacatttggaattatacctggcacgtagtagccactcaataaataattgtgcaataaattccagaaatgtgccaaaattattttttaattgttctacttttggaggattcatttattctgcagcctaattttggacaattgttccatttccttttgttacactgcttttaaaaaataagacaaagtgtatatggtaagagaaaaaagctcatctgaaatgcaatctctattcctccctttctgttttacctgaatataattatatacttttacattatttaacccaaactacatatatatatatgtgtgtgtgtgtgtatatatttgtgtgtgtgtgtatatatatacattcaactttgcattgctattttctacatcattttataatttcatatagtgtagtgcctgcatactgtcctttgtatatgacatttagtgttttgacttataaacacttaccttaaaacactaatacattatgcagtgtactagtgttcattgtacagtgtactaatacattgtacaatgtcctctgttttggaaatttccccagaagaattgcataaggacagaaacaaagtgaaagatgatacccatttcaaaatttgatgaatactacaatatgatttgcaaaagacaatatatacggacaccaatgttttaaaaaagaaaaagataatagtttaccccctccctgatttatatttggtttattttttacttgatgatcagttttgctgctctaccttgaatatctttcaccattttagaaattaaatattttcatacttaattctttaattttcattatttaacaatttgcttcacttttacttccccctaaataatttcatctcttcctgtgactttaaatacaatttgtatgttaactcccacgtttcccctggcctccagacccataatcagccacttatttggcatcttcacttggatgactgataggcattttaagcttaaaatggataaaatagaaattcttccatcttcatctttcaccccttttccaccatctacttcaatgaacacagccctatgtttatcttcgtaggtattttttactttttaattttaatgtttaatttacaacattaaattgaaaacattagttttcatttcaaatattcaaatatgttgaatacattttttgctaatcaaaattaagaactctgaacatatgtcttactatatgtgccctgaaagagctgggctaaaaagaggtgatttaaaataataatgatttcaaagagctttttgttaacttgacacatggatgatgaaggcttataagcctttcatcagtataacctcaatttagtaaaatctggtttagtaagcattaagaagacaataccccaaattattttcatttttaaataatgggctttcctgcaatagtttattattatatgaccttcatagttttttcatagttatttaacttctagtagttttcttttgtgaagtaattatgtctagagtgctcatcatctcaacaggaatagtttgaagtgcttctcttctgttcctccttcacctagaaagcatagattttttttttctatttttcttattcctaagttatatccctccctgggatatagtgttgtatatctttaaattttgaataatgtttcaggagcaaagtgaaataatgtgttaaatggaaaaataagtaagttaaattttgtctttagaaaattgtctgggtaattcagtggggagttgaaggaagggttcattgaagaattttgaacagaattttctcataatgctaaaataaagactccttatcctcagtctcactaagttgcctgattttatagatgatgaaactaaagtcatttgagaaaggtcacatagcagagccagggtaagaccacgtatctattaatggccaattctatatttgtattatactacactatgctttagataggataaagtagtaagactggagaacagcacataatagaacatatagatgtagggagcaggagaagtcacagatagctcctaggtttaaaatctgagtgagcaatgggtgaaaggtaaaaatacatgagacaaggtggcatggtattttatgagagatattagacaatgctatgaaaactgttctgccttggatttggttatcaaaagtagattaaacaaactagtggaagttggaagaactgctttttaaattcttttggatacttctattcatgtaaatctgttgtacatattttatcaaatcagtcattcacacaggcagatttttatttatttgaagtctgtaatcgaaaggataccatttttcaatttgctttgttcaacaattcaatgtagattccccaaaatggcacatgtatctccactggatgctactaagtggagcctcagtatcctaaattgtaatacattgggaaaataaaaggcatttttctggttagattatatagtgtatatcatggtaaaaagtaaattaatctacatgtctttccttaccagaactatgatatcttgactattaagtttaagagataaaatgaaatgtcagtattttgataggcaaataatgcatgatataaaaagaatgtaaaaatattttcaaaggtactttttggtcagttacaaattatagaagccctcaaaattatagaaattatcataattcaattcaaatttctttaagcaaaaaagggagttgtatttcctctgtgatggctttagacagggttagattcagatgccaaaaaatgcagtctcatttttatctgagttaacttcattttcagtcaggttcttcctcttctcataatagtggtaagatagccactagcaatgccaggctggtgttctactagatttgaaacacaaatatctctttatcgacaagtttcccaacttctcatgctcttgtttggccatcctgcgtcatgtgctcaaacccaaaccagtaaaggttatgggtgtgagtatagcaataggtcagacctgggtcatgtttttacttctaaagcaagcttgtgcaacctgtgccccaggatggctttgaatgtggcccaacacaaattcgtaaactttcttaaaacttttctgttttttttttctttgcattttttaaagttcttcagctatcattagtgtattttatgtgtagcttgagacaattcttccagtgtggcccagggaagccaaaaaattggacacccctgttctagagatattgaaagattgtcagccttatctgaggcacatacactaagaatgagaaagggtgttttccagaggaaaacaggggctctgttgccagaagaagaatgattggataccaactgaatgactgagtaaaataacaggtatccactgttgataggaattgctttgtaagtgtaatgtcatatgtgtgtagtaaatatggcagccctaaataaaataattcatactattaattgggagctctcaaattataatggaagttgttttgcatttacttcaatatgtggttttattaaatagtttatgatttttctgccatgataatgaagaaatatgatgcctataggtagtctcattcctttatagccataaaaccatcatgagttggagttcttatttgttgaaagagtaaatatatcttaatgtctgtttttaattagaaacatatcaatattaaaatcagtttatgtggtatttttaaaactcataggattgttatagaagttcttttgtgattgcaaatagagaaattgtaaatttattacttttttctgataacagttgatgctagcataattagtataattatattgttaatcttatctttttttggataaataacttgtgagtctagaataaggaaggtttaagtaaagattcttttaatttaaaagtagtagtattaagctgggtacagtggctcacacctataatcccagctactcaggaggctgaaccaggtggatcgcttcagcccaggagttcgaggctgcagtgagctatgattgtgtcactgtactccagcctgggtggcaaagggagacccccctctctaaaaataaataaatacatacatacatacatacatacatacatacatacatacatacataattgaagcagttcatcactgctaaaatgggtttagatttgaaacaggaactgtccaacaccgaaacaatagtgaccaaatttatggaaatacttggttgtgaaaaaagagtgtaaagaccattagggaaatatcttcatctctagaggattttcttacctattctttctttttccagttaaactttgtgtctcctttataaccttatatacttctgtgcagcacccttaagactcctgcactgatacacactcattttctacaactatctataacctctttaaaggcaggaacaatgtcatatatatcctttatctccagctttcaacacagggcttgggccattcagtaagcgtttataaatgattaggtagatgctagcaaatataatcataactctgaagggcaatctgatttgtaactgtcaagaacatatctgacttagttttatacatgttataccaaataattggtatgccgttgaagatcagttcttttctcccgattctttagaaataagaatatgtgtatttttctcagccagagcattagcagacttcaccagtgaaaatgaatccatgtatacagttagaatttgctatttgtcgtttcagttggaatttaaatactatcagtatacagacatttgctttggtaaatgcctttatctaagaagtaagagaaaataatctatcttacataattctctttgcttctcctctgttttttcccaccagtattcagttgtccaccatctcaaagcttccatgtttttctctctcacttttccttaactctggcccgacacttaaaatgtaaatataaaactactgtccttgtaatgttatttaactgaatttcagttttttgtctcaacttcttttcagagagtctgtttcttctctctgcccatattagattaatactgtgtgcaaataggtatggatatattttttaattattcagagaaaaaagacagtgtaaggcaaagaggattctcatgttcttttgtcaaaaataaaaattgggtgataaatgccttgtgtaagctattaagtatttacttttattaaattttgaaactttttatatttatgtttccattaattttctaaatttggtagtcttacacagaatagcctattgtctaaagttagaaaatgctatatattataattactaagatgcaaacattaagtctggtcttaagtcataacacatctttagttttttaatcttgccaacaaaacttggggccacatcaatatttgattaaacattgattgtggttgacagatttgttatttaagattctttgaaatggttaaacactaaaattcagaagatgagtattaactacataaaagcacctttaatataaagatagacattgtcatataattcttcaattttcaaaaatatggatatttttggaagatgtttactgtcattaaaagttaacactattttaaattatatattatttcaaagtttttgagtattggccgggcgtggttgtaatcccagcattttgggtggccgaggcaggcggatcacctgaggtcaggagtttgagaccagcctggacaacatatggtgaaaccccatctctactaaaagaatacaaaaattatctgggcatggtggcgcatgccttgtagtcccagctacttgcgaaactgaggcaggagaatcgcttgaacccgggaggcggaggttgcagtgagtcgagattgcaccactgcgctccagcctgggcaacagagcaagactccgtctctcaaaaataaataaataaataaataaaaataaaatgttgagtattgaaaagaaggaaaaatatattgtttttttattgttaaaaaagacaggctaatgttcaataatgtaagtgcaatgcccacatgtgcaagttgttttagataatagttttagagttaaaaagaaaaaaactgtgaaaaaacatatataatgtgagactgatgtgccatatagtagaaattaatatcttcacacatttcatagagtgaatgttataaaataataaaatttcattaccttttattaacagcctataattatccttttctgtacttttcttgtggttatcatgcaggaaaccattacactgaacaaaacaaaaatgattacttataatttaaaataacataagactagctcttttaaaagtcttggccgattaatacatttttcttcattaaaaatatgttaaagcactgcagtttgccagtccgtgatgttttcaatagtgttacaaaaaggttatcattttgaaaagaattgcttatccataaaaatacaatcatatttaacattcagatacttaaatccttaaaagtgcattttctcagtatttcatgtgtatgggataaaaataaagatgattgtaattcatctttataattggtatagtatataatcatagtttaactttctaattgtaacacattaacttttcagacaaataattttgtacaaaaagatgtctgtgagcaaaactaacaaatgttataaaaacacttcttggtctgtttcttgaaactgaatccacttaatcagggaatatgaagtttatgtttaacattcccaagaaaacttagactatttctcaaactttctaagttcttgaaaacttagactattttccataaaatgaaatgattgtattaataaattgtaatgaaacaaaattaaatttcttttattactgtaaattgtgtgcatggaaataaaatgaggtttgtgtgtgtgtgtgtgtgtgtattatatgtgtaaatatatttgtgaggtgacttggtttagaatttgcatttatactttctctgcttgctaccttccagaacaaaattgcctgaaatgcatggctgtatttctttaaaatattcttatccacatttgtgtttgaaagatagcattagagatgcttgctaaaaattagctaatgaaatccctcatagaatacctcaaacaactaaatgtcctgctcaaattttagcactttttttagcctgcccattttaatgtctggaacaaggaaagcaattacttcagtgctttgtcagtaacacaacaatcacaagttttgacctacccagtgagacataaaacattgtcatatgtgtcattatgcttccataatataattttaaatgttactatttacattttaattttagggatgatagaaaatgtcatattgatttgatatttcttataataatttttattgtgattaagtcaaaatatgctgatttttgtggctggatgtttcaatacaaataaagatgtctatgtgtggtcatattggattgaatattcatgtcactgcagtaatttttcagtatcctctgaaaatatggtagtaccatttggtaagatggtagtaagccctaattttaaaaatgtagcaatgatagccaaaaaagcgaataattagactaattattttacaaatatagatagtgcagctaggtaatataattcttaaatagggttaatctaccccaagccattgaaaaattaaaaattattaattatttagaaataactattatgaagttatatttcatatgtgagtttaaatgaaaatgctaataattttactgacctttatctctgaagacagtcatgaaacaagtaagctatctttaataacaaaaaaattactgggtgataaggaacatgaaattaatgttttgaagggactcaggcttgaactttcctactgttatctttattaactttgctttttaattctgcattctttgttttttaaatgttttagaacaaagcattttcttaaagttacaataggtgaagaatcatcaacagcatgtgatttttggagctatataaaaatgttacctttggtgtatagttatgatcccctcttgttaagatactgatttcttataaattctgttgcaaaattcacagtgactcaaggaaaaattttatttaataattttgacctgaaaattgagtttttcctttgaaaattctaattttacaagatagttatattaaagtgtgataaaagtcactttaaagttgtgatatttctgtttcataaattatgtttaattttcagtttattattttacttttctaggatagcaaagtaatataatgtatatgcacaaaacagaagtattatttatacgtattttttttaattacaggtaaagattatagttcccaacagcacagcaggtctgataatagggaagggaggtgctactgtgaaggctgtaatggagcagtcaggggcttgggtgcagctttcccagaaacctgatgggatcaacttgcaagagagggttgtcactgtgagtggagaacctgaacaaaaccgaaaagctgttgaacttatcatccagaagatacaagaggatccacaaagtggcagctgtctcaatatcagttatgccaatgtgacaggtccagtggcaaattccaatccaaccggatctccttatgcaaacactgctgaagtgttaccaactgctgcagcagctgcagggctattaggacatgctaaccttgctggcgttgcagcctttccagcagttttatctggcttcacaggcaatgacctggtggccatcacctctgcacttaatacattagccagctatggatataatctcaacactttaggtttaggtctcagtcaagcagcagcaacaggggctttggctgcagcagctgccagtgccaacccagcagcagcagcagccaatttattggccacctatgccagtgaagcctcagccagtggcagcacagctggtggtacggcggggacatttgcattaggtagcctggctgctgctactgctgcaaccaatggatattttggagctgcttctcccctagctgccagtgccattctaggaacagaaaagtccacagatggatccaaggatgtagttgaaatagcagtgccagaaaacttagttggtgcaatacttggcaaaggagggaaaacattagtggaataccaggagttgactggtgcaaggatacagatctccaaaaaaggagaattcgtacctggcacaaggaatcggaaggtaaccattactggaacaccagctgcaacacaggctgctcaatatttaattacacaaaggatcacatatgagcaaggagttcgggctgccaatcctcagaaagtgggttgagtgccccagttacacatcagattgttttaacccctcctttaccccattttcaagaaggatgtactgtactttgcagaagtgaagtttttctgttattaatatataattatgcaaatgaatgcgactatgttgacaatgtgtatatgtaaataatatgtgttttaccagatgtttcatagaaagaattttttcttgatctgttttgttctctatactttgcttgtgtatatttgtcagaggtgtttctagtgtaagatttaagcctgccattttaccagcattattgtagtttaatgattgaatgtagacagggatatgcgtatagttttcagtattagttctagataacactaaattaactactgttaggttgagtatggtggggtcagtgacctaaaatggagtgaggccaaagcactgtcctgtaagtcttacttcctgcttagggcacagtgaagtaggaaacaatattttgaaaataagttttaaatttaaaatgatcaaaaagcaatatagttgcataaaagcactgtaaaatatttaaaaggttaaaactgtggaaaattatattggtaagtttacagatcaataaaagcacctgttctccatctgaactagacaatggaaataatgctgcatgctggccatggcccattcttcatcatttgtaagttcaacaaaagttctcacatggagtcccacctcttcagaggtttgtacatttgtttttaagcactgaattcactactgatcccatcgcctggccagtagaacagtcattactccattaacatcctcactgtttagacacataactgtggtacagtgtattggaaattttataaacaaaagtgaaagtgccaacaaattattgatagctgataatgtttcattatctgcaactgcttgataagtatgttgcattttaagagcttataattgtgtataatttgttaacactagaaacctattagtattgtgaatgtagattttactgtgaagctatctgtgatttagctgtttgctcccatgatggagtctttgcagcatggcgctagcagccaatgcagtttctaatactcggtaatttgcatgttttgtggagcatttttatgtcaccaaccagacagtatttcctgcatgcttatttagaagaggcagcttatcttgagaggtagtgttatctacctttgtcaggctttttgacaggtcatttcagagtaagcctttgttcccaagacccaacaactgtcaccctcttctgtacctctcctgagtgccaactgtccaggccatttgacacaccatctgttaacctctgagtttgcccactcaaggccactcataggggcatccatccccaagcacctcctcatgctgtgcatgcagtcttaaattcaatggacaaaaataaaatgctggctacctctggatcatctggctgagcaactgaattacaaaagagaattacttccatctcaacttcaacccattgattacgtccatcctagcaagctaaatggcatcccagctgctcctttctgtgcaaccaattaaagaacaatgagtgtgatgctccatgtctgaatttcgtccagcctctctctgaactgtgatctttgtcctcatgaactttcccttttgttcattgaactatatggactcttcatttcatattgatttactgtgcaatttacttttggacattgagaacttgaaattatttcctgatcccttccccttccactattaataattcatttctgtcaaactgtaagagtagactcatttttttttttttagtttttaacattggactgttatttcatttagagttctctatctctaaatatttatttagagaatgattttaaaagggaatgatatgcttgtttaaatgaaagagaaaagctgtagtaaactgtgttaattggtaatgactatttatcgtcgatactctgtagctgtgtaagttttgacaaatagtgtatctcgtggaatcagtggttagcattgccgctattatatttactcattttatcattataaatgtgcttagttcatcatgtagcatcacttgtctcccgtctcattttttccttgcatgtcacaagtctcagatcatttataatacattaacagtaaataatatctatgtaaatttctttcaccatgctgtctcagagtcagcagtgaacaaaggcaaagattggggccccacttagtttgaaaaagggaaaggaagtgatctaggatgtgtactagaagcatttcaaatgttgggtctttaaaatgttttgttcagtcttagcaaatcttcgatcttttatttcaaaattccagtagtccactgtggagcccatgcatttcatctggaatttaatgttactttgaagccaaaccatttaaacaattatgtgtgttttattagctagtgttgctgaaaatgcacttagttcaattttaattgtaaatgggaattttaaacttttcctagttagcatggttatatgttagttaaaactgaaagctaaattgaagatattacattttaatttatggtgacagataagggtttgtatgcattatgtgtaaatcagcttcatgctgtttaaaaatttattctctgaaatttatagaccatgtagaattgatttgtgatgtgatgctttaatttattgcaagaaaattagtatggcttcaaactgccacaggtaggcatgtaacaatggctgttcagctgtactgatccaaaatggagaaaactgatgatacaagggccaaacatcttatgaaatgcaactatttatagacttgttttgctatagggaggctggtgaacacgctgaatacgaattacctcagttctgcagctttctatgtctttttaatgcattctgtttcagggtcactttcaatcaatatttcatttacttactgagattgaatgggcgctctgagacacagtgtgctgtttatcatacagattggacacctcattctagatccaagatcttttcctcaacactgggagctgtcctttcagcaccacaaaattactgcttgaagttgcattgcagtttttttgttttttttttgtttgtttgtttgtttgtttttttgtttttttctttatcactgggagcttttctttcagcaccacaacattgcacctagactttttaaacggctgccttcctctttgcactgaagaccaatttcgtctgcacttccagttattgctattacctgtaggactttcaatcctacttcacttcacccaccccactcctgaaacagttaaatgtatctatttctgtggaagtcattttctcattgaatgattagaaacaaagataaattctaacctgtaacggctcatttcgactcattgcttacaatagatctaagctcttttttctgcttattcgactccttccagcttcccatcacatctgtaacaaacttttaaaatgatattgccacaccaccatgcacaagcctacctgcacagtagagatagattattccatcgcattcagatggttaacagaggttagcaagtcctgtattatatatttatatcgctttctaagaaagtgcatattaatgtttactttaagaatgtgtaaatggtgctatcaagaatctgataaattttatccccgttttttgtgtaccacttctaatgtatgagatttatttttttattggaaaaaaataaacagtatgaaagcattaaattggtagattttagtaatttaacaatgaatggaatccctacgttacaggccctatgtttccttggaaattttaatggtggtaatagatttcaacaaaggtactgataatcatattccttttaatccattcttatatttcagtcttgatttatatgctgattcctcactgagtccttaagtaaagtttatttacttaataattttatttactgtaagtcttctccaagaagggaattcttgctttcgaaggcagcaattgagagatgaaaatataatttaataccccttacatcacaggcactatttgagactagttactctgttagtaggagaaatattcatcactcattaaatacagggcaagcatggctatacacaataattttgagtgcaatacagtcataaatttaatgtacacacgttacttaactgaggcaaacagccatacaaaattgcacatgattagaaaacaggatgaactcattttgccttctgcttggtttctcataaacatgaatacataatattgttatgcactgttgttcatagatgtctttttacataaagggtaagtatcatattactttaacagattatatttggaaatctgcatgttattttttgtttcatcagatatgtgccccaaataaataacttttctttcaaaaaatgaaagtattagagaacttgtcatgttaattttgaaaaatattgaggtatagtactagacaggatgtcattccactggtctatataaacaaaaaaaactgttcttgaaaattgaagcattaccttgtataataaagtacatcaaatcagatttgtaaataaaatattgtttaattctaaagtattcaatattttgattagattatttttttaaggaaaaatatttaacgtgtatgtgccgaattttttttaaatagttttttataattgcaatggaaaggcaattgtctcattacaaagtggtacagaagccaatacttgggttaccatagatatataaacaagcaaaaactgtggaacacgttttaagctcattttggaaaattaaaacagttctgtagaaatgcatatttgtatttgtttctctaataaatctgcaaatagctttaaacacaaa

SEQ ID NO: 258 - DNA, 27588 bp, Homo sapiens
  source 1..27588: mol_type = genomic DNA; note = NC_000005.10:177384434-177412021 SLC34A1 [organism=Homo sapiens] [GeneID=6569] [chromosome=5]
gtcctggaggcttcattgagctgctgagcagaagctgaaacacagaattctaaggtgagcccaggaccctcacatcccaaccccacccccagctctgagtaggaaacagcccagcaccccagccccttcatctgtgtcctatctgcgcccacccccaccgcgccccatataacatgtcagtccagccaatcgcggtggctcccacctgtaatcccagcactttgggaagccgagtgggcggatcacctgaggtcgagtttgcactaaaaatacaaaaaattagccaggtgtggtggcaggcacctgtaatcccagctacttgggaggctgaggcaggagaatcgcttgaacccacgaggcagaggttgcagtgagccaagattgtgccactgcactccagcctgggcggtaagagtgaaactccatctcaaaaaaaaaaaaaaaaaggactcctgctccttcaggacttgaattcaactcttcacacccctacaacagccaaggacgctgggacaatgcggggagtgctgaggcagatcagggcactccaccccaatagccaagactcctggggcagtgcggggacaagggggggctgaggcaagcctgtcagtgtttgttcattgccccttgagggggtggatggggaaaggaattcattgtgaggggaacccaggaactcgggatccggcccaggggatctccgtgtgtgcccagctgaccccatgagaaggcaggtgtctgcagctcctccttgctctccaggtgggcaaaactgaagcccggcccagccccagcccacacctgcagccactgccaacaccacgtattccctggccccctccagccccaaacaggctgggcgtcctcagttctcagtgtcttttatcaatgctatatccaagcctctggttcggagcctgggctagagctcaataatactcattgaatgagtgaatggtgaatgaatgatcacctcaccaccaccacacacacccctccgagactcacatgcaggtgcccagcacagatgtgcacatgtgagtctgcatgtgagtctcggagggctgtggtggtgatgatggagggtgtggtttgctgggtgtgtgtttgtgcgtgtgagtctcggaggggtgtgtgtgtgtggtgaggatggagggtgtgctttgctaggtgtgtatttggaatcatgcgccatgggggtttgtgcaggtgagggtgtgtgggcatgagtgtcccggacacagctattgtcattcagcgttgctgagacccactgacctgcagacctcatagtgggtgcccaggatgttgtcctacggagagaggctggggtcccctgctgtctccccactcccagtccgtggggggcatgtgatgcgagggacggcctttgcctacgtgcccagccctcagggtaagtgctgctcccacaccctggaccctggttgcccacggttgcccacatcccggatgaggccacttcccccgcctgttcctccccgcctccccactttggggccctggggctcctgaccaggctccctccctagtcctacacaggatcccggggacctctgcctatgccttccccagcctgggccctgtggcccttgctgagcacacctgcccctgtggggaggtcctggagcgccatgaaccactgcctgccaagctggccctggaggaggagcagaagccaggtgggcctgggctgggggtggcagaggcggcagcagtccctgccctggcctctgcccactatgctcatggcttcccccatccagagtccaggctggtccccaagctgcgccaggctggcgccatgctgctcaaggtgccactgatgctcaccttcctctacctcttcgtctgctccctggacatgctcagctcggccttccagctggctggaggtagggcccgggtggaggagacctgggaggggttcctgaagggccttggacaacgctggctcatgctccccagggaaggtggctggtgacatcttcaaggataacgccatcctgtccaacccggtggccgggctggtggtggggatcctggtgaccgtgctggtgcagagctccagcacctccacatccatcatcgtcagcatggtctcctctggctgtgagttggcccaccagggtggggaagagcttggaggggcaccccaggagctgggaagggtggcaaatggggagcgtgaccccagtaaggctggcctccattcagcttgactcctgtatcagccagggacatgagaggagcccaactgtagctgtatgtgacccagatgatttatggcaaggaactggcttccccgatggtagtttgtctgggcaagtcaggaatccgtaggccagggcattggaagggcaggcgggaactctcaggtgggcgccgacactgcagtccagacagggcagcgtttctcctttctcagggaagcctcagttctgcttgaggcctttcattctattggattaggctgacccaggttaccaaggataatctccttttcttaaagtcagctgactgtagacgtgaattgcatctacaaaacaccttacagaacacccaggctagtgttgggttgaataactgggtaccacagcctagctaagttgacacataaaactaaccatcactggccgggcgcagtggctcatgcctgtaatcccagcactttgggaggctgaggggggcagatcacgaggtcagtagatcgagaccaccctggctaacacggtgaaaccctgtctctactaaaaatacaaaaaaaaaaaacaacaaaaaccaaaaagcattagccaggcgtggtggcaggtgtctgcagtcccagctactcaggaggctgaggcaggagaatggcatgaacccaggaggcagagcttgcagtgagccgagatcatgccactgcactccagcctgggcgacagagcgagactctgtctcaaaacaaacaaacaaaaaaactaaccatcacactctggggcatgtgtgcacacacaagcacaaatctctatttgcacataggacatgagcccacgagccctcataacgaaggcctcacacgcacacacgttcacatccatacaccatgtgcagcacgtgtacatctactcgcatggatgaatgcacacacctgtaaacgcacagcccgtgcccacatgcacctgtgacgccaacgttaggcagactcagcagcatggcaggagcggccactggggactgggacgtgggtggggggcctgacaggagttgtggtggtgcaggagctgggtgaccgtcaaattcattaggacgtcttctcttctaccagtgctggaggtgagctctgccatccccatcatcatgggctccaacatcggcacctctgtcaccaacaccatcgtggccctgatgcaggcgggggacaggactgacttccggcggtgaggggggctgggggttgggggctcgtgcctgggggaggacagccccagatgccaggaaccccaggcgtgactgtgcactggctcgagcctgccttgcaatgtggcctccctgcccagggccttcgcgggggccacggtgcatgactgctttaactggctgtcagtgctggtcctgctgcccctggaggctgccactggctacctgcaccacatcactcgacttgtggtggcctccttcaacatccatggtggccgtgatgctcctgacctgctcaagatcatcacagagcccttcacgaagctcatcatccaggtgacagcagggcctggcatggggtgagggtgggggtaacaagggacccagcctccttcactccccctgcccacatcttgcccacagctggacgagtctgtgataaccagcattgccactggtgatgagtccctgaggaaccacagtctcatccagatctggtgccacccagactccttacaggtgagtcccaggcctaaccccaggtaagaggactccctcttcagactcttggtttcattgtctgttcaaaatgctccagatagaccttgaagatcatttagccaggagagggcaaatatgtggcccttctactgtgcttacagttaacattgctaattcctcccaacttcccacatcgccttaggcagacatcaccaatcaattaaagttgttatgtaattgatctagcccagtggttcttgaagtgtggtcccaggccagcatcttgtgtgccgtgtgggaacctattagagatgcaaatcaccctgcccttccctagacctactgaatctggaaacccctgggagcggggccaatggcctatgcttcagcagttcctctaggtgtgctcagtgctcaagtttgagaaccgctgatccagcgcaacccttgggtttcacaggtagagacacaggttcagagaggctaagaaacgtgccagagcttatcctaccatgtcagggcctgagcaccctagaggggttagtgactcagctgggccatgttttgggacccaggtaacgtggggaagaggcagagtgctataaggataccaaggaaagtaacaggaaggtgagctgcgtggagaactccttggagatgttaacagccgcttgtgctggcatcgggggttccttctcctggagactgccacaggcgggagtcccttgtccttctgcactgtttctgctgcttctaatactgggaagatctgtttgaatcaagtggatgctcatggaccacccattatgccaggctgatgaggaagcaggcaattagcacacttccttactcagctgtgaaaaggcaaatgcttcatccaaaccacaatgcaccatatttgcttctccctgatgcttgcatgtgagacataactccatttacaatgagatacgaggaaatccaagccacagcacagcacagcacagcacaagcccttccccttccccttccccttccccttccccttgctgcttcttgtgactggacctttaccctggtgcgaacagaaaacactcatctgactcgccctgcgatgctcctttgcatctgaagttgctccagctcagcctctgagtgttcaaagcagccttacataaaaaaaaacccctgcgggcagcttttacgctgacttcatgacctctttaatacatcaaccactttctcacgagctctctgagcactcttagtgctctctgactcaccacaagcctctctacttcatagcaaaatctggaagggagagaaatcacacactttgatcttcgcaaaaagcaagccatggaagacagctctgttcctcactgcccctgagctccctgccggccacctactgcagcttccggcagatctcaaccagcagcctccacgtcctcacttgaagtcatcctcacccaggttcactctggggaggccgcccttgggcctttctctacggctgcagctgacacttgtccagctggtttctcttcctcactctaccaggaaatgctttccttaaacgctttctgcagggcagggtctcatttcctcggcttggagagtagctggtgggtgggacccaagctctcactttcatcccctttctgggacagcgccccgaaggagtgtgactcacacagcagtggatgtgcttggtcttgcaaagtgtgaagtgcgtcctggctcttcctgcccaaagacgggccacagagtctccccgtgctcccttccaacctgttcccattgacgccaactttcaccatgctggacctgaaccagcccgaaacagtctccagggaagctatgcaccagggagaggaggcaagtccaaggcctaccagatggggaaagcagcagcagcggcagttgagtgatcagacacttgagtctcccgggaccctgacaccgtcctgggaatcaccttcttatgtggccacactgtggactgtcaactatacctgcctggattaaacaagcatcttttgaggacttgcaacctgggaggcagggattatcacgtccccattttacagacgaggagcactgagccccagagaagtgcagtggcttgcccaagtccatgtaattgaggtaggatacaaatcctggtagaatcctgactatctcgttgcctctctcactcaccggtctgacattctactatgtatgtctgcttcccatgctgcccatcaggcctgaaggccaccaggtgaccatagccacgtggagacgactccagagatagcgggtgttgctctaaggagaagttctccttttcgccaccaggtggtgctgctggcacagtgctctccctcggcttccagaagaacaaaggccctagagctccccttcctctgagggggaaactgctgcgctggcccacatcctgacagtctcctgtgagcttaatcacctccttcagtccccagaaggggcctctttaatttagggtgtccctataggcacttaaatcccaactccctcttccaaaatgcttccaactagcccctgggaaaaggtgggtagcattatggacttcatgctgcagaggaggaaactgaggcccagagaggctaagtgtttgctctggtgacacacagctgggaacggctcagctggggtatgggcccagggctgtccacaggcccattctgttcttcccacagagcccaccacccgcttcaggcccctccagcctctcctaccccaccccaggcccaggcagggatgggcacatcttgggaagatgcccccagatcctgggcctcccagctcttttatctaagctggagtttccatcttctccctctgccccacagggaagccccagggcctgctccctcccggcagttcactctctgcctggctttgtccctcctgccagctttaccttcctctcttgtactttagggtctctgggctcccagccagggccacacagtcccaggcaagaaggtcaaggttctaaaaacccagagggcttggccctgctgctgcctctgccagccctaagttgggaccccagtaaagttccccattctcctccagccttcgcagggtcccacagtcctccccacagagaccactgggcccagcccaggttaggtcagtggggcacacgttgaccaggcacctactcattcaaggggttgtctgctacctcagcatccaggctgggtactcccaggaaggtccagcaggctcctccccaacagggctagggttctcaggttcatctgcaggggccactggtcctgacctaggaagtcagtcacacacacagcctcccaaccatgtgatcctgaacgggcccagcgagggagagggtcactccatatcagaagacagtttaccgaaggctcatgatgagccaagccctgtgatgagcgctttaaacacattccccctgtaacctttacagcagctcctctattatcctgcgttagagaaaacaggctctgagaggtggcatggcttacccagggtggttggtataagaagcaggatttgaactcagatctgcctaacagcaaacacctggctctctctctcccttaccctcgcagcagttaccgttgctttcccagcctggttttctcatctagcccatcgcagcctattttttccaggcttcttggcctgccattcaggcccagtcttgatgggtccccaaggccctgatgtggcgaactgggagcacagaagagcacattgccccattcaagggagcacatcccgctaaaataaacccggatgttacaccagacgccataaaagttcttaccttggccagcatggtggctcacacctgtaatcccagcaccttgggaggccgaggtgggtgaatcacctgaggtcaggagttcgagatcagcctggccaacatggcgaaaccccatctctactaaaaatacaaaaaattagctgggcgtggtggcaggggcctgtaaccctagctactcgggaggtggaagcgggagaatcgcttgaacccaggaggcggaggttgcagtgagccgagattgtgccactggactccagactgggcaacagaacaaaaactctgtctcaaaataaataaataaataaataaataacttcttaacccaacaaggctacaaatgagttgtccacaggccagactggcctgcttctgctgaccttcattgaattgtaaaagataactcaaagtggtcgccaatatttacagattgggagtttgttgctttcgggagtttttcattttttgagataaggtcttgctctgtcactcaagctggagtgcaggggcatgatcatagctcactccagcctcgaccacctgggctcaagagatcctcctgctccaacctcctgagtagctaggactacaggtgtacaccaccatgccctaattttctttgtggagacaaggtcttgctatgttgcccaagatggcctcccactcctggcctcgagtaatcctctcacctcagccccccaaagtgctgggattacagccatgagccacactgcacctggcccagattgggagatttcatctagaacttcagagttgtggcttttctcatagaaattgggcaatttagccacactaggctgcgtccctggatggtgacagtgatcaggagctgagtagctactgctgactctacaggcccagcagaaactctccccacctcttccacacacagcccgagctgctcacttaggttaccggcccggacctgtggccttctgaattgtagggcctccctggggagcccctttgtctcactgacagtaggtgggcagaagagacgtgtgggctgggccctctgtccccttacaccccctgaggataaggaattgatctagaggagaatggagcttgagctaagggtgtcttggaggagaggaaggagccaggatgctggggaaggggcaccgagaaagggatgggtaataaaagatgaggaagggggagttttcagaaaaagaggaacatgttcagcagcacccaatgccactgagagagggaggaaaagaaagacaggaagccactggatgtggccccagggagagctgggccagtggagtgacagggcagaacacacagaggaccagattcttgtgtggcaggcactttcatccacatgtcctcagtggaagagacaggctcagagagggcaagagacccatccatggtcacagagcaggaggcccatctccatcttccccatctctccctaactcccatctcagccccaacctcaggctgtgttttcctaattcactaagtcaccctcctcctgatctaggctcccacctccatgtccagagcagaggccaactccagccagacccttggaaatgccaccatggagaaatgtaagtgcctgcaacatgggaggtgtcctgcatggcaggggcagagcctagcagtggcagggcaatcccacacagccactattgtgtccagccccaggaagcatggctgtcaactagcccagctcctgagcctgggtcaagctccggtgttgaggctcaaggagcctgagatggggccttaggatcagagcccaactgggtggcaaaggtggggacctgggagccaggtgtggggtcagctgtcaggagctccaccccctgcaggcaaccacatctttgtggacactggcctaccggacctggctgtggggctcatcctgctggcaggatccctggtgctgctgtgcacctgcctcatcctcctagtcaagatgctcaactccctgctcaagggccaagtggccaaggtcatccagaaggtcatcaatacgggtgagctgcgagcagttgactgggcagggccacaggatgggcctttccagatcctgctaagtcctgtgactgccttgatctgggtaaaccctaccatctctgagactcagtttcccgatgtgaacaaagaaggtggtttctgaggccactgaggtactgacagctggagacctgtggccgcctctggctgtggttccattttagcaggtggagatgctcaaggaccattgtttgattcaatcaacaaagagtacttaagcccccattgtgtgacaagggaggtgtagtgccaggtatacagaggtgagacaaacagagttgggtcctgccctgaggggctcacagcccagcagggggaggaaagcaatgaaaaatacatgagattggcaaatggctcacacctgtaaatccagcactttgggaggctgaagcagcaggatcacttgagcccaggagtccaagaccagcttgggcaacatagtgagactttgtcttttttttttttttttttttttttgagacaatttcactcttattgcccaggctggagtgcaatggcatgatcttggctcactgcaacctccacctccagggttcaagtgattctcctgcctcagcctctcgagtagctaggattacaggtgccggccacaacacccggctaattttttgtatttttagtcgagacagggtttcaccatgttggccaggctggtctcaaactcctcacctgatgatccacccgcctcagcctctcaaagtgctaggattacaggcatgagccaccgtgcccggccgagacttttgtctttacaaaaaattttaaaattagctgggcatggtggtgtgctcctatagtcccaggtacccaggaggctgagtgggagaatcgcttgagcctagcaggttgaggccgcagtgagctatgatggcaccactgcactccgacctgtgcaacagagttcaaaaataaataaataaataaaaatagaaaaagaaaatgaattaggaataggaaggaaaatgaattagggggataaattcagagagaggtacctgccaaggacatagcaaaaatggcagtgcagtagggtgtggaagagacggtttccaatgcgctgtttgaggccgctcagtgcagttggcatttgaacagacacaagtagccacgatgcggatgaagagcactctgggtggaggaacagtatgtgcaaaggctcagaggcaggaaccagcatggcaggtccgtggcacagaagggtggccagtagctggcaggagcagggtaagggattgcctgagtggggtcagtgaggtggcacggaaggggccagagcatggggtctccaggctctgctcagagcctggactttattgagggtaacatgagcactcagaagacttggggtaagggagcaacaccatttgattttcattttcccttttttgttttttgagacagagtcttactttgtcacccaggctggagtgcagtggtgcaatctcagctcactgcaacctctgcctcccaggttcaagtgatcctcccacttcagtctcctgagtaaactgggattacaggtgtgcaccgccacactcagctaatttttgtatttttagtagagacagggttttgccatgttggctaggctggtcttgaatacctggcctcaagtgaacctctcgccttggcctcccaaagtgctgggattacaagtgtgagccaccatgcccagcctcttcctattaaccataaattttttttatagagatgggctctcactatgttggtcaggctagtctcgaactcccagcctcaggtgatccacccaactcagcatcccaaagtgctgggattataggtgtgagccaccttgcccagccttggttttcattttaaacttcatgcactgggaggggctgcatgacaagtactagaataaggggtatcatggggctgtgggagctcagagaagggagaaaaagtctgctccagagcagggggtcagggaaggctttccagaggaagtgacatccatgctgagtctgaggatgaatattcagatgctgagtaggatattcccagcagagggaacagccccatcaaaggcacagttgcctgacggagccaggctgagaaaggccttcaatccaggagcaaagaggccaagtggaagcaactgcagtgggagcaaacccccatggaggtcgtctctcccagtgcccccgcggagatccgctctcccagtgcccccgcggaggtccgctctcccagtgcccccgcggaggtcctctctcccagtgcccccgcggaggtcctctctcccagtgcccccgcggaggtccgctctcccagtgcccccgcggaggtcctctctcccagtgcccccgcggaggtcctctctcccagtgcccccgcggagatccgctctcccagtgcccccgcggaggtccgctctcccagtgcccccgcggaggtctgctctcccaatgtccccgctctgaccccagcctgctgggatgcggtttccttgcagacttccctgcccccttcacctgggtcacaggctactttgccatggtggtgggcgccagcatgaccttcgtggtccagagcagttctgtgttcacctcggccatcaccccactcatcggtgagtgcccatgtagaggtggagtggggtgggccagggctggcagggaaagggccgaaggagacgctgggggtcccacttcctctccctctgtccccaggtcttggtgtgatcagcattgagagggcctacccgctcacactgggttccaacatcggcaccaccaccacggccatcctggctgccctggccagccccagggagaagctgtccagcgctttccaggtgcgctgggagtgtagcctcgcctggggcaggatggagctgcctctggggtgtggggcctcacaaaggtgtgacaacatggaacaaatattttgactgcctactaagggccacctaatatgctcaatgaaaccattatgggcaaagtagacccaataccaccctcgagaccttagcatctaatagggagacactgctcataattacaccaataaatagcagtgagtcggatttgcaccataaggaagaggaagaggaagaggcactacaaaagagggcctggagcagtttggggaatccattgcgggggtcaaggccgcaaatggcaaaggggaattattctaggagcaaaggagtaactgacaagccaaggcactgactgaatgagggtccagaaactgacatcaatcctttagctgctggattttggcagtatctgctgggggattcctgtgcgaggggtcagtggggaaaatgtggggagctcagggcagtagttatttaccaactggtctagaagtatttcaatatttgcatagccagcatagccacctcggggtgatctcggggcagggggcacatcacccctaagtggaaactttcctgctgcccagaccagatcggggttcctatcatctacccctgctggcctgacacaggacctgggagccagtgcccatctcagcccctctgcctcatcccctgcagattgccctctgtcacttcttcttcaacatctcgggtatccttctgtggtacccggtgccctgcacacgcctgcccatccgcatggccaaggcgctggggaaacgcacggccaagtaccgctggtttgccgtcctctatctccttgtctgcttcctgctgctgccctcactggtgtttggcatctccatggcaggctggcaggtcatggtaggtgtgggcacgcccttcggggccctgctggccttcgtggtgctcatcaatgtcctgcagagtcggagtcccgggcacctgcccaagtggttacagacatgggacttcctgcctcgctggatgcactccctgaagcccctggaccacctcatcacccgcgccaccctatgctgtgccaggcctgagccccgctcacccccgctgccccccagggtcttcctggaggagctaccccctgccacaccctccccccgtcttgcactgcctgctcaccacaatgccacccgcctctaggctgtgggcccagactacagcctggaatggggaaggcctggggtggaaaggcaggggagggagggtgtgtgtaggtatgtgcatgtgcctgtgccaccctgggtgccagtctctccttctgtagctccgcaaagctctgggcttgtgtgagagtgtcggtgtgtgtgcatgtgtgggggtgagtctgcatgtgcacctgtcatgtgtagaagcttgtatttgtgtacaggtgtgccagcccatgcaggtgtacacagacacacctgtgggaggctgtgtgcaggctgcaggatatctgggtatgatttcaggtcctctgcacgtgtacacatgactaggataggcaggagtaagggtgggtctgggtatatgactgtgcagctgtttgtgcatagatgttggtgcctgcgttactgaatttgcacacctccttgccaccttccttcctccaagataccatctcctcatcctaacccaggtcttcggcaccaccacaattaattcccttcccaacacttgcctgatggaaaaaaaacaaaggaattaaaactctcctcaggcattcggaagtctttttgctctccatcaatggcaaagggaagaccaagccagggggttcagcagcaccatctcccctcaaagactggctgcaagagcagcctgccctgcccaggccaggtgcagttccagagaagccagccctgcaggctcaccccaaccatctgcctggccctaccttagtgagtccaaaccacaattcaaactccctggaagcccctcctaggcctggggccacccccaaggcaagtgtaaggaggattctgcacccccaccccctgacccccacctggctgaacttcctctggtctccctctgccctctaaattcacccacctcagccacacatcactccttcctgctgggataagatcagggctccagaataagtgacaggtggggtctgccatcagggccgctgggggaggggacgggaagggtgggggtgggcaagagaggccatgccctgggccccagcacatggagggcagggaccagacaccctccctcccacttttgtccactatctttgggcaataaaccaggcctcaaacttacccaagcttttcaattccccctcctccataggtcaccctgaaactgaggcctgcagagtgagactcccgggtagggatgccagagttcctccctctagtccagggactcctgcggggccttttcgaaggcctggggaaggcaggatgtaaggtctcaaacccaattgcgatggtcttggacatgagccctctcagtaggctccccttggaggaatgtgggcagagatgcagaggcctgtgagccccagaactgctttacaagccaccaagcccatcctgtcacccactcacaacttgctagtgcttgaggtatgagtggaggggggaggagcaaattggcctccagcctgacaccctgatggggagaggtgttcgcgggatggggagggggctccctttacttgtcctgcctaatgtgtgggaatatctctgagaaaggacgctaaggctgaaacagactttgagaagcccccacccttggactcttcctcagctgcggagtccctaggaccctgggaacgcgccaaggagcagcagtcaggccaggagcctctgcaaggcgtccatgggagagcagggtgtagggcacaggggcctggcagcctctagactcaaaatcccggctccaccaggtaaccgtcttgcaaagaccagtttccttatttacaactccccccaccgcgcaagtggaggaggagccagccgcgcccaggtcacagtttatttggcccgcgctaccagtgggcggcctggctggccggctaggcgccctgcatgcgcagcccgcgtatgagttcgtgcaccgtcttgttgaggatgcccccatgtacgccgcgtcggcccattagcaccaggagcgcgcgcggcgcacggcccacgcacacggcgcgcgcgtccagccccttggtgcgtgcgtccagcacgccgtcaccctcggccagcaggtggtcgcggatgacgcagcagcggcggccccccacgctcaggcccgcctgcaggaaggtgtgcctgtccggccccgtgagcacgcccacctcctgcggcgagatggccgccagcaggcccccgggccgcgaagcccacacgcagctgttgtccgcatggcccacgatggccacgtcgtcgatgcgctggtcccgcagcactgcactgatgtagaccttccagtcgcccatcgcgctccgagtgcgcccagccgcctcgcacctctcggggaaatatagaggcgccacgcggggaaggcctgcggcgctgtgaggcaggctgggcggggctgtgacgtcacacaaggcgccgtcccggagcgaccacccaggctggggcacgtggggcgtgggcgtttagtgctgtcgcagttctaaggttatcctgtaggatgggtttggcagagcgcagcggctcactcctgtaatcccagcgctttgggaggccgaggcgggcggatcgcttgaactcagtagcgagattatagtaaactattataggatcgtgtcgctgcacgccagcctgagccacagagcgaggccccgtctctaaaaaagcaaaaacaaattttaattaaaaaaaatttttttgagatgaggtctcactatgttgcccaggcgggtcaggaagtcttgagctcaaacaatcctcccgcctcagcctctcaaagtgacgagattacaggcgtgaaccaccgcatctggccaatctatttttaattttaaaaagctggttttgtgaaaaaaggatgttgtgtctggacagccagaccttcacttgtaagggaaccaaccattcaacccccagattgtggttcttaagcatgagagaacatcagaatcccccgcaaggctgttaaacagattgctgggccccaccccagactttctgttcagcagtataaagtgtagcccgagaatttgttatgtgtaacaagttccctggtgatggtactgctagccaagggactctcagacccactacactagtgcgtgttggggtggggacaacgatatgtcacccagcccttagggtccacgccacagtcaatgctctttttttctattttcttttttcttttctttctgtctctctctttccctccctctgttccttccttccttccttcctgccggttcaagtgattctcctgcctcagcctcctgagtagctgggactacaggcgcacgccgccgtgcccggctaatttcttgtattttagtagagacggggtttcatcgtgttgcccaggctggtttcgaactcctgagcaatccacctgccttggcctcttaaagtgctaggattacaggcgtgagccaccgcgcccggccaatgctaagtatttctaaccacgattctcaaccttggctgtacatggaattatctggggagttttacaaatataccactacccatgccccatccctagacatactgatttaattggtctgaggtggaacttgggcatagattggctcaaaacgctccccaagtgatcttaatgtatggtctgagaactactgctctgtaaacaaaatgttagtttctcataaggaataacatgcagcttctccttgcacagggcttggtatacagtatcctaggctcagtaaacattagctgggctggcatctagattttgcacgttaagatctcatagaccttgttctctgagagctgtggagaagctgtgaatcgcttttctgtcttggcatttcccggcgggacccatgaagaaaagagctttccttctcagcattttcaaagcactttattgagttcctgcgccatcctggcgcggagctggccgcactgggggaatgggacacaatcttgccttccatgccccagccactctctcactgcggaatcaccaaggagggaaagatgagtccctgagcaatcaggaaacggtgtgctcccggatccaggccaggtagtaggccacatcggtgtagacgcctggcttgttgcggtcaccacagcccgatccccagctgatgatgccttgcagggtgagccggcgctctgcagcttggtcctcacacaccagcgggcctccggaatcaccctgggtcggaaacacgcagctcagcgctgtggacctgagatttgtgcctgacggcctcggggaagggcgccaaccgggctaagagctcacctggcacgcatcggtgccgccctcgaggaaccctgcgcagagcatgccggggaggatggaggatccgtgcacgtccggggctgagcagcgctccagggagaggaacggtacctgcgcctcctgcaggaagctggcatattcctccgcccctgcgaacacagagcgccttcttcacaccccatctgacaacgcttgccgcccggacgatggacaaagctgctccaggcgcttgtaaacccactcatgcccttcctctctcgcagcaagcccgaaggggaggaggtgccattaattcaatttcataggcaaggaggctgaggtccagagaaaagccaggatttgaatgggcggagcggaaacagaaacccctcccccaccacccatccagagtcgcagaacctggctcccacactagcccggagcgcggggccagcgtcctagttggcctttgcagcccggcgcccagagggaaccaagagcaagttcgattctccctgtatccccaggagatttggggatcccagcagtgaatcccaggccctgggattctacctgggattcacctacacattctcacaacccatcaggtcagcgccacccattctgtaggcacccggaacgataccaaagtcgcgggcttcttccgcctaacccagtgatcaaaggtctcctcccctacccctgcccctagcagttgtgcctaccctcgaactggtggccccagccggccacctggcagagcgtggtctcggagggtcgcgcggcgccgcttggcaggcacaccggctgaacgtaaggcgacaggagcgcgcagctgccgtccgcatcctcctgaaggcgcaacagagctaacccgggcggagaggagcgtgaggcggggacgccggggccccaagctctcttcccgtccccgcggggcgcccccacgcacccaggtcgtgctggtagctgacgggcgagaaggcctcgtgcaagcggtaggagcgcacggccaacgtctggcacggctcacagctgtggttacggcgttcctggccgagcaccaccgtcagatcctcgggtgcgggcctgcggggggggtaggggagaggcagcgctctcagacctggccacaagcgttctggggaagccccctgctcccgaaccccaatcccgtgttccagcttcctccccgggagctccggaggggcgtggaaagaagggtggggcgggagaaggtagggcacgggttcgggtgcagcgtggaagctgcgctgggagacggaggagccgcggcccctggggcggctctgggcgggcgggtactcgccggtcctgcaggcagtgagcggccgtcagcacccagcagggggcgatgaggctgccggcgcagaaactgtggccccagtacagcgcggcgatgtaggggtgcgccccgcgtagcgccaccagcccgccaacgacgcgggtcatcgaagacagactcttgcggagccgctgcccgcagctcagtgggccgttcctggtcagggaaggcggctgctcccgcttcgccggcaaggctgtggaggagcaggggctgaggacggagagcccgcggccggctggccggaatctagctcgcccggcgccctctcggctcctccttcccccccccacttcctaacctcccggggtctgggactgaggcggggtccgggtcgtgggctgaggcttcggcggtgccggctgcgcgggcatgagtgggacatgaagcctaggggacaccggggtcggaggcgccgcctgggttggggtctggcactgtgccaggtcgcagtactcccagctcagccggtcgcggttcagcacgaagcaccacgggcggatgtcgttgtccgggttcctgtagccacacgacggggcgccgttagagcgccgggagcccggagccctggggcggaggggtcacccagccccacgcggcgcaccggcagaaggcgtggccgcccagtccccagttccgcgcttgctcggcagtcacgttccggtaggtggcctccgaggcccacggctgacagggcgcacccgagagcgtggtcctggccaggccgcggtagctgagcccgcggccatcatagcagcttgccttggtgtctgaggagaaagggggctccctgggcagccaaggctgggctctcctgcctccctctcatctgctttccgcactctccctcctccttcctggcaagcccgtcccacctgggggctggccttctgcttgccccagaccctcactcacccacgtcgcagaaggctccggtgtagcccaccgggcagtggcacaggcggtggccctccacctctaggcagcgacccccatggaggcacgggttggtgcggcaggcttggggagggaacgcagtgagccacccctgggcctaaagacccccccagagagctctccttcctggcacaccacccggcctcctgccagcctgtcttcctgacgctcctccctggcccgttcccaaccatctgctcaccctggctggccagccgctggcagtgggcatcaggacccttgcactggcatctggccacagctgcttgctcagttctataccatatctcattcttgtggaaaaaccggagaagctgaggctcaaagcacttctctggggacaaagagggatagtggtctcaggagagtctaggaccatgccaagtctccgagtatccagcaacctattctgtaggcccagggttgcccctgtcccccagcaccccgcccaggtcctccacatctcctcacctttctggcagtggtttccagtgaggtgttgtggacagagacagtgggggccgcttggcatgttcacacaggtccctcctttctggcaggggctgtgtttgctgcagtggtctgagagatggacatggtggaaggaagagcagggagctgagtcacacagctgggggccaaggcccttcttgaacctacttgccttgtgaccttgctactccaagtttccaagcttggtttacccacctgcaaaatgggaccactccttcccagaactctccctctggacttccaaagggtattgtggagggagagaaggggctgggtccagaatcccaggtgtgtggggtctggtgataccaggagagtaatgaggcgggaggagagagccccaggccaccccagaggctgtgtgtagcacctttcactttcttgggctccaaacagtatccccatcgctggtcctgatcaaagttgggggtggtagcacacctgtagaaagagacaaggcttccctgctctacccaggggcctggcccaccctgccctatcacagtcccctctctccaagcagagttccttggacagaaggacaggcagggtacatgtctcccaggcccctgctccaactcctctgcgtagtcttaccagggctgagggcctggccggcccttgtgggtacatttgtggtacagctgccggtggtactggaaggggaagtggcagggctccccggtgacagtgagaactgcagggacaacacactctctgaggacttcccctgtactcaactgctcaggcactgtccctcagggtctggtcaggaaaaggacagaccctcaaaaaggtcgctgtgcattgaaaacactttctgctctaaaagttgggttcagggccgggcgcggtggctcaagcctgtaatcccagcactttgggaggccaaggcgggcagatcacgaggtcaggagatcaagaccatcctggctaatacagtgaaaccccctctctactaaaaatacaaaaaaattagctgggggtggtggcaggtgcctgtagtcccagctactcgggaggccgaggcaggagaatggtgtgaacccgggaggcggagcttgcagtgagccgagatcgcgccactgcactccagcctgggtgacagagtgagactccatcttaaagaaaaaaaaaaaaacttgggttcaggagtcagatagctggagtagactcctgactccacaacctgctagctgtgtgaccttgggtaagtcttcagtcccaaggccaggaagagcacttgccacaaagtaggcacttaataatacttgttgaatgttgaagtcactgttaaccactctgatctgagccttggtttccttatctgtaaaacggcagtaataatagtacagttgatcctcattcttctctggttctacattgagaatgtgcctacttgctgaattttatttgtaactcccaagtcaatacttgaaatgttttcatggccatttgtgggcatgcacagagcagtgaaaaatttgcacattcccagttaaggttcaacaaggcgtcacgctgctgctgcttgtttcagctctcctattgaatgagtgtccttctcagtctacttagtgcaacgtttttcacactttgtgcttttgctggggatttggcttttggaaatggcctctgagcctcctgctgaagagctgtgtagttcctaagcacaagaaggctaccttagggagaaagcgtgtgttagacacttgattcaggtgtgtgctatagtgccatcagcttagcattgatgaatcagcaacacatatactaaataaaatgtctttaaacagaatcatacataaaaccagattatatgctgttggttgatgaaaatgttgtgaccagaggctcacaggaacctaatactgtttgctagttcaatgttcactgtgattttatagaacataaccatcgcgaataatgagaattgcctgtgtcttcttcagaggaattgtcgtggggcttcatgagataatgccatgaaatgctgagcagtgtctggcacaaagtacctgctcaataagcttttgccactattttgttcaaggcaaagtgcacttgccaaggaccaaaccagaactaggacagtaaatggaaatggatctgagatggacctttaagatgcaaatgggggccaggcgcggtggctcacgcctgtaatcccagcactttgggaggctaaggtgggcggaccacctgagggcaggagttcgagaccagcctggccaacatggtgaaaccctgtctctactaaaaaatacaaaaattagctgagcatgaagttgtgtgcctgtaatcccagcaactcgggaggctgaggcagagaatcgcttgaacccaggaggcggaggttgcaatgagccaagatcgcgccattgcactctagcctaggggacagagcgagactccatctcaaaaaaaaaaaaagatgcagatgggatggacggacagagaggagggggaccttaggcaggggattaggcaaggatagggcaccaagtttgggtaaggcaagagagaggagaaacttttgggtgtggggtgaagagaggaggctgagggagtccagggttggaatgtgctgggcctcaacgccatgcttagagactcaaccccaccaagtcaggcccaccagggtaaggtccatctggttcacaggccctgctatgtgccacactctaggtaaattttttttttttttttgagacggagtcttgctgtgttgcccaagctggagtgcaatggtgtgatcttcgttcactgcaaccttcacctcccaggttcaagcaattcttctgcctcagcctcccgagtagctgggactactggcgcatgccaccatgcctggctaatttttgtacttttagtagagacagcatttcaccatgttggccaggctggtctcgaactcctgacctcatgatccaccgaccttggcctcccaaagtgctgggattacaggcatgagccaccatgcctggcatgtaggtaatttagtgtctggaagaatgaaagcaatggggagctatggcagagcttgaggaagggggaaatggcaggtacccttcatctaaaaggtagtttcataataaaagctaatatttgtaaagcatttccatgcaccaggtgatgggctgaatacctcacatgggtttcccttctcaacaaccctaagaggtttactgttatcaacctggtttcacagaaggggaaattgaagcttggagaactcaaatccctcgcccagagtcacccagctcataagtgataaagctgggcttcagaggcattcagatgccagagacaagctcttgatccttccttgcccattgaaggccctggcctctgtgtggcatgaatgatgcccatgagacgtactggggaaaggaaaagaaggggagaagctggggaaactgaggaaggctggcaggagcccaggtgtgatggcgccagcagcacatatctcaagcacctgctccgagccaggctcgtgggcacttagacacagcccataccctgccctcaaggatcacacagctcacgatcactctagtgcccatgggcataagacctagcaccaggtaggcactagactagactgccctgagactgcacacactgcaccatacacatccccacccaagggttcccgggaggaggagccaggccacttaccgactgtgtgctcttcagctttgtacttatgctccttgggggcttcccaaggtggaatctacaagggagagaagaaggcagggaactgactataagtcatagcctgccaccgatctgttgctagtctgcagcttcctctcacagcccagaaatgcagagatttcttcccaagacccaaaccctttctacctccccccgttgtcttcttaaggcccatctcccccagaaatgcaggctgtgcccttgtatccacccagtctggttgtctgtctcctctgcctgggccttccgggctggcctcacctttccacataggcctcctagtcacctggacccacaggtcatgagcagaggccatggctcatggctgtgatagcgaccccccagaacaatcctgggacaatcctggttcccacagcactcaccgaaagtgttgactccaagctcaccagcaggaaccccaggagcagcagagccctcatggcatccgtccgttggtccagctgcctatccaggagtccagatcaataggactggccaaaggtcttggaaatagagattggtcaagctgccctcctgagcctggtggggcacaggctgtttgtggaaagccaagtggagcaacttccttggtcaccccttgagggccggaaagttgggagtttgtgggtgggggtgaaatgaagagctgggctcctcctctcttttctagatagtgggactggaagcagaagaagggacattcttatgctctgggtcctgtggagatcaggaggttaaggagatcaaagatcatggggatcttggagtccactgtgaagtgtgttcattttctattgtcatgtaacaaactaccataaactcagcatcttacaacaatacccacttttaattttcttttttttttttttttttttgagacggagtctcgctctgtcgcccaggctggagtgcagtggcgcaatctccgctcactgcaagctccgcctcccgggttcacgccattctcctgcctcagcctcccgagtagctgggactacaggagcccaccaccacgcccagctaattttttgtctttttagtagagacggggtttcaccatgttagccaggatggtctcgatctcctgacctcgtgatccacccgcctcggcctcccaaagtgctgggattacaggcctgagccactgcaccgggccatgtgtcgccttttaagaactcacctgactaggtcaggcccaccaaagccattctcctttttttttttttttttgagacagagtctggctctgtcacccaggctggagtgcagtggcacgatcttggctcactgcaagctacgcctcccgggttcacgccattctcctgcctcagcctcctgggtagctgggaatacaggcacccgccaccacgcccagctaattttttgtatttttagtagagatggggtttcactgtgttagccaggatggtctcgatctcctgacctcgtgatctgcccgccttggcctcccaaagtgctgggattacaggtatgagccaccatgcctggccctgccattctccttattttaaggtcaaacaatttgggacttaaattacatgtgcaaaattctttcacagaagcatctacattcatgtttgacagaataactgggaggtgtgcaaacaccaggggtagagatcttggggccatcttagcattctaccaaccacaggaagtgaggcaagaaagcaaatgatttaatgagaaaagtgctaaaccaaggggcactaagatgtgcagctggaacatgagaagaagacggggtgcacatgtgctgcccagcatctgtcctggttcggtaatgacactttgatttttcctttagcaacgactcctctcttacttcttccatgggctctagtgctgccaactctaccctcagagctagggctagagatgtggcctaggtctggtcaatcagagcatgacatctctaatccacagtgattggttcagagataagcatatacacaatttaggccaattaaagtgctagcttgggacttttgccagaacttttgggaaagcaaaaaagttgcactggggttactaagcacagagcatgtgggtctgaacacattgatgatcacctttgtcactctctagggagggcctgtttgagaatgaagcctacacataggaaaagcaaagcaaacagggcaggaaggatggaaagatgctgtggtagacagcctcaaagacagcccccattgatcctcaccacctaggattcatgcccttgtatggtgtcttcccacattgagttagggctgttctgtgtgtccatcagaatatgacagaagtggctgggtgtggtggctcacacctgtaatcccagcactttgggatgccaaggcaggcagatcactctaggtcaggagttcaagaccggcctggccaacgtgttggccaaaccccatctctatgaaaaatacaaaaattagccgggcgtagtggcgtgtgcctgtaatcccagctacccgtgaggctgaggcaggagaatcgcttgaacccaggaagtggaggttgtagtgagcagagattgtgccattgcactccagcctgggcgacagggactgtctcaaaaaaaaaaaaaatatggcagaagtgagggtgttggacttccaagcccaggtcataaaagacattgcagtttctgcctcggtctcttaggttgctcactctggaggaagccagccactgtgttgtgaggacacacatgcagccctgcagagaagcccatgtagggagaaaggaaagcaccctgctgacagccagtgccaattggacagccacatgaataagctgccttggaagtggatactgcagccctcgctgacatttggcttgcaatcttatgaaagacctcaaggcaaaactgaccatcagaaactgtgataaatcatcattaaatgttgttgctttaagcca

SEQ ID NO: 259 - DNA, 2842 bp, Homo sapiens
  source 1..2842: mol_type = genomic DNA; note = NC_000006.12:c139374648-139371807 CITED2 [organism=Homo sapiens] [GeneID=10370] [chromosome=6]
acagctcattgttggcagctgccgggcggtcctgccgagctgtgagggcaacggaggggaaataaaagggaacggctccgaatctgccccagcggccgctgcgagacctcggcgccgacatcgcgacagcgaagcgctttgcacgccaggaaggtcccctctatgtgctgctgagccggtcctggacgcgacgagcccgccctcggtcttcggagcagaaatcgcaaaaacggaaggtaagcgcgacgggcgaagctggctggggctcttgccagcccagtcctccgagggcagggtttgcccggaggaagagcgtgaggcgaagctggggaataacaacaggatgtgcaacaacaggatgaggagggctgatttaatgcctgaagttcgcagcagggctacggggcacttcctttattaggccacttcggggagcaaagggggtgtgggctcgggtccccccgcccgatcgcaggggaaggggctgtttgtgcagcgtccggctgtgttatgagtggtagctcttccgtggtggctagcccgggtgcacaggctgttagtgggatcttgggggtggtggttcgcagccgacgtgcgcccgggaatcctggggggcagaggcgagcaaaagtggggtgcgctgtggtgggcgacacgtgtggcgcgggtctcattatctgcccttttcacttccaggactggaaatggcagaccatatgatggccatgaaccacgggcgcttccccgacggcaccaatgggctgcaccatcaccctgcccaccgcatgggcatggggcagttcccgagcccccatcaccaccagcagcagcagccccagcacgccttcaacgccctaatgggcgagcacatacactacggcgcgggcaacatgaatgccacgagcggcatcaggcatgcgatggggccggggactgtgaacggagggcaccccccgagcgcgctggcccccgcggccaggtttaacaactcccagttcatgggtcccccggtggccagccagggaggctccctgccggccagcatgcagctgcagaagctcaacaaccagtatttcaaccatcacccctacccccacaaccactacatgccggatttgcaccctgctgcaggccaccagatgaacgggacaaaccagcacttccgagattgcaaccccaagcacagcggcggcagcagcacccccggcggctcgggcggcagcagcacccccggcggctctggcagcagctcgggcggcggcgcgggcagcagcaacagcggcggcggcagcggcagcggcaacatgcccgcctccgtggcccacgtccccgctgcaatgctgccgcccaatgtcatagacactgatttcatcgacgaggaagttcttatgtccttggtgatagaaatgggtttggaccgcatcaaggagctgcccgaactctggctggggcaaaacgagtttgattttatgacggacttcgtgtgcaaacagcagcccagcagagtgagctgttgactcgatcgaaaccccggcgaaagaaatcaaacccccaacttcttcggcgtgaattaaaagaaacattcccttagacacagtatctcacttttcagatcttgaaaggtttgagaacttggaaacaaagtaaactataaacttgtacaaattggttttaaaaaaaattgctgccacttttttttcctgtttttgtttcgtttttgtagccttgacattcacccacctcccttatgtagttgaaatatctagctaacttggtctttttcgttgtttgtttttactcctttccctcactttctccagtgctcaactgttagatattaatcttggcaaactgcttaatcttgtggattttgtagatggtttcaaatgactgaactgcattcagatttacgagtgaaaggaaaaattgcattagttggttgcatgaacttcgaagggcagatattactgcacaaactgccatctcgcttcatttttttaactatgcatttgagtacagactaatttttaaaatatgctaaactggaagattaaacagatgtgggccaaactgttctggatcaggaaagtcatactgttcactttcaagttggctgtcccccccgccgccccccccacccccatatgtacagatgataatagggtgtggaatgtcgtcagtggcaaacatttcacagatttttattttgtttctgtcttcaacatttttgacactgtgctaatagttatattcagtacatgaaaagatactactgtgttgaaagctttttaggaaattttgacagtatttttgtacaaaacatttttttgaaaaaatacttgttaatttattctattttaatttgccaatgtcaataaaaagttaagaaataacttgttttctagaagtcatttgggggtggttgttccctttggtggcttttttccccccgtctttgagttgaacactattgatgagagtaagcattccaaaggataaattacaggacactaaaacaggtcatgatgagcttaagcggagagcaggatttaacataattggcataatgcttcattgttatcattgtaacatgcctcttggtgtgctttaatcaaaagctgcaaagttgtcactgcttttttttttttcttaattgccatcatatcaagtgtactccagagttagaaaggtttgcaatactcaacattatctttttcaatgggcaggaggcaaaaaaaatcaagtgtttctgtttatacctgattcaactacttaaatagaggtagattggaataatacactgattgattgatgggtggcattaaatataaatctaccttta

SEQ ID NO: 260 - DNA, 45604 bp, Homo sapiens
  source 1..45604: mol_type = genomic DNA; note = NC_000008.11:c17909983-17864380 FGL1 [organism=Homo sapiens] [GeneID=2267] [chromosome=8]
aagctgactcaaatggcagagggcagcctaaaggagaaacaactggcaattatcccgggtaatatgatcttggctgccttgatggtaattaccgcggcggtaagtctccctgctgtctggactgaagaaaattttacatactggcttctgttccatttcctcctttaattaggccagttacttggatggattcccctattgaagtttatacaaatgatagtattttggatgcctgggccgattgatgatggctgtcctgcacagcctgagaaggagggtatgttgatgaatgtaactggtatgaataccctccaatttgtttaggaattgctccttgatgtttaccattgcaaatacatagttggataatctatgtacctcctcataatcgttcccaacccagttatcacgtagtgagtggaatgtctttccaacctatcatgactgtaaaaacttatggggatggttattttcggtcaaatttaaaagtaaaaaattacaaatctcaaggactggcttgtcctaaaagaaatccaaaatggtcagaaaaactagagattcttgcttgggacaactgtgtagcagatggtgcagtagttttgcaaaaggattcttatggaataattatagattgggcccccaaaggatcctttgccagaaattgcactggacaaaatgctgggtgcgctgaggattccttcatgatagattatagagaaagtcccaataatccccccactttagttagaagattggaatcactatatccattgaaatgggaagataaaggtactgctcctccctggccaaagataattagtccagtcatgggtctggaacatccagaattgtggaagttgcttatggctacctccggaatgagagtgtggaaaggggaagcatcatggggaacaagaggtaataagctactgtttaccatgcttcttcagtctaatcagtctatttctcttcaaagttgtgttaaacctccttacatgttagttgttggaaaacttatcattttacctgactctcaaaccattacttgtgacaattgccatctgtttacttgtattcattctacttttgatatgaggaatagcattttgctggtccgagcacgagagggcgtttggattccagttactcttaataggccttgggagacttttccctctattcatgtaataactggagttttaaaagggattcttaatcgtacaataagatttatttttactttaattgctgtgattatgggcttgattgctgtcaccaccaccgcggctgtggcaggtgttgccttgcattcttccattcaaactgctcattatgttaatgcctggcagaaaaattccaccagattatggaattctcaggcaaaaattgatcagaagttggccaatcaaattaatgatttgaggcaaacagtcacctggataagagatcgttttatgcatttagagcatcgtatgcaaatgcaatgtgattggaatacatctgctttttgtattactccttattcttataatgttactgaacatcagtgggaaaaggtctgatgccacttacaaggaagagaagataatctaaccctggatataactaaattaaaagaacagatttttgcagcatcgcaggctcacttaaatttgttgcctggagcagaaatgcttgctggagctgcagataggctctcggagctcaattctatcaaatggattaaaactctgggaagctctgccattgctaattttgttttaatttgtgtctgcttatgttgtctgtttttagtctgcagatgcggaaggcagctcctgaaagaaaatcaaaaccacaagcaagttatgattgagatggctgttttaaatttaaaaaatgggggaaatgtgggtcaaaacaggggcttggatgtgggccgaggtggttgagggctggcctatggtgtgcctgtttaaggattaacaaaatatgctttagaatagtgctttattaatatagtcatgaatcataagaatagcttctgcttagtccgacaatataagaatcaggcggtgagcttgcttgcctaactgcagggtggaacaaacaaccacaggaagtgtgcggagcctctaagcaagaaagcttgcttattgctcaacctcccacttgagtccctgaacaaaggtcttgtgggaagggaagcgacccctgctccattccccagaagggaacagcaggaggttgcttgtaaaagaggagaagtcctctgaggataaggggaaagtcttctatctctcgctcgttcccagaggcagagagctctgctgccctgctgatggtgcttggagtggaccgctcctttgatgcacaggcctgtggtctgacgggctgtctgctttcacgtcctgttctgttaaccaattagttggactttaaggattatctgtaagttaaacatagagtattagcttatacagtggaacagtaaataatattaacttgctgatgacgcatgctaccccctctgccacctctccccatggtcaccctgtgatcaccccaccatctgcccaccctcagcctataggatcaaaggaactgtactcagtaaatatcagtggaatccagagctcagggctgtcgcagtttccacattgcgatggacccctggacccacttttgttaactcttgaactttgtgtgtttgtctttatttcttttctcattccctcgtctccactgggaaggggagaacccgcgggtggtatagcgggctggttcccctacaaggttgaccaaactttttctgtaaaagaccagatattaaatattttcagcattgtatgctatacattctgttgcaacttctcaactctgtggttatagaatgaaagcagctacagacagtatataaacaaatgagcatgcctatattccaataaaactttatttgtagacactgaaatttagatttcatataattttcacaggtcacaggatatcgatctatttgtgatttttttcaactacttaaatatataaaaatggaccatgggtcgagtttagactgtgggcgatacaatagtttgttgacctctgatgtagagcactaaacacttaagttcttagataattaatgttaggtcagaggagaaattagcaatggaagaaaattcagtttcattactttacaggatggttattttatgagtactattttgaactaatagaaagagagggtataaagccaatgtaaccgaatgatatttgtaggtattagtttgtaccatatattttctttctttttttttttttttttgagacaaagtctcactttgtcaccaggctggagtgcaatggcacaatcatggctcactgcaacctccacctcccagatccaagtgattctcctgcctcagcctcccaagtagctgggactacaggcatgcaccaccacgcccagctaatttttgtatttttagtagagacagggtttcactatgttggccatgattgtctcgatatcttgaccttgtgatccacccaccttggcctcccaaagcgctgagattacaggcatgagccaccatgcacagccactgtaccatatattttcttatatactggattttgtttttccccattcagactagaggtaggcatgcatttcctctgcggattgtcacagccagcaatattagaaacaacagatgaaaaaagattaaaatcagagaagctcccactcccacaatttgccggggtggaaagaggatgaattggtgggaaatcaaaagaatgtgatgttttcccttgcattgctgaaaaggaagcggggggatttgcggcagcaatctgtgtagtccctcaggctgaggtcccagtgactagagcaagaatagacagttgtagtgatattataccaacttcacaccaccccaaaccccagaaatcatatgcaacccccagactggagagaaactctaaattgtctgatatcatgctgaaagcagtagagaatcagatttctctgagcccatggaatggagccttgaaattcaattagaaaacagctgcagttatttcacatgtaaattgtcaaaagacacatatccgctttactaacatagaacaagtatcagttacctgaatgctctcaagcctcgaagttggtggggaaaccatgtttccattacatctacagtgggaaacctaacctcacttgctggcaccttccaggatctttggagtcaatgtttttctattatttcctgcttttactgaattactgtaatttctctcaagtctagcctcttttggctgttctttttctccactctgcatcattcccaaagcaacagcctctttccctcttctcaaaatgctgcagatacaaggcatctctgtgtagtagattcttacggaagattcaggcaggggaagaggaagaggaatttaggctgcaccaaacatcttaaaactgactatttaaagatccttgctctttaaagatccttggccatagcccagaacttctccctggctgcctcttgctcagctccctggcatcttgatgtattccttcctcacatcctcctccccattcttatctcattcactccttcctttttcacacctttcttcttgggttacctaaggaaactcgaaaatcttcattaattcttcattaacagaataattttgcccttctagtttcactgctagcctatttcagccaggcctattattaaacactgttcttcctctatgactatgctaatgagtatgacctatttcctcaccatggagttctgagaaattatttcttttttgaaagctaaaattaattgcacaaggccctgaacaatcctgattagcagatattgtgagaagagacatctccatttccctgacatcccctcccattatattcaagagaagaacagggcatggctaactcggttcttaggggccagtgttcattccaaacccacagtgcagggaggaattagagaccacatgtggctctctagatgggtcccatttttttgcttgtttgttatattcccaatattttgtcatttttaaaaacattctcatgtggtctggggccatccatcattaccttctgcagcaataattccacttctgatctggtgaaagcttctcatggattgtgtgtgtgtctatgtgtgcgtgtgtatgtctgtatctgtgtgtgtgttggatgacagaactatagaggattgggaagatgtggagataaagattctcctggtgatgttacgctccaagttcagattgccatcagtggcttgggcttccactctgcttctttcttccactcttcacctctgattcatctagatccctgcacaggctggaattatgttctaagcctgggaaccccacagcctctgtgtaaagctaacaaagcccatagcaaatggataagaccctgcttctagaacagtctacttcaagtcaaatcgtggcatatatgatgttaagcaagttgcttgctctctttatgtctcagtcacctcactgggaaaatgggaattaaaaataataatacatatctcaaagggctactctggagattacatgaattagtacataggaagtgttcagagagtacctggctcatagtaagtgacttctaaatgttgacacttaatttaagtttacagagaaggctctgtgccaatactgacttagggctacaaggtctcaggatccattcccacactcagattttaaccattgatttcaaagcacccacacatgccaggttggctggctcatgatggctttagccattgggaccacctgagcggcttctggatactgacactgggactagctagatcaccacataaaagaaatcagattttagcttgttgattgttgacttgatggagaacttctaagcctttttaagtagagaagtaatgtggtctttttttgcatcaagataatgttttatactctgtagcagatggtctgcatgaggaagaaactgggagcagattgatcaactaagagataccagtagattatgccaaggtgatgaacacatgaattaaggtgacagcagcaatggcgctgatggagagaatttaccatttagaaggtagaatcagcagaacttattgactaactggaaatgcaggatgaggaggaggaatgttctctgataatcccaagattttgaagtgggtaaatgaagtgagtaaatgctggttttgccaactcactatcttctttcgaaggcaagcctttcttcccaaggggagggaagaggaagagaagagactataataaatttagtctgagctaacaggctactggacaaacacttctggagttacagagagaagtaatagctggaatgaaatatttgggagttgttaaacactaacattcaatggaccaaaaaggaaagaatactccataaaggaaagatggaaaacttggaggatgcccagagaactaagagggatgggttttataaaagcctgtggaagaagaacttttgaggaagaaggagcagcctgagaattcagcgagaaactgccatgaggagtgttgtggcatcttgtaagcagccgcaattgcagtaaaggagtcagaagtcactggctttaattgaggagttcatggaaagagagaccgtggaatcagtgagtgtggactgtcttcttaaaaaataagcatagttgaaatggagagaaaaataggaaagttactagaggcaggagtaagagagattttaattttctagggtttaatagacttgggcttgttcatagagtaaaaaggggaaacaactgtggaaggaaagggtgaagtcaatagtgaaaaagaggaaggtaatcaacctagctctagagaagaaatgaggagctggggattaaagcacacgtggaaggatcatagtacaacaggtggaatcaataccacagaagcaaccctcaagcaacaaggacctggggttggtggatatatacctactcttggtctcctgccacctgagaggaaaattctgatgtggggctctcagaggtttcagtaggttggagcctcagttgtctatgagtgtacccccactcattaggtactttttggctttcctccctgttctatttcatttgaccacacccttgtttatgctccctggaatcacctcccaaataaactacttgtatccaaatctttgtctcaggctctgctttcagggaatcccaatttaaatagttgttgagcaagaacattatcccagactttgtgaatccaggtcacaaaaacatttttcttatatatatctacttttcaactttcttggtagcaattttgttctgctacaaggtcttccattacagattaaagaagtttctttcacctttcttaactgaaatgtaaaattcttgtgctaaagcatgagtaaatttgggaatcttagtaaaatgagtttaggggcattgtattgtctgcatcaacgttcactgcatccacatttcacaaatagttctacattattaagaataacatcatgactctttcattcgttctgtaaagaatgatgcagcaggctggacatggtagcttcctaatctaacattggaattatcttcatgaaatgatgtattatctttggttgtacattgctgcctcactcttttttttgagacagggtcttactctgttgcccaggctggagtgcaatggtgtgatcttgcctccacctcccaggttcaagtgatcctcctgcctcagcctccctagtagttgggattacaggcacctgccaccacagctggctgtttttgtatttttagtagagatgggatttcaccatgttggccagactggtctcaaactcctgacctcagatgatccacacgtcttggcctcctaaagtgctgggattacaggtgtaagccaccaatcccaggagccagcctgctgcctccttctttacagaacgaattaaacaatcatgacattgtttcaagacagaaggaaacgaaaatttatcgcatattttctatcaggcattgtcataagcacttcatgtaagttatcaagtttaatcgttaccaattttgaatatttacattatatgctaatacaaataggtgatattactattccatgcataataaatatttctgagcttctattgtgtggtgtgcatatgctgggtgctgtggatattgaaataagaaaaaacaagcccctgatctccctggaatgaaaagagaagctccagtacacaatatagtgatgtgtgatataagagaagtaaatacataggagaacatctagccttggtggatgggctaggagaagggctggtggctaattaagacttatttcattcagagagggtacatagaaattagaataggcaaataaaaaggtaacaactatatacatcacagcaatagaaaagggtacatgtattatggttaattcattggtgaaagagtcattggagatgcagtcttaggcttgccgagcatctttattgagccaggcaatcttccattaaactggacagatccccacctttcatttctcttgaaatttcctaattttgtagtaggagaatggcacatactatggagcttttcttgctcacaacagatcacccagcagccacatttgacaaaaattttggggccagggagtaaaggtgtggcctcagtgtgtgggtgccatatatctaggtgtacactgaaatacacagatggctgggtgtggtagctcacgcctgtaatcccagcactttggtaggccgaggtgggcggatcatgaggtcaagagatcgagacctcctggccaacatggtaaaaccccatctctactaaaaatacaaaaattagctgggcatggtggtgcatgcccaagtcccagctacgtgggatgctgacgcaggagaattgctggaacccgggaggtggaggttgcagtgagctgagattgcaccactatcctccagccaggcaacagagtgagactctgtctcaaaaaaaaaaaaaagaaagaaagaaagaagaaagaaagaaagaaaaagaaagaaagaaaggaaaggaaaggaaggaaggaaggaaggaagaaagaaagaaaaagaaaaaaacagaaagaaataccgatgactgggctaattggattctccctcttagggatgtgagatttgtatggacagacacagaggccagaattccactgaaattaaaacattttaagggctgcatactacagaataaatccaagaacacatctttgagagatttttggagctttccttattctgccttcccttggcttgtatcagtctgtcactgattgtactacttacctcagtccgtaaccctccaacaaatccaattatttttgttctagatggctgaagttcatttcttcagattataaacaacaacaacaaataaaactagtataagtgtatgactctcaaatagggcctcaatatttcagaatctttgatcgctggagtcaagcacacaatgtctattctaaaagttctagaatttttccacaatgtgtctctgagggggaagcaggaaaaaaacatttcagtctcagaggaatcattttgtagtatactcttggtcatgcctataggagtcagggacctagcctttgtttttgagggagttctagttattggcaaagttatccaagtgcaaatataaatttttaaatgtaaattttaaaggtttcatatgcccggttattgtcccaaatgcacatgcagaaaaataagttgtgcctgatgaactaaatgtgggctaaccaacagattaatcagaaagtatgtgtaattgtagacaatgaatttttttgtctctcaacctaatgtacagttattttgaagtgaaaggaaactatatctcagggaattatatttagattgtcttcctttttctaagaaataaaaactgagtaaaaaaaagacaaaatttaaattcaaatgggcaaatatatttttgtcaaatgtatatttttacattttctgctagagttcagaaattttgtcagaatagcttgcaaccctgaggattctactttcagatattgtcatagtggtaggaatcacgcattttccaattagttgaattcttcatgaaaagataatattttaaaagtctaaaaactggagaaaagaggtacatatagagactggatttaggcatcaggatgaaaagatacactgcaaattcatccaaaaaaaaaaaaaaaaaagcagatacatcatcaccgaggagtagaatgaaagcaagtatcttctgataccttccatcttccgtgttcctaaaggcgtattttaaaatgtggttttacttaacacgagctcttgtgttcttttttccctacatatttttatacaatatagctaaatttcttcttcatgtgttacgggtaaaaaatctgttttctattagaatttacgtgtatttggttaaaattgtttttttaatgacatgtgaccttctggggagattcttctttaataagaaagatgttattattcagaagcataaaataaatgccagtccacagtccttgcaaacacacagaaagaaaaacaaacatattcctcagcaagaacactttttattttttgtggcagaaaaaaaaaaagaaaacatctttgtactcttcctgctagggaaccaatctaaaattagtttgagaatcagaggggaaaaaaatccaaacacataggtgagaaagctctgaaaagatgagtagtgaataagcgtttcattttatcttaactagtatgcaggggaggacataggttgtgtggaacctgaagctacacatttgggagtatctgccaaatgtctatcagtattactttttacatgcctcatgtagcaggcctagagggagagcaatccagatgtgagcaaaagaacagagagctctgggaggaagaaataatggtgcagtgacaaaattccttctgaggcattcgactttcctgtccaggagcctcagagttacaggcagagttcaatcatagaagcagagcttctaggatatataagggatttgacttaatgcaactgtgggagctggttaagtactctttgaaaggcagctgtctccagggatgatgttggagcttgaagtacgaactgcagttaagcgagagagtagatgagcgtaatagaagcaggagctggaatctatgaggacggactgaaacctgtgtcagttcttgttgcctctgaccttggttgatgtgggtgtcctacagaagccagacccatttgtaatgtgctaaacgaggctccaaattatatccaaagggaagtgaaacagctggaggcttagccactatcttaaggccaacgagatacgttacagcatgggagagctgcaaagatggctgccacttcctttctgcctgccaactgctcctaatggaaaacataaggcaaaaggaattctgggaactgtagttcggcctacccaagttgacacattacaaagcacctcaatttttcttttcttcctctttttctttatccacctttacccttatttttctagttcatattgtcagaatctttcccagaaagtgtgtgtgaaggtggaactatttattgatcatctattaatgtaaactttctgctagttacatcaataatgggaatacttaggataactcactagtaaaactgttttagttttattaattttaaaatgcttctccattgaaatttctgagacctacgttatgtgcaaataaactttctagtttttcaggactctgcctgagatgacattgaaaccagcatttcaggaaggaatttgattacctccacctgaggaagctctgctagttgtgtggaacgaagactgttcttaacaacccctttccttgatatctacaatacgctccgttctaaatattttaataaagggcacatttgaagtttaaaatgttatcattgtaatcagagcatggagttttataagtcccataaaagggtgcctcctgaactgggagtcaagtttggaaaatataaccatcagaaatttatgctggtagaatacagtcaaggatataagatcatttgtctgagtctagttcctcatgcagccttaagtagacatgttcctcgctgcaagcttgagtggactggaggcggcaagatctggaattaaaccttcccacggtgactgggtcaagtatcaaataatggacaggtgttcaatctggcaggcacaatacagggtccagagggtttggatgaaaattgtgctgtaactgatgtattaattgaagagttctctgaaaaaggtcttccaaaaggaaaaggaaaaaagaattgacagtgtccgtttaatgtgtttgagagcctaatcagcctgatcttggtgggactgtacttgttgtcctattatatcatgcttttcttgtacttttttcagccagtgatctcaggtctcattctcatttcatagctttggtgcagttgtgcaaggtcacaactcttctttcttgctttttttctttttctttttttttgacagggtcttgctctgtcacccaggctgcagtgcagtggcgcgatctcggctcactgcaatctctgcctcctgggttcaagtaattctcctcctcagcctcctgtgtagctggtaccacagacgcccaccaccacacctggataatttttgtagttttagtagaaactaaaaatacatggggttttgccattttggccaggctggtctcgaactcctgacctcaggtgatccacctgcctcagcctcccaaagcgttgggattacaggcgtgagccaccgcacctggccataattttgacctttcctgatgatagttcttccaccatgttatggcagtacatccatggaataatgttactccaagaaaatttggcttttggaattcctccacaaagtattggccctagagtagtccttactgcctgattaacttttgcaagtttctcctgaggtaatgatgctagccaagtttccgaaagacagcatagtctacctttagtagaaaagaggacagattctgagcaggattgcctttgagcccagctatacctcttgttagctgtgtgacctcgtgcaagtcacttaaacctctgtgtctcagtttcgtcatttgtgaaatggagatcattaacagtacctacttatagggctgtgtggctgagtgagttgataaaattaccatgtttagcacatgataagtataccacatgttagctgctgttaatgttatgtccctccagtgaggaaatgaacacaaggctaaattattgcttgaatggggacaaagctaaaggcatacaagaaggaaagataagtttgtatttcaaaatatgtcattttaccacagagatcattattgaattagccgaataatcccatatttttgcttttgaaatttaacattagcagcttgaattctctacaattatgaatgtataatttccacttcttctgtgtgtgtgcaaatcacttcagtctaactggctttttttttccttcttttttccagtaaatcaacaggattacctttcccttaataatcttcaaaatgtccacgtgaaggacaggaagatgtttaatgggaagaccaaacatcgtcagtgctcaagtccagtagataacaaagaacagaaagaaaacaaaactttggtattttactggaatctgagtgaataaatagggaccacaggacaaatggcaaacaactgcttgagttacatcagaaggaaagaagaaatgatgaacccagatttccagtaagaaactgttacacaatacgattaatggagctaacaagtgcctattacacattagaaaatcttctagaggattttaaaacaaaaggaacaacttgtccagagtataatcgatgcttccagttaaatttcacaattttgcacctcagggaatacttttgtttttcttagagagcaaataaactgaccatttcaccttggcaattattaacctgccttgttttttataactaggaaaaatttggcttatctccatattttagttgagatgacatattaattcatatttttgtgggtaaaatgttattacccttaatacaaagcaaagtttcagctggacttcgtttttacttaatcttcaatggaacattattgaagttacagtacaaaaattctctgaatgaacataataataagttgtaaaatatatatatctttataaagatatattattggatctttcacaaaaagtcatacaagtggggaaaaaagaaaaatatcagagtattgggatttgtccttgaatcttctcttttagctttctttcagttaaacctgtgtccacatgtttgtttctggattgaagccagaatcaacattgtccctatttctaatcaaataatggagaaataattacaaattcccaatgcagttacaggatcctgggaagcagagtgtctggatggaacctgagctgggtctctgactcacttctgactttaggcaagttatttaatgtctctgcatttttgacatgcttgtaataatgctaatttatttcacaggtatgatagtaaccaaaactcaggtaacaaccattagcttttgcaagaagtcaggttgactagcaaggagtctgcttctgctacttggagaagagatttagaattatgtatcttttgttacagatatacagatatacaaatatacagatatacaaataaggtatgttagaattacaaatgaggaaaatggaaaattttagagaacttaagatattctcaggaattattctaaagctaatcaaagtaatataatgactttctaaatatgtataattacattttgaaatgctttattgtttatatgctaccagactagggggtgcctttttgattattggattatcttaatggtaatgagatgaacatttcaggacatcaagagacagaggcctgtcaaaaaaatttcattagccctttattttttactaaatctaatgctaagcaatatttatataccttatataatgtatatataatctataatatatacataattatgtataataatgttacgtacatacatatacatatatatacagtgtgcgcaggtaaaattatatgatatataggtgcatcacccagagcattttcaaaacatacttccatttatgcaagagccagaatcaaacattggaataagaaaatttcttttttaagctctaggcgttttttgttgttgtcgtttgtttgttggttttttgagatggagtctcactttgtataatttcctttacattttgaatgaattgcatgggagtttgacgtaaatgataggtttacagtttcagtataaaaaattaaaaataaaatggactatatgacaattttcacttcagaagtcaaaaaacttcagaaacatttttctttattgcatttcttgagggatcaactatatttagctttgtaaggctttcagtgagtatggattcttaagaaaaatacaaaagcacagttatattccattttcagaaagaggaaaaaatttggaaggaaatagcttaaaaggagtctctaagcttgtgtttatgggtacatttttaactcactgacttaggttatagtcctaagcattatagtcctatagcgtttgtgaatgctaacttattaaacatacttcgttcaataactttttccttcctttttatttcttttatatatccttttacaatgcttgcttaaaacataccagttttgaaatgtttgcatgctactaatgtacttctgttttgtaattgtttttaaaaattatatattatttttagaacttttcatttacaaatttaatgtcttcatctttaaatttaatgcagcgtaattaattaaattttttttaaatatagtggggaaggaattagaatttatagcattaaaattatgtaaaataatatagtccaccaaagaacagccatttgataacaattttaattttataataattaaaagttttgatactgcctaaggcaaaaatattataaaagaaatacaactaattgtgcaataaatgaacagaataatttgatacaactttactgtaagccagatgtgcagaagaaataatggtttactataatgaatgatggagaccagaatttcaaagcaagtttcttaatgcttagcatttcttcaatattacagagaatgttggttagaattgcaaaggaggaaaatggaaaattttagagaacttaagatattctcaggaattattctaaagctaatcaaagtaatataatgactttctaaatgtaaataattacattttgaaatgctttattgtttatatgctaccagactagggggtgcctttttgattattggattatcttaatggtagtgagataaacatttcaggacatcaagagacagaggcctgtcaaaaaaatttcattagccctttattttttactaaatctaatgctaagcaatatttatataccttatataatgtatatataatataatctataatatatacatattatgtataataatgttatgttcatacatatacgtatatatacagtgtgcgtaggtaaaattatatgatatataggtgcatcattcagagcattttcaaaacatacttccatttatgcaagagccagaatcaaacattggaatgagaaaatttcttttttaagctctaggtgttttttgttgttgttgtttgtttgtttgttttttgagatggagtctcactctgtcacccaggctggagtgcagtggtgtgatcttggctcactgcaacctctgtctcccaggttcaagcaattctcatgcctcaaccaacacagtagctgggataaaaggtgtgtgccaccacacctggctaatttctttgtatttttagtagggacggggttttgccatgttggccatgctggtctcaaactcctgacccaagtgatctgcctgcctcagcctctcaacgtgctgggattacaggcatgagccaccacgcctggctaagctctaactttttaagctaatttattcacttctgaaataaagtacttgatcccacaaatgcataagaaaactttaatcaaataaaaaaatttttcaacaaataacattaaagcaaagtctagaagatacagacatttcatgatttttaatttttgactcctgaatattatctgggagcggattaaaataatgaaaatttgtttcctgtcacataaaaaaagaggacattatttttactactaatccttagcagtttcatttatcaaggaaaaatcctaatcagtaatctattaaatacattggttattttcagtcagaagaacaatttgagttggagtcacaaataaatggtatttatgtcatgtcgttatgctgatttcccagactagtgtaaatatacttagtgaaagtctcttttatttctttaggcaaacaattttccctctctgagcctctagtgttgatgatatttgactgaatgatgtcacttcctctaattatattttctctgcatgttctagtctcggggaacaaggctatttctaaaatctctttatattttttaaatattttgttttccatctttattttcttttgcttccttataataaaatgtttttgtttcttattttctgtaacatgaaaaatactttatgactgtatgtctgtgactatgcaattgtttatgtttaagaaattgccatttgcataagggcatttatttttttcctttatgctacttgagttttgtgataaattttaaaattagatagttaaagacacaagggtacaaatttaaaaagcaacatagctattataattttgctcaaaaaacatatttattgccaactgaaaacacgagtcaaactaaaaacttattatgagatagctatggtaatgaccttggcccagtgagagagccaactttcaaatatcttaggtattatgttttcaggtatatattttcttttgggattttataaatccaaatgtctcttttaaaaccaaaataagctgttacatattgacatgacatatttgcaaatcacaaaaaagtttatgaaaagcataattcattaagagtagttatttttgttgttgctggaagggtgaagatggagggaatctgataaagacatcttataaattcaacagacacaaaagaatttgatctcccataagcaactgtgaaattacaataacagatcctgggaagttctacaattctaattcaggtttacaagttttcttctcatctattcagtagatattttgtcgagtacctgtgctaggttcagctgtgcccccaaaacatgtacattcctaacttttattacctgtgaatgtgatctcatttgcaaatagggtctttgtacatgtaactgagttaagatgaggtcatactggattagggcagaccctaatccaatgaccgatgtccttatatgaagagggaaattagacacagagacacacagaggaaagacagctatgtgaagatggtatcagagaatagagtgatactgccacaagtcaaaggatgtcaagaattgctggcaaccaccaaatgctagaagagtccagaaaggattttctcttagagcctttgaaggaagtatggccctgttcttcttgattttggacttgtatcctccagaactgtgagataataaactcctgttgttttaggccactcagtttatggtaatttgttatggtggcctcaagaaactagtacagtacctaactatccacctagcattagggcagtatacataatagatgtagccactcacctcttcgtgcttacattgtacagggcggttggagtaggtagacaataaacacatatattataatatttcattatatttggtgataagtgctaaggagaaactgaatccattgtgatagagatatgaagtgtgtgggtgatgttgtttgcgtgtgtctccacccaaatctcatcttgaattgtagttctcgtaatcccacatgttatgggatggacccagtggaaggtaattgaatcatgggggcagctacccccatgctgctgttttcgtgatagtgagttctcctgagatctgatggttttataaggggcttttgcttggctcttccccttcctgccatcatgtgaagaaggacatgtttgcttccccttccaccacgactgtaagtttcctggggcctccccagtcatggcaaactgtgagtcaattaaacctttttcctttataaattacccagtctcaggcagatctttactgggtaaatttataaaatgagaatggactaagacagtaggggacagctgttattttatatgtggtagtcagggaaggtatctctgggaagggaatacctgagcaaagacctgaaggatgtcatggagcaaaccacagagattttcagaagagcattccaggtagagagaacagcaagtgcaatcgccctgagaagtctgtgtatttcagggttttccaaaaatgccaaagaggccaatgtagccagaacaggcaaaaatgatgggaaaagagatgtgttgaggaggtggatgctcacagattatgtaaagctttgtcggtgaatgaccaaatatcccggtttgcccaggaaaggctcagtatagaatgttgtctcattgtaattctaaaaaattgtttggaatcttccattggtagcttgggccagacattagcaatagaggtggtgagaaatgattggatgttgtataaattttgaacgtagagtctttccttaggaaagttactttgcttcactatttgagcttcctttagtaaaaagtaaacataatgtgtcttctaaagacatcgtgagatttcatgtgttgatgatgtattagcaattttgtaaacatattttaaatggcacacattaatgtattaacatgggaggcagcattgatataaaaacaggttcttgccaatttgttctctctctgatcaagtaagctgcaaacagtatattttgaacctatttttttggtattcattgtagtataaatggttataatgattttcaagtgtgttcttcctatctaaacaatatgcattaatttgaaacaatgaaattgccatttttctaagtcagaaatgttcaaacatctgccatttcttatagttcaacataatacagtaagaaaggattaaccaggcaataaagaaagaggttcaggagatttgggagatattcccaggggatatccccagaggctgaatggtcctggagaaatcataagcatccttgtgcttgttttcttattttcactgtgaggctaatgaaataaaataaaatggccaattaaaatttgatagtgttttgatagtgttgttgttgtttgaggtggagtgtcgctctgtcacccaggcttaactacagtgagacaatctcagctcactgcaacctccgcctcccaggttcaagtgattctcatgcttcagcctcccgagtagctgggattacaggtgtgcaccaccacacctggctaatttttgtatttttagtagcgatggagttttatcatgttggccaggctggtcttgaactcctggcctctggcgatcctcccacttcgtcctcccaaagtgctgagattacaggcgtaagccaccacgcccagccaaagttcggcagagtgtttagtgatgcccaaacacaaacacaatatggtttcagatgagtattccttatttttccaatccacgttagacttggggaaatagcccttgtccccttgatgatgggccctttaatgtaagtaatattgcagccttgcagaggtacattctacttgaatggctagctcatttttatataatgccccaggccacgcaggctgcttggcatctttgtggaactacgcttactgtcccatcaagcctgtttagcaattattgtgtgtcattattaaaatattattctcttattgtgaagaaaagatactaaagcatgctgtaggtcagtcattttctagtgacagggattagaggactagaatccattcaatttttaaaactttacctacgaatagttagaaaatatatgcttgaaataatctcattctagtttattgttattgtttattttctaagccttctttacaaatatattttcccactgtaattcagtttaaatggatggtttttacttcttaataaaattattgactattgatttatatctgatacaatcctttgtagtattcaatgctgatgttgaaaaaattcagccacaatgaataaggagtgttcccaaggaccctcagacaaaaaaagaaaaacaaaagaaaacatgaaactacccccaggatcggaatgaaaatgtatttgctcctaacatcagatgtcttcggtttagaatacttatttcaacttgaaattttcttaatttgtagacataatcttgacatctgggaataagagatttaggacactactgcattgcaaatgatgactctttagtgcagtcaatgtttttatcttaaagaaaatgattttacctttcatgacaataataaatgtgacctagaaaagtgttccttaaataattccaagcttattatattaattagcgaatattaattgatagcaaacctaatcatcttttcttctaatttggtcacgacttctgttcctttgcaatcctattctcaccccattttatcttttataaaaatacacagagggtgtctctttttcacattggtaaatgttttaaatatcagaaagttaattttctctatttttaacataagcaaatattttaatataatcaattatatttaatacattacatataaaaacatctactatttctattactgggcctaagattactatttctatcactgggcctaagactactatttctatcactgggcctaagataggtacatactcaatatacaattgaattttaaagaaaaaatatttactaagataaaataaagagtgaaatgccagagttcttataaattgttgctacaaattatatcatatgtttaaaaggataactttaatggaaaaatgggtctagagatacttttttttttttttgagatggagtctcgcactgtcacctgggctggagtgcagtggcgtgatctcggctcactgcaacctccacctcccaggttcaagcaattctcctgcctcagcctcccaatttgctgggattacaggcacccaccaccacacctagctaattttttgtatttttatagagacagggtttcactatgttggccatgctggcctcagtgatccgcccgcctcggcctctcgaagtgctgggattacaggtgtgagccaacacgcccggcccatcttggttattttgttcacagtgttgggtgaaagggttaagtcatgactaattgctatcatatgaatttctgcccagtgttgtaatacagaaatttggtgtttctctttagaccatttgatgtggacagagaatgaaatgtaaaatatgcctctcttcagaaagaagacttacgttgaaagaaataagcagaatagtgtgcctataccttttatacctctcccaggtgcatgaaggaggcttcccaactggtgggattctttggagagcgatcagtcaaggaaaagcctcctttgatggagaatcctccaatgtcagtctctgaagatcttttcggtgaagctctgctgttcctccagcgaggaatcctatgttctttggcctggaaagtggtaggaagagtgtagagccggttgcctggctgcaagagaagaagcctgggaaagcctcaccctttttgaacagggtctctctcctcccctccagcacttctgctgtcatgtcacctggagcatctctgggcaatcttaatagaaagtaaatcttccatattctgaaagggtacgagaagcagcattcacctggctgcacaggatttagatgaggatctgactgttagcccatttgcctctaccttcacttccaagctagcagtgcctccaatccagaatcccctagggtgctacactgtgacttctctcgcttctcatggtgctcctctctactgctgctttgccaattcccctacttctcttctctcctctcctctcctctcctctcctctcttctcctctcatttcgtttctttctagacagggactcactctgtcacccaggctggagtgcattggcacgatctcggctcactgcaacctccatctcccgggttcaagcaattctcctgcctcagcctcccgagtggctgggagtacaggcgcccaccaccacgcctggctaatttttgtatttttagtagagacagggtttcgccatgttgaccaggctggtctcgagctcctgacctcgagtgatctgcccacctcgacctcccaaagtgctgggattacaggcgtgagccaccgcaccaggccccccacatgcctttttatcatctaccaacttgctgacattgcacactagctgttctttccctttctctttgactttgtcagttcgcatcttttaaactttttcttcactcattttctagtgggctttgtgagaaggaaaaaattaaattcatgtgttcaatcaaaccaaaagtccccaactccttcttaactcttaccttcaaaactatacttagcccattgttttccagtaaaagaggaaagtatgtcagtataaacagactgtagtttaaagcaaggaaattacatttttccctctgagaacgattttgcctcctgaggaataattccgtagaagcaacaacagttattggggtcaccacaagaattaaatgctagggataccaaaattagcaaggtgtgacctttgctttcaaaaatcttactctaggcagtggctcacgcctgtaatcccagcactttgggaggccaaggcgggaggatcactcaagcccaggagtttgagaccagcctcacaacatagggagaaaaagacacaagctccataagcagagaccagcgtgcagattttgactacgccacttccttgatgtgtaacattaaataactgattaaaatgctcctgtgcctttccacagcataacacaaacagcacattaggatagcgaaaagaaccagagtccttcctctgtttttgtgatgaaacagattcaattctagttaacactcagtgtcattctgtgtggtgagaggctgggaaagtctgggagaatttcctcggcgactctaagattagggatggcctgcggctgcatccgacttcctggagctactgaagtctgaactctggtctcatgaaaaattcaaggttgatacatttataaaattctttttgttcttgcagttttttcaagggggaacatggcaaaggtgttcagtttcatccttgttaccaccgctctgacaatgggcagggaaatttcggtaagcttcttgggaaaactattgtcatatttataatgcctgcttttatctgaattttctttcattttgcattaaacctatagtgacttgtcattgaaaaaacttaactatgtgggaaaagcaaagaggctggtagaaatactggacacatagtaaagcagcactttaaagcgctttacatttttgcaggggaggccgagatgggtggatcacaaggtcaggagttcgcaaccagcctggccaatatggtgaaaccccatctttactaaaaaaaatacaaaaaattagccgggcgtgatggcacgcatctgtagtcctagctactcgtgaggctgaggcaggagaatcccttgaacccaggaggcggagattgcagtgaactgagatcatgccacttcactccagcctgggcgacagagtgagactccatctcaaaaaaaaaaaaagtgctttacatttttttaaataaaaagtattcataataaataagtaatttttaaaaattcactggagttatttggttggaatattagaaatttgaaactgtccatagtaattaaaattaaccttgagcttttcaatattgaaaagtgtaaaactaaccagattatttgaaagtaattacatcgaacttgtgttgtccttcatttgtgaataaaaaagacaaaacattcattcaaagttcttggagaaagaaaactcctaggttttaaataagcttactaaatatgcgtatgcaatctcataaagattgggcatacttgacctgtgatgtcttcaattattttaaaattgcatagtgcactatgtttaacaatatcacaaccgatcccccactgttgtaaaacaactcaggacccagacaccataaaatgttcttgctgttcattttttagcctatgtgactcaaggtgctaagcaaataactatctcagaagggataaatctgagtgttagggatagagtaacaagaacaaataagaagtaatcctagagaggcctggtgcagtggctcacgcctgtaatcccagcactttgaggggccgaggtgggtggatcgcttgaagccagaagtttgagaccagactgggcaacatggcaaaaccccatctctactaaaaatacaaaaattagctgggtgttatggcacacaacctgtatagtcccagctacttgccaggatgaagcacaagaatcgcttgaaccagagaggcagaggttgcagggagccgagatcgcaccactgcactccagcctgggcaacagagcaagactctgttgaaagaaagagagagagagagagaaggaatcatcctagaaaaatggctgggagaggttctgtgacttggacctagggatgggaagaaaggaaagaaagaaaagaaaagaaggaagggagggagggagggaaggagaaagaaaggaaaagaacaaaagaaaagaaaaagaagaggagaaagaaatcattttagaaaaatggctgggagaggttctgtgacttggacctagggatgggaagaaaggaaagaaaagaaaggaaggaaggaagggagggaaggagggaaggagaaagagaggaaaagaacaaaagaaaagaaaaagaaaagaggagaaagaaatcatcctagaaaagatatctgggagaggttctgagaaaggaaacgtaagggaagaggaagggaaaggggaaggggaaggaaaagggagaaaccatcctagaaaaatggctgggagaggttccatgacttggacctagagatgggagggaggggagatgtactacatatatatatatataaaaaatatatatatattatagactatataaatataaatgtattatatatgcatatgtatttgatataatatatactatataaatccattatgtaattttatatatacgtatattatgtataaatataatatattatataaagtagactataatataataaatacaattatattacattatattatatataaatatatttaatatattatatattatttatatttatatattatataatatctattcatttatattcatatatattcatattatatattttgtaatatatattatatattattattatattgtatattattttatatattatatattattattatattatatattatttaatatattatatattattatatgttatttaatatattatatatgatatatatgatatattatttaatatattatatatgatatatattatatattatttaatatattatatatgatatatattatatattatttaatatattatatatgatatatattatatattatttaatatattatatatgatatatattatatattatttaatatattatatatgatatatattatttaatatattacatatgatatatattatatatttaatatattacatatgatatatattatatatttaatatattacatatgatatatattatatatttaatatattacatatgatatatattatatatttaatatattatatatgatatatattatatattatttaatatattatatatgagatatattatatattatttaatatattatatatgagatatattatatattatttaatatattatatatgatatatattatatattatttaatatattatatatgatatattatatattgtttaatatattatatactatatattatatattgtttaatatattatatattatatatattatatattatttatatgcatatataatatatataatatataatatacattaaatatacatatttaaaagtatttataccagacagccattcaaaaacctcatttattatggagatttacatgccaacagtacaattaacttctataaaccacattactgtttagaaaacacataagcaatgtcatatagagattgagagcacagtccttgaactgaatttgaatcccacctccgcttacccactgggcatcaagactgagccctttcctaccgcatggaattgttatgaggatcaaaggagacaactataaagctcctagcatagcgattccaattattttatattatttgatcttttgagtccaggagttttcgcataagccataatttccaattcttcaaatagtaggcagtattagaacttttcaagccactttctctttggaataatattctgaaatgggaactggagacaaaatggaatcactgatttatccaaatgtttaaaaagcacttgttttccatgaaaatgaggtgcatactcatctcatctcacctgttttgcaggcgctcgaggactgtgcccaggagcagatgcggctcagagcccaggtgcgcctgcttgagacccgggtcaaacagcaacaggtcaagatcaagcagcttttgcaggagaatgaagtccagttccttgataaaggagatgagaatactgtcattgatcttggaagcaagaggcagtatgcaggtcagaatggacttttcttaagtgtttctataacttacattatgcacccatgtacagtgatggtgctagttatttcaggcttttcctatttcagtaacaagcaatatgaagcattatatctattgtaaatgtcttctttcacactttacttttttttttttttttgaggcggagtcttgctctgtcgcccaggcaggagtgcagtggtgcaattttggctcactgcaagctccgtctaccaggttcacaccattctcctgcctcagtctcccgagtagctgggactacaggtgcccaccaccaggcccggctactttttttgtatttttagtagaggcagggtttcaccatgttagccaggatggtctcgatcacctgaccttgtgattcgcctgcctcggcctcccaaagtgctgggattacaggcgtgagccaccgtgcccagccgacactttacttttttctatctctgccagggcatttaatgtgaatgctaaatatctgagaatttatatcatttaataagaaatcaggacaatagattgtttaaatactgatggacacagccaagtgcggtggctcacgcctgtaatcccagcacgttgggaggcctaggtgggcggattacaaggtcaggagatctagaccagcctggccaatatggtgaaaccccatctctactaaaaatacaaaaattagctgggcgtggtggcaggtgcctgtagtcccagctacctgggaggctgaggcaggagaatcacttgaacccaggagtcgcaggttgcagtgagccaagatcgtgccactgcactccagcctgggcaacacaataagactctgtctcaaaaaaaaaaaaaaaatccgtgtacacatggcagattacaattgggaatttttgcatttgagctttgtgtttgtgtatctttccttgttgcatgtatgcagttttcccttctgaaatcctaatgtgcattagggtggcaaataaggtaaaaaataaaggagcagaaaaaggaaaaagaaccagaattactaaggaaaataaaagagtagttttttatatgtatattttctgatttcataatgttcctttcaatgaggtatttctccccagaaactaaatgattttaaactggcaacacattacacacattgctgcacaaatcattattctctatggaaaactgttcacttgaattcctccagaagtaaaaggtatcttttagagtaaacgacgattgtcagaaacaaaaagaatgctagcgaaagcactttgtccatatgtctattctagcactaccatgctacattgtaatttctgtttatgagtctattgaggtcaattaactgggcactctgtgaggtctagaatgatatttaatgtacttttatctccctgttggctattagagtgcctgaaacatagtagatcctcatattcaggaatgaaaggaaggtagttcatagggagaggaatagcaagataagcaaatataaattcggacacctatttgactagaattgaaagactgtagaggtcaaagagttgccaatcttatgggaatagaaacatgtttattttctgcttctaatcatacaagtgtaggatataggagttgtgagagtctatgcttccataaaatgcttcagggcacctggctggctcacactgtagcgcatgagactcttaaaatgctccctttttttctaccaagatccttatctccctctgctcagactcctcgccctgggctcctgcttctcttatggccagcatcttgatccaactgccctccctctggcccttagagatcagaaagaggccagagccagtggtctgcagtagtggggatggctatagcctgaagatggccagtgcctctggagccaagaggaaccagggacagttcgggtaaaaatgggcttgggaagcaaacggactatcgtttaagggatgagcatacagataagtgatcccaaaagaacatacaaagctgatctcaagggcgaggaactcgtagatgccagtggatcatcattactccaaatttcaaaccaagcccaagacttggggtttctatttgaacacattctgagcaggttattggcacagactcaagggtcaatcatggcagggggcagctaatcagatgtttgttcccaggcctctacaaccagtcatgggaagactgaggcttaagtgctgtattagtccgttctcataccgctataacgaaatgaatgaggctgggtcgtttataaagaaaagaggtttaattggctcatggttctgcaggctgtaaaggaagcatagcagcatctgcttctggggaggcctcagggaacttacaatcatggcagacggcaaagcagaagcaggcacatctcacatggtgggaacaggagaaagagagggaggaggtgcgacactgtttcaaaaaccagatctcatgagaactcaccactcactgtagagtaccaagagagatggtgctaaaacattcatgacaactccacccccatgagccaatcgcctcccactaggccttccctcccacactgggaactacaactcaacatgagatttggtggggacacacatccaaatcatatcaagagctgaagatccagtccttgtgttgacactgctggggagcagactttgggaagtaaggggtcaccaaggaataaggcaagaaatcagttacttggaaattacgatgccaaggtcagagcaggattaactgtacaagcaggagttagaagagtcatatagagatgcttcagaaaaaacattataattattataaatataatactgttataataataagacagatgataggaattctagatgactgttttttgatataaaagccaaaaaaatcagaattcagtagattaaaacaatatttttcatatattaattacaagcatgaagaagaaaaaggggaaataaaatataaacacagttcaattgttctttatattttagcatatagggagatagtactggagaggctactaagaacagatactcaataaataaaatatataacataaaaattccaataaagtatagtgttttatatatatataatatggtataaaatatataagaacttgttcacctcaaagtttatgtttttggtgtccttaaattgaaaacaattaaatattcatacatataatctgtagaaatataaatcttttcttcttatttacaagttactttattattactaaattagttattttctgaattctaatttatctgatggtagaaaacacccaattacatacaacctagcaatttgtgcaaacaatgcactaggcacatgattttctacagcatactattaagctgtatctttttttaaagaatttgggtgctagcggattatgaattaaaaggttactgtgtcaaattcacattaactggtggcaagaacaaaaatctggcgtcaccaccgccgttcacttgacaacaccactggctccagcatctccccttcttcaggagcccccagtctgcatgtgagtgtcttgaggcaggttacaaagtggcctaaggtgttgactctggagtttgatttcaaagtccagctgcccatcttgctagctgtggcctttggggacattacataacctctgtgtgtcccatattccccatctgaagaatgagaataagaatgctgtgtatttgttgtaaggattaaaatatattcaaatgagtgaaaatattttggccaggtgccatgaatcatgcctgtaatccctgcactttgagaggccgaggtgggaggaacacttgaggccaggatttcaagaacagcctgggcaacatagtgagactctaacactataaaaaaaaaattgccaggcttggtggtgcatgcatgcaggcccagctactcaggaggctgaggcaggaggattgcagaagtttggggctgcagtgagctgactgtgccactgcactacaacctgcctgggtaacagagtgagacccgtctcaaataaataaataaacaaaataaaatgagttaatatatttaacatcgtagagcaaaagaagtactcagtgaatgccagctatctatggacattattatagccttgttttcaaggaagaaagcctactcactctaccctacaagagtatcgcattctctcaatattaatttaattgcacatttaaaaataacaaagagagcaaaattggattgtttgtaacacaaaggataaatgcttgaagggatggacacctcattttccatgatgtgattattatgcattgcatgcctttatcaaaatatcacatgtaccccaacaaatacatacacctactatgtacccaccttcctttatccttttttttttttccttatgttgcctgggggtgaagatggcggtagcagggccagttctcgcatatcccaacatgctctggggagtggcagctgacctctgttgcttacctctttttgtgtttagaatgtggggtactttgtgcctttggttctcagctttgtgcctcagccaccatcctgagacaagaggaaaaagcccatttggcaggctgtcatgtcactttatgagcttaaacattcagccttccaacatggcttactttctgcatgatcagagaaaggacacacataacccagtttaatacagtgtttgtcaaaacagaaggcaggatgccttggcctctgtctagtattatgtaaatattcaaaattctttttcttttttaaaaaaaaaactcccatgaacacaaagctctttaaccttgcctttcttctacctattctccagggagttgagtgggtcagaacattttgaaaatcatcgttttaaatatcaagttcatattttaaattctacatttttcatactttctgctgttacgatttaagtctcatttcccaaagcaggcttcttaacttgttagctataagcaaattgaactactggtgcttttttgcttttttaatgtttatttatttgttgggggttttgttgttgtgttactgtttatttcagttaaaagcttttcttaagttgtgtttggcattttcttctggggagaaggaaaatttcaaaaacaagaccaaagaaataacaaactcgcagttagcataaaataataacaagtagaaaattttggctgaaacctctatattcactaagttttccagaggcaaatgttatagctaatcacttccatatttgcctggaaaatagtttgatccttgtgagtctttagtattcagctctttggtaggaaatttaatgtaagcaaaaagcttctttccaaatagggctaaaatctgcttactttaataaaagtgttgtactatatacttgactacaagatgtaaactttataacaacattgaactaattttagataatcattttctcattgttttgcttcttgtttaattgccaaaacaggatcctttttataatttagcatgtatatgaacgcatgtgcttctgaatcttgaaaataaatatatgaataaagcctaaatcattacaaaggtaaacatctcaccaaagcaggagtatatggttggtcccaaccatgtgaaggctttataaaatgactaaggttctttcttttcttttctcttctgatgtctatggcctattcacctacttaatgtgcaatatattttatctgtaacaaaacaagagagttgtaaatttggcaatctagtatcaaaacaatgaacatttgtttttaaatctttaaacatctttaaaatatgctacaagaatggaattatccaataagaaaaaaattttttgttaaggaaattaacaaagcgataagggtaaaagtgaaagttgatgatgttatagtatttttattcaaatgtttgtagacggctcttcttgagattgtttatagtgaccactacttcaatcatcctaaaacctagctttctatgcatctgaacaatagagaggtccccatttgccacgttctctaagtctgtacagatcaacctaggtgagacccaatgggtattaatttacatcaccctcaagtggcttaaggaacagacatcaccatttggcagggtgtggtggctcacacctgtcatcctttcactttggaggccgaggcgggcggatggcctgacctcaggagtttgagaccagtctggccaacatggcaaaatccagtctgtactaaaaatacaaaaaaattagccaggtgtgtaggtgcgtggctgtgatcccagctactcaggaggctgaggcaggagaatcgcttgaacccgggaggcggaggttgtagtgagccgaaatagcaccattgcactccagcctgggcgaaagagcaagactctgtctcaaaggaaaagaaagaaagaaagaaagaaagaaagaaagaaagaaagaaagaaagaaagaaagaaagaaagaaagaaagaaagaaagagaaagaaagaaagaaagaaagaaagaaagaaagaaagaaagaaagaaagaaagagatatcactttttggtgacaaaggggtagctacatttgcttcagtgttcaaagaaataccacagcaaaaaagaattaagggatgaaaagaatagcagaagcttgcagtttttagcaaaaacatctaagaatgtatggacttttagaaacttcagtgggttagtaaaaaatctaataaggctaagagattataagattttgacaagattatgggtgcagcacaccaacatggcacacatatacatatgtaacaaacctgcatgttgtgcacatgtaccctagaacttaaagtataataataaagatttttacaagattactattttgggttcattttcagatgtccagaatgatttatcatgctctaagtcaggataacctgtagtaactttggtgttaacatttctgctttcattttagcttcatgggtgagataaattttactattccgtctgataaaactgtaagttccacctaaatatactgttattaacagactactcataacttgttttttttaagattgttttctacaaaactcagaaattagaaactaagctcacacctgtaatcccagccctttgggagtctgtggtgggaggataggattgtttgaagccaggagttcgagaccagcctgggcaatatagtgacacgcccccatttcttaaaaaaaatgtaaaagaaaaaagaagaaagaaacaaaaaactagattcttatttcactccccttttttcctcgatgattatatcaaggattcaggtggcaaattttagcaaaggaaataaaactttcctaatatccactggaagatgtacaagatgcaattttaaaacgctgatttctataccatgtgttatctgtctccagtgatactgagtagtctcattcagaggctccctaaggcggggggagaaaaagacacataatgaatgttacattaccttgttttaaaaacagattgttcagagattttcaatgatgggtataagctcagtggattttacaaaatcaaacctctccagagcccagcagaattttctgtttattgtgacatgtccgatggaggaggatggactgtaattcagagacgatctgatggcagtgaaaactttaacaggtgtgctaattatgatgtaagactttatatgtagcagcaaatgtgagatttataagtcaaatattttgatcatatcctgaagcctattaattagacagaatttcaatctctctaaagaagaatactgaaaatgaattaactaatcaagaaaatattggaggtggtggtagcagggggtgggtggtggtcgctttggtaccacaaatggagtttgctctaatcggcttccactttaccttttttagaggatggaaagactatgaaaatggctttggaaattttgtccaaaaacatggtgaatattggctgggcaataaaaatcttcacttcttgaccactcaaggtaaggtttgaatgatgtcagatttatttgaaatataataaaaacaacactaaaatttttttttaaccaaattataggcaatggaactaattcaataattgctatgatttgcagatggcagtgataacttttgggcaataatcccaaatgtaaaatgtggctgcctaaaattagaaacagaaaaaaaagctagaattgggttgcggggaattgttttcacatatatatttatgagaaatatctaaatatatttatagatatatatacattctatacatagtatatatgtagctatatatagatatatagaatataagtcgctatatgtatctatagatatatatagaatatatatatattctacttctgaaaaggatatataatgtcataattattcctttttgatgccttgagttcctggagattatatatgctgtatcagttacctaatgtcacaataataacgtgtaacaatcctcttccaaagcttagtggcttaaaatcaacaaccatttattacttctcacaaatctgcaggttggctgggtgattttgctgatcagggctgggctctgctgatcatggctgggcttgcttatgagtctgccatcaacttcctcactgaagttgctgctctgggatggaaggattcaacctggctccatagggtctctcatcttccagctagctagcctggacttgtttttgtagcacaggcagggttccacaaaaaagagtggatgtatataagtctcttgagatctaggcccagaattggcatggagtcatttttcttctattggtgaaagcaaatcacaggagcagctcagacttttttttaaaaggaagtaaacaataggaggagctatgaagacatattatgagagagaggtgaacaattgggcaattggtgctatttttccaataaaacactataatatatgaaatgtccatgtttccacatacatctcatctttaatgctgaaattttttcaaagctgcaaccaatttgaaagaagtttcaacctaccacctgtatcctacattaacattttactttgcttgtttttgttacgtatctatccgtttgcccattactcaatccgtccatcaatccatcttttctgtatatatatttcaaagtaaatagcagacatctggatgtctccctatatacttttaaattcttatctttagagtttaatatttgtctaaaatatcattgttttgataacgacttttcccagcttctatctcccatgttcttttgctccaatccattgtcttccctacctctgttgtagtctgagattatcatcagtcccactcaagtctgatcctgaatccttcataaaaggcaactgtaatgcccaaaaaagcatgctaagttacactgcaattgcattaaaaataaacagctgggcatggtggctcatgcctgtaatcccagcactttgggatgctgaggtgggtggaccccttggggccaggatttcgagaccagcctggccaacatggtgaaaccccatctctactaaaaatacaaaaattagccaggcatggtggcacagcactgtaatcccagccacttgggaggctgaggcaggagaattgcttgaacccaagaggcggaggttgcagtgagccaagattgcgccaatccactccagcctgggtgacagagcaagactctgtctcaaataataataataataaagtaattaagataaaacaaaagttcctttgttccatccaagttctggaaagctattggtgtttctatatttatagtagtaggcttatggttataaagttctttgagacactagaatgataaacattagacaggatgagtaatcctagaaaccttatactttctttgtatgtccttcttatgatcagtgctctctaaatttacataacgcttcctttccttcaacatatctattattctagttttaagtgttttatgccagatatataaaatttgccataccaacttctgtttcatttgcacattgatatttatctggtttcttattgaaactatgaaaaccccagagcagtaacccttggctctttctaaatatatgaaattcaaacgtattattttttaagttattatgatgtacatattttcccagaggaactttgccaacaaacctgttccttttcatatatcaacttggtactcaggctggctaatctcgttggagaaaaaacgtgtttttcagttcctgggcccccacccacgtatcccatcaatccagacaatagccagtgtttttgtctctgcattctttaattatgagagcattacggctaatgaattaatgaattacctctgagaatagctttatccccactacataaatctcaactagaagtagtggcaataaaattgatttagaaatggtaaatataatttgtttacttattgaacaaagagacatttcaatgttagccaaaaaattgagtctttatgtctctgttataatagaagttttttttttttgtttttttttttgagacagatttttgcctgttgcccaagctggagtgcagtggcacagccttggctcactaaaaccgctgactcttggctcaagcaattctcatgcctcagcctcctgagtagctgggattataggcgcacaccaccacacccagctaatttttgtatttttagtagagacggtggtctcaccatgctgaccaggatggtctcaaactcctggcttcaagtcatctgcgtgccttagcctcccaaagtgcttgaattacaggtatgaaccaccgcatctcgtctgtaatagaatatttttaaagacagttgacttagcctgccttgctgctcttatacactctacagtcttttctcctgtgacctttactaccttgagagagctccctggggcaaggaaattgtggtgctaaatcaacaagcccaagagaggcccgcatcacctcttaaagggactccagtcttgaggaatccagcattccctgccccaacagccttgagtttgtttataggactccttcaggatgttctcgtcctggtgtgtgcacccttaagcttgaggggaggctaaaaaatggctttttttttttgagacagagtctcactctgtagccaggctggagtgcagtggcgcgatctcggctcactgcaacctctgcctcccggattcaagcaattctcctgcctcagcctcctgagtagctgggattacaggcacgtgccaccatgcccagctaatttttgtatttttaatagagacagggtttcaccatgttggccaggatggtctcgatctcctgaccttgtaatccacccaacttgggtgtgaatagaacttggatatgcagcctgggatgtccacaagtggatccaaagccccttgctataagtgatggagatggggatggaaagagagaagaggccaaccagagatggggcctaggtgataggactattcagggactctctttcccagtgcctccatggtctggcttgaaactccaaggaaagtgaggctctaaattctaacccgaccttacaggtcattgttatatcttatttatcaaagtaggaggatagaacacatgtgatctaataatttgatttataacatttggtgcccctgacaagagttctgtttctgaaaaaggaatagtctttgttatttccaaacaatgggaaaaaaaagattacttgaaggtagcaattattttaatcattttaaaaacataatgctcttatatcgcctagaatttttacagtcattaaagtatatctttaatgtttagagattttttgtcatcatatatcattctttagcatatataaaagataatatgtacccaatacattgtattcttttttttgtttttttgttgttttttgcgacggagtctcgctctgtcgcccaggctggagtgcagtggagcaatctcggctcactgcaagctctgccttctgggttcacgccattctcctgcctcagcctcccaagtagctgggactacaggtgcccgccaccatgcccggctaattttttgtattttttagtagagacggggtttcacagtgttagccaggatggtctctatctcctgacctcgtgatccgcccgcctcggcctcccaaagtgctgggattacaggcgtgagccaccgccccggccccattgcattcttaaaatgctttcacatgtagatatcagttcttcagaaatacctttttactcagagtcattgatgttagtatattttccagtaattatcatcatctctgccattgagaatgttggtggtacagcatttctccagaatgtttccttattgcctctgaaattctcttccaatgacatccactctacatactttgatgctaagagtctcttgatcttatgagccagtatcaaacgaaggttttcggataacaattaggattcatatttcttcctcaaattattcttaaagggtttcctggctgatcttttatgctatcaggaaaataaccaagttcaggcatatgcaggcaatggcaactacattttacaaacctagtggctcagctactagagattacacaatgtcattaatagccaccatttatattcaagatcaacattcttactgaaatcaagaaaaagaggtcaaactattaaaggtaaaacgtcgaccctttcattgttagattgctttaagtaatcacttattttttctgttgttcattattcagtgaattgcactaggttttacctctaagagatctagtagacattttttaaatttaatattgtatccatcattttttttcaaataaattacacgataaaatgttcatgttatatatacaaaggagtcactgtttaatctttgaaaactgattcttggccaagggaaatggtaaaattaaaatagagctgtgaattatttttaaaccgcagtagtccgtgtcatgtcacacatttttaaaaattataattgcttgtttcttttttagaagactacactttaaaaatcgaccttgcagattttgaaaaaaatagccgttatgcacaatataagaatttcaaagttggagatgaaaaggtactacaattttctaagaagtaaaaccgtgaataaatgcttaaaatgtgcaatataaccctggagtcagtggaaataaaaatatacaatagaacctgttcttttgtttatgaaataaacttaattttaaaatggtcatagaggaactccactgacagcagaaatgccctttttctttagaatttctacgagttgaatattggggaatattctggaacagctggagattcccttgcggggaattttcatcctgaggtgcagtggtgggctagtcaccaaagaatgaaattcagcacgtgggacagagatcatgacaactatgaagggaactgcgcagaagaagatcagtctggctggtggtttaacaggtttgatgtcttatgagcatagttgtaatggagttgatgatatctcactgatagacattaattatcaatataatatgtatggtaatgttagtctttatttataatattagtattattaagtaatcattctcattagaattcttcagcaatgaagtcgttttgaggatttgttcattgtgtacattagtaaagtgtaaatgtcatagaaataaattattacttttacaaagatcatttgcaaactgaattatggatgagttataaatagaaggccacaaattcacacaaagaaagagagagcatgtatatatatggagactatttggcatcctaataaccaactagttcttcacctgaccatatcacacaaaagagccaccgttattgctgtaatgcttctgtatagtactacttttcaatcactatggctttcattaattcattgagtctaagcctctcccaatacagaaatttcctttacaataatccagaaacctaattctaccctctgactgaatacattcatgttactttatcagcaaattcattccgtttttgattgtatatagttgcttctttttttactgatacaaaatattttatatatttctggggtacatgggctaatttttgcatttttggtagagatggggttttgccatgttgcccaggcaggtctcgaactcctggcctcatgtgatccacctaccccggcctcccaaagtgttgggcgtgagccaccgcaccctgccgaattcataagttttaaattgcatgtcattctgagcagagattcgcaccattggattctttctgcccaggaggtgggtcacccctctgtctagcgtatccacgctgaaagccctccctgccccaagacacttagtagaagtctgagttatcagatccagtgttggagtttcatagtgctcgtgttcgaatcatgcttatttgatttaataatggtcccaaagcacaagagctgtaatgctgacatattgttatataatcataatcttttattattagttgttgttaatctcttactgtgtctaatttataaattaactttgtcataggtatgtatattataggaaaaaacagagaactactatagatggtttttttccttcctacacccaaaagatttttccccctagcgttctgaaattttacagtgacatacactgtcgtggtcttcttttggtttactgcagtgggtactcagtggttcttttgaatctatatcatgtctttcagtttggtaaattttattttctttatctgctcgttactcacttcgtagctgtttcggttatcagactgaaaaagcatagtatcaatatatagaatttggtattatctgtagtttcaggcatccactaggggtcttagaacgtatcccctgcagataagggagtactactgctgttgtaaaaatagtcatcttttctatattttgcttttttaaaaaaacatttgagtccatttaagatttgatcatttataaaggaactggagtatttccagcagtgtgaaggagagaaacaaatttcactctcctgctttgcaaattgaaggtgatgatggtgttttccttagtggttttcctgttattttaaaaaccgtcttcttcacctgttcctactcctttctttcccccttgttcttctaagtcagcatgacataaaacttaacgtgtaattcatgaagtcatctgcaagcatcaccaatgtttgattttgaaaacaattccatatacagaaataattactaatagtatcctgagatcaaaaccatgtactttatccagctgactggcttctaaggcatctgaatgaaaactaccatgtatattaatgtgggcaaaggaacgatttacctgactttaaagaaatgggttcagggagcacaaagaaaggccattcattaggtggagcctgccacagagcccacattatccttggaatcaaaggggttgataaggctgtgcaattggaaaatcagtaggcattaagggagagaaagtagattgttttagaaacttggtgctacttctaccatgcctactatcagtgagttcgactatcatcttttcttccttcttactgttgctttttttctgtcccatagttcttctaatttacatgaaatgttggcacttcataaatattacccacctataaaatgtttttttccacatagcaaaccaatcactgcgagttgatgtcttttctttgttagtgtagcatttcacgtgagtgttcacagccacttcttcaccaaggaagacccaatcatcccctaacctagtttcaaatccaggctgttctaaaaactaaacgatgctagaaaactggtctcagaatagtgaaggtttcttatgttcatcacagagtcagtttcctaatgggattcaaatgatagaccaaatataaaaatatagttagcagatgtctctagatagacaaatatatgccaaaatatatattctggagactcaatttacagtattttctttttttaacattactttccatgctgttttaaaaacacagtaggctttgacatttgcagacttgacatacatattttcaattaattacgtccatttaagttaggaggacttcgagaacgctcagtaggagtgaatcattaagctgataagtgattcaagccagccactcagcctttacgggtagattatatgcttttttgattcaataatttgggtttttccatagatgttcagaactacctcttgtgaatgttctccttctatcctaattctgacatcttttcattaattttatcaataaagaagtatatggcaattaatttcataacaacacacataaacttattgcatactgttacatgtaaattatacatatcaaggacaaaatttacagactccaaaggaggaaagaaacatttttatattgtcgataacctaaccagcttatctagattggtgcaatatatgtaaaaaattaactcagcaactaggaaaaaatgattattggttgatgggtggcaaaactttaaatggtgatttaggtttgtttgcttacccttgagattgaaataactgataggctagcaatttaaagaaggggacatacggagtttgaattatgaaagctaagtcttagcagcagaggaatgaacgtgtgagtgcaaattatccaggaaagccagtagtagagcaccttgcccacgacttgctttgctgacactcaccttagctcttgttaagtatgaaattaacactgttctgagtcaggaggttgtaaggctggaggttacaaggatgcgtttttgtttgcttgttttaattttttgtttaaagaaaatcaaaaattgaaatgcttatttttcaatgcactgtgagtggcctgggttgtattttcagatttgtaatggcagtaaaactcaccattttaaaatacccatctctgaggccaggcgcagtggctcacacctgttatcccagcagtttggaaggctgaggcaggaggattgcttgagctcaggagttggagaccagccagggcaacacagtgagacactgtctctattattaaaaaaaaattaaaaaataaaaaataaaatacaatagccatctgttgtagaaatttctcagcttttggaaactagtaaatatttacttgtctgaaaaatggcagaattcatagttcaaaaattttgagcatttgtagcaaaataaaagggattctgaacaatatttttccagtctgattgttgttttctttttttttctcccttccactaggtgtcactctgcaaacctgaatggtgtatactacagcggcccctacacggctaaaacagacaatgggattgtctggtacacctggcatgggtggtggtattctctgaaatctgtggttatgaaaattaggccaaatgattttattccaaatgtaatttaattgctgctgttgggctttcgtttctgcaattcagctttgtttaaagtgatttgaaaaatactcattctgaacatatccatgcgcaatcatgataactgttgtgagtagtgcttttcattcttctcacttgcctttgttacttaatgtgctttcagtacagcagatatgcaatattcaccaaataaatgtagactgtgttaatatttattgaa

SEQ ID NO: 261 - DNA, 13187 bp, Homo sapiens
  source 1..13187: mol_type = genomic DNA; note = NC_000011.10:c62921861-62908675 CHRM1 [organism=Homo sapiens] [GeneID=1128] [chromosome=11]
ctcacagcagggaggaagagcagggtgtgtagttgggtgggtgggtgcgtgggcatgtgcaggggggagggcgtgtgtgcgagggaagcaggcatgtgaataccagggcatgtgtgttggggcatggtgcacaggggctgggggctctaaggttgggtggggggaggagcccaaggaaacagtgtgcctttgtgagggtgtgtgtgccgccgggtctgtgcagtgggtgtgggtgtttgtctccctgtatccgccttctctcccgtccgggacttttagccttcctgggctcgccttcctcatgtcctttctcctccctcttggggctcaaattgggtgccctggtgaaggaggggggcacactccagaacctagtccaaccccagacgctgcctgaggcttccctccagctcccctcccttccttttctccctttcctccctccctctctttccctttctccctccccgctaaggctggcgtgccagggggtgggacatgccaatcactggctgtgcctctcccgctgccagcacagggcgcagctccccctgggagccaggtgtttgggtccctggagacgccgcaggcccccagggaggcagtggggctgaggaccctacagacccctcttcagccccgtggtgagtacatttgggagggcttgggaggggctgcactaaggtagagggtaggagggtcctggggagcgggggagggcagggatcaggatgagatggaaatagggatggactcacagagataggaggaggccagggaggggtctagagggcaagggggctctgtagcattgaacactgactgctccaaacactcggcctcctggctttgagtggatatagctgatgtttttctgggcttctgctggcagaggagatggagatccccctcaggaaactggacctgaggcccagaagggattaggctgcctggtagcaagcagaacccccaacaccctaggggcagagtgggaagggcaaagggccaggaagcagcccttgccaccagcatcctgtgggaggttgacccccatcttgatgggggtgccagtcccagaacctcctgtcctccctcagggcaccctgaaacccaccacccccgtccacctcagctcccccaagatggactgaatcaggctgctggccagatagagaagctagaagccaaggtgggtgtcaggccagaagccagcaggagaccaggcaaagagccccagggctctttggggacaaatgggcatgtgggtggccacactagccagggaaggtggccctgacgtgcgcaggggcccagaggaccctccttatgtttctagtatcttgggctcccgcagggtgggtctcagtcctatatccaggcaatgcatggataccaatgggcacccacgccaggtactcaccccagtgcccgcagactgcacaacatggggatgggctaggggccaggaactctgatgcttgtagagttgtcagctcctgggcaggccagctggggagggggtcgtcagctctcattaggtcatccagacatgtgcagcttagaggttatcagagccaatggagaggggttcacatctttgcacaaaacacacctgcagctccacccagactgacccaagacccctgcccaactggctggaaggagtcaggcagtctccagtagccagacagtctcctttctcagggtaatcagctgttcagtgggctgtcagatgagagttctctgccctctgacctcagccaccaggcaagctgcagtcgctatcgcggctgagatatgaaagggaaggagatagtgaaatgggctgcagaagatgtgggtcttggctcgcagctgacagctggcggttggagttctgagaactggattctgaagtgtaatggggagtccaaagtgtcaagaaggggctaaccagaggtcatgtcagacctagaaaggaggctttctattgtatggagggactgaggctgagaaagggaaagggacatgctcatggtcggagaagggatatgtagggatccagctggggctcggaccccttctccgcatcctcagcacaacactgcgctgccgcctccatgagcaggaagatggggtgggagagcagggggcgcagtaagctctgagacgcagaagcttgggctcccagcaggcggggagaggtgggtgaattgcgctgggtttctgctctgctgtggtgccatggtgatgcctacaaggatggaggagggagggagagagaagaaaggaaatgaggaggagagtgcaaggagccaggagcagggggcttgcggagaggaggatgagggacccagaacctctgatgccacactggcagagtgaggtctagggtccagctgctcatgcccaggctctgtcatggtctggccaaagtcaggcaactgcttaagatccatcatgggtgagcaaatttggcagtgattctagggctgatgcttctcttccagctaagcagtgtgtttcatgtagcatttaactgatggctgctgccctccacaagactagttggccctcccaatggcaactgttgagccttaaaaatgtgataaattctgtttactccctcattctcaaagccagacatcaggggtggaagttttgtgcaccttaatgggtcaagagctgctgtcaaagaaaagttaaccccgaggggagagctgcctcgtatgggctggcttctggggtcaggccctagcagaagggatcagtgagtagacctggccagaaggagcgccctcctcattgcatatgtgaggcctcaggtgcccaaccccacagccccctccacatacctcccactccccaatgttatcccctcttcctaaccaggactctaccagcttccaggcccagaatcacaagatggctccgctcctccctcctaaatatcttccccagcatcccctcattccctccctccccttctgtactctttggccagcggtacgttcagaaaagcctggtgttcaggaatccctctccccatttccctttccctgcctcccccagtggttctctccactcccagttgctctcacaagccagatccccagcccctagggattggtcctgggcgctgggagtcaacagtctggcctgctgtaataaaggctctgacctcatcccttaaccctttgagcccaggctaacattctcctctccccagtgacaaatgctttggcacgtccatgtctgtcctggcacctcacttagcttccctgcagccgggtgaggcagggtttccttggtccactttacagacaaggatgctcttggctgtttttctcctatgctctccagccaggcagggcctcactcagggaagcagggacctggcagatgagatgtgggagctcaagggagaagaggggcctctggaccatgctctggacctggtcctgacccccacaggttcaccctcaggctccagggtctgaagttgagtacacacacgtacatttattccacaggtatttattgagcaactactatctgccaagccctgggataaagcattgaatgagacagacgcagcccttaccctgccctttaaagagctccagtagacccaccctcttcccacagcactgttatcacacatcacacagatatacgacagacactgccgcgcacacaaaggaggccagattctgaaagaaggaccgattgctcatcgttaactgattcaaagttgggcttgagtaagctagctgaggtgggcaaggaggctggcaaacccccgcaacccctcaagggcaggagtagggttcaagaggttggtctcggaggcagacggcctggatccaaatcctggttgcatcgctgatgagctgtaaggtccttcaggtcttgaagcctcaggttaggccttttgcaaactggggatagcaggacctacttcacaaggagttgtaacaggtagattagatcgagtttataatgtttatgtatataatgcttagagccatgtctggtatatagtatgcagccagtaaataccagttactataatatgagtaatttttctttgctgctattatgtgtaaggagtattagtgatagtattaaagccttctaacagccttcatcaggaggccacagtcctggagagaagcccctccttgcttcctcactatcttcctgaactccaggtgaaacaccctctgaggatgagtccccacaaagctatggacccacctccaccattcccagccttgctcagcaatgcatataccctcacacacaaacactcatcctaggagttcaccccattccacagaagggccaccaggtcaggacggtcatttacccaaggtcacatagcaagacaagagctggcagctaggcagaggcagtgccaaggactgcctcggggggtcttcctgctgcccactgcaatccccattgacaaactcactgcatatgtgagccccagcccccatggatgccttcacaggacgtgccctgcaaatgcagcttcaagcccccttttcaaccagctggctgtcctaagtccctccttctttagggattctagagctaccactgaaccccataccctaatcctcagcctagggctggtctccccaggggaatctgccacaatcatgggaaaccagattctttcacagccaccatctcactgatcccacaggaaccttggacaggtagaagactgccccacatcgacagttaaggagacttggacaaggtcacacagaagggactagagcacgtctccaggaatcttctcctgagctctttctctgtccaagagagggctgggggtgaggacctctgcttctgatatagaggaaaggcagtcattcattgatgggtctgttcttgtactgcgtcatagggggcagaagatctagacggtggcaagaatcaggttccaattctctggaacctctggtgacttctctacctgccacctgccccaggtgagaggccttagccctcatccgcgtaagtggggcagaggggttttgctgaggtggaaagaacacaggcttggagcccacaggtccgggtcagaatcccacctccaccactgctgtgggaccatcagaaatctactttgcaccctgagcctcaatgcccttacctataatataaagatagagccccccatgggatgtccactgaggtgtcctgtgattaagggaaagaatatatattaagtgcctgccatccaggaggcattaattatggtggttagcaatacgactattaaaatgggagatttggaaggaatttccagacatcaaggcaagggactgccggcttcctcacctccaaggacccctctaggagaggtcctcacctccaaggactccttgagttacttcttctcacaagtcccctgttctgaaagcattttttaattcaccaaagttatagctagccttgtgatgggcaccgtattcgcaatctgagttgatgacatttccagccccaagtgagataatgtaagttgagccttcagccttgcctcagggacttgggttctttctgttcagcaccttgagatgttggcttccggacttagtaaaatctccccagacaccaggcttgtccaactcctccattgcaaatgagcaaactgggaggcagagtagggtcgtgcctggggtctggaggggaagcggcatggtgggaagaggctgggcactggatcaggagaaggagtggagaataacaacagggccgggtgctgtggctcatgcctataatcccagtactttgggaggccgaggcaggtggatcacctgaggtcaggagttcgagaccagccttgccaacatggtgaaaccctgtctctcctaaaaatacaaaaattagctgagtgtagtggcaggagcctataatcccagctactcgggaggctgaggcaggaggatcgcttgaatccagaaggcagaggttgcagtgagctgaaatcacatcactacactccagcctgggtgacagagtgagagtccatctcaaaataataataataataataataacaataaggctttaactttttaactgagtgtctgtttcagtgccaggcactctgaacggtatcatcctcacagctggggatgagggcagcaggggaatgaaaggtcgactggttactgatggtcacacagcaaggaaggctcagcgccaagcttcaaacccaagactgggaactacaaggccaggactagggtgaatcaagcaaggcactcgcttcagagcaaaatttaagagggggacgtaaaaatactcactaaacaagagaaataatatcataataatatttttttaaatcaaatagcaaattccagcccacaggctggctgtctgtctttgtaactaaagttttattggaaccagggtcaggattagggtgaggtgagtgagaaagggctgtgcaagtgcagggtggaccctgtctttatttaacatgttgttcatcttggatttttttgcattaacttccatttttgtaaatattacattaaaatattttcttgaagactaagttttggggcaccccatacatttcgcattggaggcaagtgcctgattttcaccttaccctagtcctagcctgctgaggtataaggagtcaagctttttttttttttttttttttttttttttgagacagggtctcactctgtcacccaggctggagtgcagtggcgtgatcgcggctcactgcaacctctgcctcctgggctcaagtgatcctcctgcctcagcctcccaagtagctgggaccataggtgcccgccaccatgcctggctaatttttatatttttagtagagacagggtttcaccaagttgctgaggctggtcttgaactcatgagctcatgtgatccgtctgcctcaacctcccagagtgctaggattacaggcgtgagccaccacgccaggcctaaggagtcaagctttaaaggctgcaccatgcccaggcagatgagaggcccctgcagcagggcagggtgcagcctctcaggctagcaacctcctcttgtctaactcagcctttgcaggtctttgccaagggcccagggatacagagctgatccaaactaccaggagagtatggcatggggggcagtacccaatctaggagccaggagaccttggactagacaatgccttctactcccttttctctgggcctcagctgctccctgtgagcgatgggcattaaatagcactaagctcagaagatgacagtgacaagaattgcacaaattctcaagggtagtgtctaccagtggcctcactggggaaagccccagcctaatcccagcctccagcccagtggctgattttgtttaagggaaagggtacagcaaaactcagtaatcaagacaaatcatattttaatgtaatatttttagaattcgaattagcaaactatgatccccaggctggccttcggtttttgtaaatgaaatttcactggaacaaactgcttgggctcaaatcctagttcctaccttccttgcatgatctcgtacaaattcccttgcttttctcagtctcagcttccttatctataaaatggagacaataggccaggcgcggtggctcacgcctgtaatcccagcactttgggagcccgaggcaggcagatcacaaggtcaggagatcaagaccatcctggctaacactgtgaaaccccgtctctactaaaaatacaaaaatttagccgggcgtggtggtggcaggcgcctgtagtcccagctactcaggaggctgaggcaggagaatggtgtgaacccggaggcggaggttgcagtgagccgagattgtgccactgcactccagcctgggtgacacagcgagactccatctcaaaaaaaaaaaagaaaaagaaaatggagacaatagctgcagtgagccgagatcgcgcaactgcactccagcctgtatgacagagcgagactccatctcaaaaaaaaaaaatggagacaacagccatcccttgatcctaggctcctgttaagattaaataagattatgcatataaaccctttaacagcaactggcactcagggagctctcaataacaacaatgagcattattattactagttgctattgtcatagtatcagacatttcttttctttttttttttttttttgagacagagtttcactcttgttgcccaggctggagtgcaatggcacaatcttggctcaccacaacctctgcttcctgggttcaagcaattctcctgcctcagcctccagagtagctagggttacagccatgtaccaccacccctggctaattttgtatttttagtagagacagagtttcactatgttggccaggctagtcttgaactcccgacctcaggtgatccacccgcctcggtctcccaaagtgctgggattacaggcgtgagccaccgcacccggccaagaggtagacatttctaggcagcctagcaccctcattgctacacatcctgagagttaaaggagacctactgtttaccatgtgccagggccattctaagcaccttacatgcattgattcatttaatcctcatcacctgaaaagaggtgacagtcttgctaatgggtattatcccatttttcaattaaggaaacctaggcatatagaagttatatcactagcaataatcacacatccagtgaacaggatagactagattcaaatccagatagtctggctccagagtccaggttgcacatgccccctcatgtgcaaactgtcccagacacacaagcacacactgccagccacagtccttgctcattctgtcccccactgaactcgccacgctgtcagtgacttgtacacactgagggttcacggcaaaccatggagatgccctcagccacaaaccacccaggccacctatcacagcagcctgtcacaggccaggtgcccaaggaacaccagggctcagtgggcccttgcctaacatctctcccttggaattttcccaacaatatagcccctggaggccacagctgagggtcaggggaccctcaacctcttcaatggtcagatggatgcctgaggcccagagcaggaagggacccaccaaatcacatggcagcaagcccctggctgagctgcctggacctttacccttccatctggcttcactgtggctgtgggggcctcctgcccagccagcaggttgttaagggccccggcctttctctttacccaggcttagtgcctggagcagattccagatccaagaaaagtctgggggatcttcccatttcccttgcttctcctcactcagctggggcccaggaacagagccaggagagggagggaagcctcccacaccccatgggcccagacccccactgagctaggagctgaggccctcatccctgcttcctgcttttgccccagaccttcttttttttttccttttggttttttttttttttttttgagatggagtcttgctctgttgcccaggctggagtgcagtggcacagtcttgactcactgcaacctccgcctcccaggttcaaacgattctcctgcctcagtctcccaagtagctggggctacagatgcgtgccaccacgcccggctaattttttgtatttttagtagagatggggtttcaccatgttagccaggatggtctcgatctcctgacctcatgatccgcctgcctctgcctcccaaagtgctgggattacaggtgtgagccaccacgccggcctgccccagaccttcttactagcaactgagtgtctgagtccagcacaattttccctgctgccctcatagagaattcaattcagccccaaataccaccccctacatacgtatgtaaacccgcatgcgcagaaaaacgtgcagaaaaaaatacatgcacgcacacacccctaaggcccctctgttcccatctctctctgtttatcttctcaggaactcccctttcttcccatctctccttattagtggaagaatcccactggagcaccacatacccggggagagtgagaatggcttcttttctttctttcctgttttaggacacatttctgttcttgcgggttcttatcatacttactatctctgtcaccatggccaaggcttgcagctgctcagagccacagttccctcacagtgagatgggcataataagagccctttctcctagagacgtacagcagttaaattagataattcatttaggtggttagtactgtgtctggcatgcagtgactactcagtaagtgagggctttaataaagttgagtgaaatgctttgagaatttggcaggactgtatacaaagtgagtttcccaactcctgcaacccgagttatgtaagataggaatttgtagtaatttcccagtaagaaaatggaggcctggagtctgaaaggtaaaactggaatgaagattcaaatccctggatcccaaagccactccacgctgctggcaaatccacttatggctgggaaagtgcatgataaatgaccatgagtgggcaccggtaagggagggtgatgctatctggtctgaagctctgcaagggcaagaattacatccctagcatcttccaataaggtctatcagaaatgtccagtggcccaaccaaagcccatgtcctctcttttcaggtgatgactttcccctgaggaagccctgtagcgtgcctggaggaaggggctctccaaccccagccccacctagccaccatgaacacttcagccccacctgctgtcagccccaacatcaccgtcctggcaccaggaaagggtccctggcaagtggccttcattgggatcaccacgggcctcctgtcgctagccacagtgacaggcaacctgctggtactcatctctttcaaggtcaacacggagctcaagacagtcaataactacttcctgctgagcctggcctgtgctgacctcatcatcggtaccttctccatgaacctctataccacgtacctgctcatgggccactgggctctgggcacgctggcttgtgacctctggctggccctggactatgtggccagcaatgcctccgtcatgaatctgctgctcatcagctttgaccgctacttctccgtgactcggcccctgagctaccgtgccaagcgcacaccccgccgggcagctctgatgatcggcctggcctggctggtttcctttgtgctctgggccccagccatcctcttctggcagtacctggtaggggagcggacagtgctagctgggcagtgctacatccagttcctctcccagcccatcatcacctttggcacagccatggctgccttctacctccctgtcacagtcatgtgcacgctctactggcgcatctaccgggagacagagaaccgagcacgggagctggcagcccttcagggctccgagacgccaggcaaagggggtggcagcagcagcagctcagagaggtctcagccaggggctgagggctcaccagagactcctccaggccgctgctgtcgctgctgccgggcccccaggctgctgcaggcctacagctggaaggaagaagaggaagaggacgaaggctccatggagtccctcacatcctcagagggagaggagcctggctccgaagtggtgatcaagatgccaatggtggaccccgaggcacaggcccccaccaagcagcccccacggagctccccaaatacagtcaagaggccgactaagaaagggcgtgatcgagctggcaagggccagaagccccgtggaaaggagcagctggccaagcggaagaccttctcgctggtcaaggagaagaaggcggctcggaccctgagtgccatcctcctggccttcatcctcacctggacaccgtacaacatcatggtgctggtgtccaccttctgcaaggactgtgttcccgagaccctgtgggagctgggctactggctgtgctacgtcaacagcaccatcaaccccatgtgctacgcactctgcaacaaagccttccgggacacctttcgcctgctgctgctttgccgctgggacaagagacgctggcgcaagatccccaagcgccctggctccgtgcaccgcactccctcccgccaatgctgatagtcccctctcctgcatccctccaccccagtccccgggaaaggccggtgggaagagggcaggggctgcatcctcagccccagggccctgctcaggcctcacctggcttcccaggaccctgggtcaccttcctgggcagcccagagagaccctgccaactttccagacttcgctattcccaggcagggagggaaacccggggaactggtttttctgttccctgctgggtgggaatgcgctcttcaccaggaagaaggcccgggaggaggatccgggctttggactccttgtttgcctttaggcaggaagtcaggagccagcagggcgggccaggagaaagaaggcttaacattaagtattccttggcccagcagcggcccagattgcggtgtgagatggtgccccctggggggcacagccagaaactgaactggccgctgggagaaaagccagatgacagggagctggggaatcccctcgcttcataggcagagcccgcccacctgggccctaggcatactctccaggattgtccacaaatgtcctcagagggtccctaggtgggtcaactccaaggcaaatgtccaagcatcagcaagacaatgacactggaagggtccggcttggctagtcacatatcaagtcccgaggcagcaacaggaccaggagccaggtgtcctgactgtcctacaatatcattttcctgggagtgggagtcaagtgtgcctgctatccagccgcaaatccataccccctgccccagagaagcctcagtccctccctcctggctcacagccaccacctggatggatctgctccatgcagatctagccaggcctcccgcatgctgcctgcctccggccctgccccacacaggcctggcccagccagcaggttctctcctgtgagctccccaatccaacccatgcatggcctcccagccacccggatctccaggcccagcctggccccaaatgttctttcctttcatcctcagcaagtgctgagtctgtgaataaagccacataaccagcgggcactaa

SEQ ID NO: 262 - DNA, 20523 bp, Homo sapiens
  source 1..20523: mol_type = genomic DNA; note = NC_000008.11:c144950880-144930358 ZNF16 [organism=Homo sapiens] [GeneID=7564] [chromosome=8]
gcgggacttccgggggtcagccggcgttggctgagacgtcttcgtgccacggtgctgcctcctttccaagcgcgacccgttgaggttagttccgcgaagctccacgcctgggaccctgcgtctggttgtccctgatgcccccgtggttggggggcccaggggcctctcagggctcagacggggcgggcagcgagctggggaccccgggcgggggcggagccgcgcggggggttgtgggagcgcggggggggcggggcgggggcagctcggcctgggctggaggtcagagcctctgggggctgcctccggtagggggtctccggggagaccccggggtaaggtcgccgcgaggggccgagccaggactccgcccacaggctggtggcgttcccgcctgtcggtgccaccattcgagctcgggcggagcgacggggtgaaggggtggcctgcccttccacacctgtgggatatctcatcaggtgggacgagagactgagaaaagaaataagacaaagtgtagagaaacaacagtgggcccaggagaccggcactcggcacactaaggacctgcaccggcaccggtctctgagttctcttagtttttattgattattattttcattatctcagcaagaggaatgcagtaggagagcagggtgataatagggagaaggtcagcaaaaaaaagcatgtgagcaaaagaatctgtgccataattaagtttaaggggaggtactatgcctggatgggcacgtaggccagatttgtttctctccacccaaacatctcagtggagtaaagaataacaaggcagcattgctgccaacatgtctcacctctcaccatagggcagtttttctcctgtctcagaattgaacaaatgtacaatcgggttttataccgagacattcagttcccaggggcaggcaggagagagtggccttcctctatctcaactgcaagaggcttttctcttttaccaatccacctcaacacagaccctttacgggcgttgggctgggggacggtcaggtctttctcatcccatgaggccatatttcagactatcacatggggacaaatcttggacaatacccggctttccaaggcagaagtccctgtggcttatcgcagagcattgtgcccctggtttattgagactggagaatggcgatgacttttaccaagcatctgcttgtaaacattttgttaacaaggcacatcctgcacagccctagatcccttaaaccttgattccatacaacacatgtttttgtgagctcaaagttgtggcaaagtggctggggcaaagttacaaattaacagcatctcagcaaagcaattgttcaaggtacaggtcaaaatggaatttcttatgtcttccttttctacacagacacagtaacagtctgatctttctttcttttccctacatggggcagcagtgcgatggggtggttcccagcgcatgggagacaagggtgggttcgtggttcctggtgttccatgagaagtcagagatgcactgagcagagctgggggagaaagggggtttcgctcagcctcagatgtcctgcctgggaggcccagtcagtagtggagtcgctctgcgtgtggaggaggtactctgggaagggaggagagtttgggccagttcttccccaagggggaaggtgctgagggatcggccagggcccatcctgtggctgcttgctatgggagggtggtggctggctcttccagttgtgtgactcctaaagagcaggcttagcctctagccaggagactccacttccaagcttgttcaggctgttggccgaatctgtttttcttgaggttggtcctcagaagtgctggctgccagcctgagtgatccttagctctccgaggtccttccatgtggccctcagatctttctcaggcttttaagggctcatttgattagattgggtccaccagggtaattcacgtccataaccttaattccctttgcaaagtcctttttggtatgtagtgtaacataagcacaagttccagggattaggatatggacctgggtgagagggggcatttattctgtgtcctggtaagcaagatcccacacataatgaagtgagaaaaataaggtgtgaagccatagcatagttgggtgtaatttatcattaaaaggcaaacatatgtttatatatttgctgtgtaaacctagattaatctggaacggtacactagaaacaagggaaactgtgtggatgtttggggaatttttcaccataaatcctttttaccttttaaattttgaggtgactatgcccctattcagaaacaatgagaatttaaagtatttttaaataaaatgaactaaataaatattgcagattattacatcaccacttggatggggagaggtttccctcgaggaaactgggcatctgcactgtaagggcaggcagatgcagtcacagagggccttgtcacccccatcgcccatgtctcctccatttctgctgccacgtggtaggcaccttagtgctgtacctgctttgaatctcatctcccaccattcctctgagcaccctgccaagttaatcttgagatattagttttgtctctcctgacacagaaatgtggccagtgtttcaccttcatctggcagccaaggccccttatcattggtccatagtaaccatccctgtgagctctgttcatatctccttgccttctccttgatggtgatctgagtccaggagcaccacccagcccttctttcttccccacatggcctatgggtgacacgtaccatcacgttgactccctgcaccatccttctgccacctttcttcacatcccctttgcagatccccttgaccacaccctcattctcagctggtgctcatgaaggacagaagagtcaatgtcagtacaatgtgagtgaagggctgaggtatgtcagtgctcccagtgggcacccgggcagggtatggtgcatttacacagtgaggggtgggggaatcagtaacatgtgaggagcccgtcatgccgccacgtgggagtgtcctctctcctgctcacagggagtagttaggactggagatgagcccaagtttgtgaatcttaacaagggtgttgatgcctcaagactggacataatcaccaaggaagttggtggcagtgcagaagtgcacactggggtgccaacatgaaatggggaatgagaggctaggagggagtagctggtgcaagtaaagatgggaacacctgctgtgggtgctgccaggatggtgcaactcagatagaactgaccactaggatttggtaggcgttgacacataatgatgacatgtggggctgcagcacaggctgcccctggctgttcaccctttggagctgctgttctcccactctaggtgggtctggcctgcccagcttcagagcattgtgaatgtcagcaacaaggagtgagaagagtggtcacagcaggatacaggcccacagcaggatacaggcccacagcaggatacaggccccacaacaggacacaggcccacagcaggatacaggcccgcagcagggtacaggcccgcagcagggtacaggccccacagcagggtacaggccccacagcaggacacaggccccacagcaggacacaagcccaacagcaggacacaagcccaacagcaggacacaggcccacagcaggacacaggcccacagcagggtacaggcccacagaagggtatggcccacagcagggtacaggccccacagcaggacacaggcccacagcagggtatggcccacagtagggtacaggcccacagcaggacacaggcccaacagcaggacacaggcccaacagcaggatacaggcccacagcaggacacagccccacagcaggacacaggcccacagcaggacacaggcccacagcagggtacaggcccacagaagggtatggcccacagcagggtacaggccccacagcaggacacaggccccacagcaggacacaagcccaacagcaggacacaggcccaacagcaggatacaggcccacagcaggacacagccccacagcaggacacaggcccacagcaggacacaggcccacagcagggtacaggcccacagaagggtatggcccacagcagggtacgggccccacagcaggacacgggcccacagcagggtatggcccacagtagggtacaggcccacagtaggacacaggcccaacagcaggacacaggcccaacagcaggacacaagcccaacagcaggatacagacccacagcaggacacaggcccacagcagggtacaggccccacagcagtacacaggccccacagcaggacacagaccctgtgggggctgccctcctatcatggcaggtctgggcaccatgacccactttaccttagggtcagcatcttgcccctttgtactgtggccctggcttttgagtctgtgtctccatggctgactccctctttttaggtccaagatcaggaaacacagcatcagcccctgagacctggcagcaccaggccctcttcaggtcttgggctgcaggggtggaggaagagaccccggcctgatgggaggatgaatccctagagctagcctgtctgtagactcacctgtgttcttgccggttttcaggtccttgtcatgcccagcctcagaactcgccgtgaggaggcagagatggagctctcagttccaggaccatccccctggacccctgcagcccaggcccgtgtgagagatgctcctgctgtgacccaccctggatctgcagcctgtggtaccccctgctgtagtgatactgagctggaagccatctgccctcactatcagcagccaggtactttaagaacagttctccgctggtgcccttattctggggaagtgatgtccatggaaccctgtgcttacccctaggaggcatctgtgtcatcacaggtagggagggtgacggggtactctgactcaaggagccaaggctggatgtcagcaaggaagttaacctagcctggcccctggcaccttgagcagaactgtgatttccccacttgacacgaagaggtatgacatgatggccaccagcgtcctttgatttgccctatactcctgaccccttcccaattcaacaaccaggctggtggcagccctctcccctcaggactctactctggtccagggctttgtactgtggttacccatacagttggccatctaaagcctaggaagaaaagctgaggagtttcttgtggggaaatagaggcattcaaaagcacccttggcccgggtgtggtggctcatacctataatctgagcactttgagaggccaaggcaggaggattgtatgaggccaggagttcaggaccagccagtataacatggcaagaccctatctctactaaaaaattaagaaaggctgggtgtgatcactctcgcctgtaatcccagcactttgggaggccgaggtgggtggattgcttgaggccaggagttcgagacaagcatggctaacatggtaaaaccctgtctctactaaaagtacaaaaattagccaggtgtggtggcacatacctgtaattccacctacttggaaggctgaagcacaagaattgcttgaacctggtaggcaagggttgcagtgagctaagatcatgccactgcactctagcctgggcaactggagtgaggctctgtctcagaaaaaaatacataaatttgaaaaaaaaaaaagcacctatatattttggggaatccaggaagtcacatgcatgcgcaggactgggtgtgtgctcagaaaagacctgttaagaccataagctttctcaagaactctgtctaatctctaggctcagtgaaggcagtcaactcagaaagagttgtaaacagcgtttaaaaagtaccccaacacagagtcaatccacaaagactgggagaagtgttttgtgttggtttttctcttgataaaatctctgtcaaaacactggttgaacacaagctaaagaaaaagacttcagtgactgtactcgacaaagaatagtctttgcaaaaatagtttggaaaagtcactaaatgaacatgtgactctagtcttcaacaatcaaaaacagcaaagcctggaggggggataccacattttaatattcagttgtgcagtttttaacaaagcaaaaatcatgaagcatataacgaagcaaaaaaatatgtcccattcaaaggaaaaaagtaaactgacaaaaagtgtcctggagaaagcacagacattggacttaagtagacaaaaacttcaaatcaactgcctcaaatatgctcagagaggtgaaagaaaccatagagaactaggctgggcatggtggctcacacctgtaacccagcaccacggtggctcacacctgtaacccagcaccacggtggctcacgcctgtaacccagcaccacggtggctcacgcctgtaacccagcaccacggtggctcacgcctgtaacccagcaccacggtggctcatgcctgtcatcccagcactttgggaggctgaggcaggtggatcacgaggtcaggagatcaagaccatcctggctaacaaggtgaaaccccatctcaactaaaaatacaaaaaattagctgggcatggtggcaggcacctgtagtcccagctactctgaagactgaggcaagagaatggcatgaacccaggaggcggagcttgcagtgagctgagatcacaccactgcactccagcgtgggtgacagagtgagactccgtctcaagaaaaaaaaaaagaaaaaaagaaaaaaaaaaaccatagagaactaaaagaaccaggaaaatgatgtgtgaacaaaatgaaaatatcaataagaaatacaaattgtaaaagaaacatagaaagtctggaactaaaaaatgaaatggaaattttgctagagggtttcagcagtagatttgagcaggcagaaaaatcggcaacttgaagataggataattgaaatcattcagtctgaggagaaaaaagatctaagaaaagtgaacttaatggctgggcgttgtggctcacgcctgtcatcccagcactttgggaggccgaggcaagcagatcacttgaggtcaggagatcgagagaatcttggccaacgtggtgaaaccctgtctctactaaaactacaaaaatcagctaggcgtggtgatgcatgcctgtagtcccagctactctggaggctgaggcaggagaatcgcttgaacccaggaggcggaggttgcattgagccgaaatcgtgccactgtactccagcctgggtaatggagtgagactctgtctcaaaaaaaaaagaaaaaagaaaagtgaacttaatggaccatgagacaccatcaagtagaccaacgtgcatagtagggatgttcaagaaggaaaagaatagagaaggggatggaaaaaatatttgaagaaataatggctgagagtatccccaatgtgatgaaagacatgtctacacacacaagcagttcaacaaactgagtagagtctatttaaagagatccacaccaggtctctttctaatcaaattgttgaaatacaaggaatcttgaaagcagcaagagaggagacctatccctgaacaaggggttctgggtaagatttctagccagtttttcatcagaacccatggaggtcagaaggcagtgggacggcttagttaaactgctaagagggggaaaaaaacctgtcaactaagaattctgttatctggcaaaattattcttcaaaatgaaggagaaattaaaacatatccaggtagataaaagctgaggaagcttgttacaaatagactgccccacaaggaatgcttttaaagggagtcctgaaggttgaaatgaaagaacactagacagggactcaaagccatacaaaaataaagacctccagtaaaagtaactacataggtaagtataaaagttagtatccctatattttggtttctaagtacactttgtattaagttggtgcaaaattaattgtggtttttgccattacatatttcctaagtgatctaaagaacaaatgcataaaaggtctgcattataagtctatgttttttaccccactatgtataaaggtgtaatctgtgatgacaacaacataaggggggtaacatctgtagagaagcagagattttgtgttactgagactaaactggtatcagttgttttaggatgttagaacgttcattgcaatcatcatggtaatcagtaagaaaatatcttaaaaatgggcttgacgcagtggctcacacctgtaatcccagcactttgggaggccaaggcaggcagatcacctgaggtcaggagttcgagaccagcctggccaacatggtgaaaccctgtctctactaaaaatacaaaaattagctgggcatggtggtgggcacctgtaatcccagctactcaggaggctgaagcaggagaattgcttgaacccaggaggcagaggttgaactcaggcagaggcatgagattgtgccactgcattccagcctgggtgacagagcaaaactccacttcaaaaaaaaatcttaaaaatgggccaggcatggtggctcatgcctgtaatcccagcactttgggaggccgaggcgggcagatcacaaggtcaggagattgagaccatcccggctaacacagtgaaaccccgtctctactaaaaatacaaaaaaattagccaggcaaggtggtgggcacctgtagtcccagctacttgggaggctgaggcaggagaatggcgtgaacccgggagacggagcttgcaatgagccaagatcgcgccactgcactccagcctgggagacagagcgagactccctctcaaaaaaaaaaaaaaaaaaatcttaaaaatggacacaagaggccaggcgcggtggctcacgcctgtaatcccagcactttgggggctgaggtgggcagatcatgaggtcaggagattgagaccatcctggccaacacagtgaaaccccatctctactaaaaatacaaaaaattagccgggcacgatggcacccgcctgtagtcccagctacttgggaggctgaggcaggagaatcccttgaacctgggaggcagaggttgcagtaagctgagaccatgccactgcactccagcctgggtgacagcgagactgtctcaaaaaaaaaaaaatggacacaagaagtaaggcaagaattaaaatggtacactacaaaaaaggtaatacctaagaatacagcagtagaggaactgaggaacaaaaaggtaaaagatttatcaaaaataaataaaatggcagaagtccttccttttcagtaattacatgtgaagtctccagtcaaaaggcaaatattgacagaatgtgtaagaaaacatggtccaactatatgccacaagaggctttagattcaaagacacaataagtttaaagtgaaaggtggaaaaatattccatgcagagaataaccaaaagagagttggggtgactataccaatattagacaaaatagatgacaaataaggacagtatgtatttataaaagggcagagtcatcaagaagatatggcaattataagcagatacacatcaaaaaaaagagctccaaactatctgaaacagacatagacagattggaagggagaaatagctctatagtaatagagacttcagtactccactttgaaaaatggatagaacatctagacagaagatcactaaggaactaggggatttgaacagcgttacaacccaactagacctaatggacgaccatcactgtggtctaaatgtcccccccaacccctcccctctccagtcatatcttgaaatctaatctgcagtgtgtcgttattaagaggtggggcctttgggaggtgactgggccatgagagcagagccctgtgaatgggattatctccttataagaggcctgagggagcttgttagcttcttttcttgcccttctaccatgtgaatacacatagaagggaatacctaggaggaaccagctctcatcaggcagtgaatccactggcaccttgatcttgaacttcccagcctccagaactgtgagcaataaatttctgttgtttataaattacccagtctaatgtatcttgttacagtagcccaaatgggctaagacagaagtatataaaatactccattcagaaaagaagatatacattcttctcaagtgtacatgtaacacaaaccatatgttagaccacaaaacaagtctcaataaatttaaaaagattggaattacacaaagtatcttctctgaccagcaacagcggggaaactggaaagtttacaaatgtatagaaataaaacaaccaatggatcaaagatgaaatcagacagttagacaatacctgcagatgaatgaaaacacaacataccaaaacttatgggatgcagtgaaggcaatgtcaaaagggaaatttatagcaataaacacccttgttgaaaaggaagagagaggccaggtgtgattgggaggctgaggtgggtggatcgcttaagcccaggagttcgagaccagcctgggcaacatggttgagaccccatctctactaagaatacagaaaattagctgggcgtggttgcttgtgcttgtagtcctagttacttgggaggctgagataggaagatcacctaagcttaggaagttgaggctgcagtgagctgagatcatgccactgcattccagcctgagcaatgagagtgagaccctgtctcaaaaaaaaaggaaagaaagatataagtcagatttaaaagtataaatcttttaaaggactataaaagaagagcaaataaaatccaaagctagcagcaggaagaaaaaagaaggattagaacagtgttaaatgaaatagagtagaaaatagaatcaacaaaatcaaacgttgcttttgtgaaaagataaagttgataaacctttacttagattgattaaataaaaaagacacaaataactaaaatcagaagtggaagtgggaacattactagtgaccttacaaaaataaaaagagaatattgtgactaattgtacaccaacaaattagataacccagatgaaagggacaaatcaatagaaacacacaaattcctaaaactgactcaagcataggtagaaaatcagaacagacctctaacagagattgagttagtaataaaaactcccaataaaataaagtccaggaccacaatggcttttttttttttttttttttttttttgagacggagtctcgctctgttcctcaggctggagtgcagtggcacaatctgagttcactgtgacctctgcctcctgggttcaagcaattctcctgtctcagcctcctgagtagctgggactacaggcacgtgccactatgcccagctaattttttgtatttttagtagagaccgtgttccccaggctggtctcaaactcctgagctcaggcaatccacccgcctcggcctcccagagtgctaggattacagactgagcaaccgtgcctggcccacaatggatttaaaggtgaatttaatgaattaataccaaaccttcgcaaactcttgcaaaggaggagagaacactttctaattctacaaggtcaactttacactgattccaaagccagataaagatatggcttgaagacaagaaaagaaaattacaaaccaatatcctttatggctagagatataaaactcccaacaaagaaatagaaaactgaatccaatagcatatgaccaagtgggatttaacccaggatataagggtggttcaacataagaaaacctagtgttgtaattcatcacattaatagaacgaaggagaaaaactatgatcatctcaatttatgcaaataaaacatttggcaaaatctaacactttcacagttaaaaaaaaaaagcattcataaaacttgtaatagaagaggacctcctgaacatgataaagggcatttgtgaaaaccctcaagctgacatcatacacagtagtgaagaacaaaactcttcccctaaggtcagtaacaagacaaacatgccactctgcagccttgtattgcaagttctaaccagagcagttagtcaagaaaaagaaataaaagacatccagttgggaaatgaagtaaaattctttttccataagatgtgaatccgtatatatgaaatcccagagaatccacaaaaaagctattagaggtaataaacaaacccagcaaagttgcagcaactgatcaacacacaaaatcagttgtttctgtataccagccatgaacagtgtgaaaaggaaattaaggaaggaattccatatacaatagcatcaatagggaaaattaaaacctaggactaaatttgaccaaggagatttaagacttgtccactgaaaactgcaaaatattgtggaaaggaattaaagaaatcacaaataaatagaaggcatcatgtgttcatgaattggaagacaatattaatcatccaaactacctagagtgttctacagattcaatgccattcctatcaaaattacaatggccattttttgcagaaacaaaagacgatcctcaaattcatatgaagttacaaagagccctgggtagccaaaacaatcatgaaaaataacgtcagaggacttagactttccactttcaaaacttgctacaaagctgcagtaatcaaaacaatgtggtactggcacaaagacatacagactagtggaatcagattgagagtccagaaataaacgcatacatatgtggcaggtggattttcaacaagggtaccaagtcctttcaatcaatgagaaaagatagcccttctgcaaatggtgctgagacaagtagatatccaaatgtaaaagaatgaagttggggccggatgtggtggctcatgcctgtaatcccagcactttgggagtccaaggtgagaggatcgcttgaggccaggagtttgagaccagcatgggcaacatagcaagactctgtctctacaaaaaaatacaaaaaaaaaatagccagttgtgttggtgcctactccaggggtgctgaggcaggaggatcacttgagcccaacagctcaaggctacagtcagctgtgatcaccactgcactccagcttgaatagcaaagcaagaccctgtcccaaaaaatgagtgaaggtgaacccctaccttatgccatatacaaaaattaactccaaatagatcaacaagctaaatataagagctaacaactctaaaattcttagaagaaagtgtaggggtaaatcttcccaatcttggatttggcagtggattcctagatatggcaccaaagcatgagcaacaaaagaaaaaaataaataaattggacttcatcaaaatttaaaacttgaatatcaaaatatattatcaagaacgtgaaaagaagccaggtgtggtggctcagcctgttacccagcattttgggaggccaaggcaggcagatcacctgatgtcaggagtttgagaccagcctggccaatatggcgaaaccccatctctactaaaactacaaaaattagctgggcatggtggcatgtgcccgtagttccagctactctggaggcttttgcttgaacccaggaggcagaggttgcagtgagccaagatcgcaccagtgtactccagcctggatgacagagcaagactctgtctcaaaaaaaaaaaaaaaaaaaaagagagagaaagaaagtgaaaaaagcatcctgcagaatggggggaaatctgcaaatcatattttttataagggtgtagtatgtagaatatataaagaagtcttacttctcaacaacaaaacacaagcaacccaatttaaaaatgggcaaaggctgggcacggtggctcacaactgcaatcccagaactttgggaggccaaggcaggtggatcacttgaggtcaggagtttaagaccatgctggccaacgtgatgaaaccctgtctctactaaaaatacaaaacttagctgggagtggtggcatgcacctgtaatcccagctactcaggaggcggaggttgcattgagccgagatcatgccactgcactccagcctgggtgacagagcaagactctgtctcataaataaataaataaataaataaataaggggcaaagaacttgaataaacatttctccaaagaaaacatatgaatggctaacaagcaaaagaaaagatgcttaacatcattagtcattagagaaatgcaaatcaaaaccataatgagattactatttcacattcattaggatgtctataatcaaaaaaacaaaagataaaagaggatgtggagaaactggtatcctcatacatcgctggctggaatgtaaaatggcataactactctgaaaaataatttggtggttcctcaaaagtttgaacatagtactactcctagatatatactcaagataattgaagacacatactcaaacaagtacatgcatatcatgttcacagcagtagtattcatgatagccaaaaggtacaaacagcccagatgtctgtcaatggatgaatgattaattgtggtgtctacatacaaatgaatataatttagccatgaaaaggaagcactgtacctgctacacgcggataaacctctgagatgtgccgagtgaaagaagccagacacaaaaggtcacatactatataattccatttgtacaaaatatccagaataggtaaattcgtagacacagaatacagattagtggttgccagggcctggagggagaggaagatggggataaactgcttaatgggtaagaggttttactttggagtgatgggaatgttttgaaaatagaggtggtggttgcataacattatagatgtactaaatgccgctgttcgttttagaatgattttatgttatgttaatttcacctcagtaaatgtttaaatcaaatgaaaacaacttgctgtaggagatgaagaagtaaggagcaccccatctgagtgtgagatgcctctggggtttgtccaacacacagcccagccgaggctctgagggaggtcgtggtgcagccactgatgcatcacagccacacgtggcattcacacaagcatggtttatgacttgggtaattatccaagctgttccacaaacctggaggtcactcatcgtaaaagtctttaatcataaagatgtgtttcctcttcacagaaggtgtgttttgttctggaagggctcagagtccttgtccttttttccaattgggtgtcagagtacagtgcaagcaactgtatttgctttcaaatctttttcttcacctttaagcccaaattttactgactttttaaaaagatgttctttggccgggcatggtggctcacacctgtaatcccagcagtctgggaggccgaggcgggtagatcacctgaggtcaggagttcgagaccagcctgaccaacacagagaaaccctgtctctactaaaaatacaacaaaatttagcagggcatggtggcacatccctgtaatcccagctactcgggaggctgaggtaggagaatcacttgaacccaggaggcagaggttgtggtgagctgagatggcaccgttgcactcgagcctgggctataagagccaaactctgtctccaaaaaaaaaatttttcttaaaggaaaataaaattttttattttatatttcctttctgtagaggaactcattttttccccacaattcttatattacagagaagaattacattgaatttaatcagtccaaaaagtgatctctcacccttctcacgtacagaattcacctttagttcctgtctcaataaaagactttgatctatctaaacagtggctcgggctagacaacccgttcctcatggtcgccatctcttcatccacaccagtgacatctcatctcagccagaggtcaccaaatccagctagtgggctggtttttatgtcctgcaagctaagaatgcttttgaggtgttttttaagggttttaaaaacaacaaagaagaccatatgacagagatcatacagccgtaatgtatgtatgatcctcctctctgacccttcacagaagtaccttcctgactcctgtctgtgttgttgccagagccttcttcatccttccttgggtcacttctccacacagccagaagagggcaacggtctcccaagtcagggtcttggcaggggtggaggatgggggacagcgagtcccaggacatctctgtcagggctgaagacttctgttcagacctcacctgtcccagcagcccccattcctcattgctcctgggagcccagcagcatgtagatgccacatttcccagacaccctctggagccagggctggggcttctgacatggagagctgaagctcatgggggacattggggaatcccctgcagcccatgtggagtgtataacagcaggcctgccaaagggcagcagggtggtaaagaaaggcacccacatctgtgtgctggcacgtagggcagctctgtgggagaggagaggcctgatcccagactccaggaagtagggagctgcaagagggtgttctggctgaaagtggcacagcacgatgtgtctgcaccacaggtgtccagtgacccaacatgaagtgtcaccaagagacacgtgggtgcagtgggtagaggggcaagtcccaggagggtcatggtgagagctgggccggtttggatctttgttgacaccacagctccttgggaacagacaattccagactggaggtggaaatggaatgctgttatggcagattctggaagtcccagacagggagaggcagggagggagcagagtggacgccgcaaggtgggaggggcattggaggggcatccttcacacccactcagcactaccgactacagctagaccagaggtcttccactttgggggatgcagtcctgtttcagggagtgatccaggctgtgggtgacagccagggtgggggcaaggaaagtaggtggggtgctggcatttatgatcagggaagggctctccagcaaggcctgtgcaagggaagtgggtagcacgagggccatgtggagagtgctctgggcaaggcagacccaaaggtggacacatctgccctgctcagagtatagcaggagcagaggtagaggtggggtctaggagggccaggaggcactgagaggatgtttgagtgcatgacagtgctgggtctgatgtcaccaggctgtgggcaggaggggaggttgggggccagggaagctgctcagcatccaggtggcagtgtggcctgggatgtcagtttgaatgagagactcgtgacatcttcatttgagtaagggacacagggacatgagggtttctttgttctgcaggtgtgaaaaggggagagggagatgctgaagccttttctggcagacacggagctttgtgtgcatttctgtctgcggaaagatgacgcacattgttacgaggccagaagtcatccgcaaacaccagtcagaattgtgggttttcagaggtacaggtggctttgacaggacacagcagtctctaaagggtcctctgttgaacaggatggaatctgatgttccacacaggtccctgccgcacaggagtggttgaatgatgcctccatgcaactcaacttgccaggccctgagagccagctgggtttcttctctgtgtacaacggggtctctctccacactagtgactcctaagaccaagctcagtgccattagcatgcactgacagaactggagataggctggtaaggctcacacctggcagtgtggacagaaaaaagggtgaaatatgtaacagtgtaaggagtggtgtgagacgtttttctggtacaggtgggagaagtgagaagcacctggatttgggctgcactctgaggtagagctgacaggacttgccagtggtttggtgtgggtgtcgaggaagaggggagtcaagggacagccaggattttggcctgagccagaaggtagaccgcagtaacgtttgctgagatgtggagtcccagggagggtgggtccgtggtcatcaagagctctcactcatctgcagccccatgcagcctaatcacccagtgctcctcccacccctccctgatgccctctgatctggactgccaccccagaggatcccctgctccccttgcctcctccacagttagtgggtgcaactgtgactgtctatgttcctgctcctgctgcagcactgccttccaagtgatattctatttattgtttcagattgtgacaccaggactgaagacaaggagtttcttcacaaggaagacattcatgaagatttggaatcacaggcagaaatatcagaaaactatgctggtgatgtttcccaggtacccgagcttggagatctgtgtgatgatgtatcagaaagagactggggagtccccgaaggcaggaggctgccacagtccctctcccaggagggggacttcacaccagctgccatggggctccttaggggccccttaggggagaaagatctggactgtaatggttttgacagtcgcttcagtctgagcccaaacctgatggcatgtcaggaaatccctacagaagagaggccacatccatatgacatgggtggccagagtttccagcacagtgtggacctaactggtcatgagggggttcccacagctgaaagtccactcatatgtaatgagtgtgggaaaaccttccaaggaaatcctgaccttattcagcgtcaaatagtccacactggggaggcttcctttatgtgtgatgattgtgggaaaaccttcagccagaactcagttcttaaaaaccgtcatcgatctcatatgagtgagaaagcttaccagtgcagcgaatgtgggaaagccttccgagggcactcagacttttctaggcatcagagtcaccacagcagtgagaggccttatatgtgtaatgaatgtggaaaagccttcagccagaactcgagccttaaaaagcaccaaaagtctcacatgagtgagaagccctatgaatgcaatgaatgtgggaaggcttttaggcggagctcaaacctcatccaacatcaaagaatccattctggggagaaaccgtatgtgtgcagtgagtgtgggaaggccttcaggcgaagctcaaacctcatcaaacaccacaggactcacacaggagagaagccttttgagtgtggcgagtgtgggaaagccttcagccagagtgcacacctgaggaagcaccagagggtccacactggagagaagccttatgagtgtaatgattgtggcaagcccttcagtcgggtctccaacctcattaagcaccacagggttcacactggagagaagccctataagtgcagtgactgtgggaaagcatttagtcagagctccagccttattcagcatcggagaattcacactggagaaaagcctcacgtgtgtaatgtatgtggaaaagcctttagttatagctcagtgctccgaaagcaccagatcatccacacgggagagaagccgtacagatgcagtgtctgtgggaaggccttcagccacagctcagccctcattcagcaccagggcgtgcacacaggcgacaagccctacgcctgccacgagtgtgggaagacctttggtcgcagctccaacctcatccttcaccagcgagtccacactggagagaagccctatgaatgtactgaatgtggaaaaaccttcagccagagctcaaccctcattcagcatcagaggattcataatgggctgaagccccatgaatgtaaccagtgtggtaaagccttcaaccgaagctcaaatctcattcaccaccagaaagttcatactggggaaaaaccctacacctgtgttgaatgtggtaagggcttcagccagagctcacacctcattcagcatcagataatccacacgggcgagcgcccctacaaatgcagtgagtgtgggaaagccttcagtcagcgttcggtcctcatccagcaccagaggattcacactggggtgaagccctatgactgtgctgcttgtgggaaagccttcagccagcgatcaaagttgatcaaacaccagttgattcacaccagggaataggctgttgggctggcaggagtgaaaccgagcatagtttcctctccaactcctctttggccattgtctcagcctctgccacttcccagaccgaaagcctggactcagctcactgcctacatccagtggccacatagcctgggaccctcctttgaaacatcctttacaggctcccttctcactgccactgctcttgcctcttgtgatgtcttgggtttgggcttgtttttacagcttgtgaacggactgcacgtttgttacaagggagaagattatggaggctgcatattcatgaatagagtttattattataatgaaaagttaccaaaaaagtaaagtgacgtttggtttgagataaccatagtagtttgtttgattggtaa

SEQ ID NO: 263 - DNA, 90436 bp, Homo sapiens
  source 1..90436: mol_type = genomic DNA; note = NC_000003.12:38165051-38255486 OXSR1 [organism=Homo sapiens] [GeneID=9943] [chromosome=3]
agaggaagtggtaagacgagcgcggtaacggagctcttgaagggctgcagccctaacacggagaagcgcgctaagagcctggaggcgggaccaatttatgactgacgtctacccacacccattgcttttctgattccttctcaaacaaaccaatgaatgcgacgacggagacagcagcgtgccccaggcgctagaagtggctctgccccttctactttgctgccctttggtcgccatgcttagtgtggctactgcctctgtgctacttgaggctctcctacggcttttcgatgccttcgatgaacctctacctaagcacttcttccctttcaccgcgaactcctaccttctcgggtttctagcttgctcactttacatccagccacactggagatggcggccggaggcgggcccgaggtggggcgtgaccagcgcagtgacgtcagcgcgctgcgtgtcggcaggtggaggaagaggggaaagtttggcccgtgcgtggggctggggtggagggcgggacagaggggctgggcccaggcaaagcttctgtcgctgctgctgcggaggccgaggacaggacgtgggctgggccgggcagtgccggactcggaggagcaggaggcgaggtccgccggagctctgagcccccgctgctctgccgcgcggtgaccccgcgccccggcgccgtccgacccgtggctgttccgagacgattggtgggggcgcggcggcggcggcggcggctgttgggggtggggagacgcgcggcgaggagacgagcgaggtcagcgagtttgagggaggaccgcgagccgctgccgccgtcatgtccgaggactcgagcgccctgccctggtccatcaacagggacgattacgagctgcaggaggtgatcggtgagagcaggcgctgcggaggggggaggcgcggcgctgggaggcgggggacacgggaacgtggggagccgcgggagctcggggagcgcagccctcataggaattcgtggggcgcttgtggggctgggggcttgtaggacgcttgtgtcgaggagcgcgtgtgagacgggaagggggttttgaggcgcgcgcctgtgaggtggcgtggggtggggtgaggcttgagggggctcaggagagatttgtgtacaggattctcaaatgtgtggacaggagcggcccatgtgtcttgtagagaaagaaagtgcaggtgtgggacaggcctttccgaggctgtgtgagaaatgggatcttgaagtgggcacagccatcgatttctgggattgtgggatagatagggagctttaagtttttcctccatccgtgctggggcgaactggggatcctccaggtgaagctgcaggaaccgcgctgagcaaccgagacccaacttacgactccttccaactgactttccagtcggggaggtagacattaaataagaagacaaaaagaagtaagaagggctgggcgtggtggctcacgcctgtaatcccaccactttgggaggccgaggcgggcggatcacgaggtcgggggttcgagaccagcctggccaatatggtgaaaccccgtctctactaaaaatacaaaaattagttgggtgtggtggtgcgcgcctgtaatcccagctactcgggaggctgaggcagaagaatccttgaacccgggaggcggagcttgcagtgagctgagatcgcgccactgcactccagcctgggcgacaaaccctgactctgactcaaaaaaaaaaaaaaaaaaaaaaaaatttgaagaggctttggcaagtgccatgaaggagataaacaagatgttctgatagagaataacctggagatctacttagggtgatttcaaggaaaattctttttctgaggcgataacatttcagttgagccctgaagcatgagaagtgaggattaagagcctcgggaagatttttccttacagagggatatagagatgcagtggccttgagtaagggaagagcttgatttgttttaggacctgaaggaaggctggcaaggatagagagggaagggaggagccagatcttagggatcttctcagctttggtacagattttggaattttaagtatcactggaggccctcaaatagtgccttgacgtgatccgataaattgggctggtgtgtgaaaagatttgaagggggtccaggaataccagttggcagagaccaaaacttgcacatagattgtaattctcacagaagcctagggattgggaggaggctggggactggggatgaggggagtatttgttggacaacaataacccagtgaccttggaaatcaaaatgtttagctatacaggctcaatccaacggacatgagcagacacctgtgtattggaggaaggcgaattatctgctttgccagcatcctgccctaaaattagttttataacaaagaccaactgaagacttcctagctgccttgggggtgtcagtgtttatttcactgtgggtttaaaaagaacttcgtgaaataatttttgtttttacttgcctcttgttttaagacaatctgggcttaaagcaatattggttcgtataggaaaaacaaaaacaaaacaaaacaactcggactaaataaagacatcacatctttgcttaagccacttcatgggcctgtgtccttgctacatattgggtctttgacatgtattcgttggttctaaagacagctagttcccggtctggactgattgcttctggttcccccagtcagagtttcatattgaaggaaaggattaaatggaagattccaaaatgatgtcagagaagtaaagaggaggttccctatcatcattttaaaagaagagttttttttttttttttctggtagtgtatccatctttctagggtgaagaggatggttgtagtcattctcaaagcctttgctgttaaggtggcagagaatttcagagttgcaaaggcgctagagatttcgtgatttgttaatttggtgtcctcagacccataggatgtctgtgagtgggcaaaagggagtctctcagtcttctggatagggttagtgttcctcacattcacaaagtggtccatggtttttaaaaggttaggaactccaatgtgatttgaccatctttcatagatttaaaacaactttactgaggtataatttaatataaaattcacccattttaagtgtaacatttagtggtttttagtaaattccctgtgtcgtacaactatcaccataatccagttttagaatatttccatcatccccgtgagatctcttgtgctttcttacgagttaatccctttttccacctccagccttagacaaccacaaatctactttttgtctctatggacttgccttttttggacatttatataaatgggatcatataacatgtggtctttcatgtttggtttcttccacttagcataaatattttttcatttaaaaaaacaattttgagatataatttacgtaccataagatttacctgattaaaatgtacaattcaataatcttttagtaaatttacataattgttcagtcatcaccacaatccaattttagaacatttccatcattccagaaagatgcctcatgtccatttgcagttactccctgttcccacccccagccccaggcaatcacaaatatactttctgtctctatagatttgtcctttctggacattttatgtaaatgtaatcatataatatgtggtcctttgtgtttggcttcttttactttccataatgctttttgaggttcatccatctgccatgtagtacatggttcctttttattggataccagttaatgggcattggattgtttctgctttttggctgtttggaacaaggctgctttgagtattcacatcaagtcaccccatgaatatgtttcatttttcttggatgtatacccaggagtggaattgctgggttatatcacaaattcaactgtttaagaaactgccaaactgattttcaaagtaactgtaccattttatgttcctactagtaattataagagttcttgtttctctaaatttgttgtctttttgcgtgtaaccatcctagtgactatgaagtggtatctcattgtggttttgatttgcattgccctaatgactaatgatgatgaacatcctttcatgtccttatttattagactttcatggatcttctttggtgaaatatctattcaaatcttttgtccacttggactgcccattgggttgtttttttttttgtttgtttgtttgttttgagatggagtcttgctctgttgcccaggctggggtgcagtggtgccatctcggctcactgcaacctctgtctcttgagttcaagcaactctcctgcctcagcctcctgagtagctggggttataggtgcctgccaccatgcccagctaatttttgtgtttttagtaatgatggggtttcaccatattgggcaggctggtctcaaactcctgacctcaggtgatccgcctgcttggcctcccaaagtgctgggattacaggggtgagccactgcgcctggctgttcgttttttttttgagttatagaagtgtgtgtatgtgtgtttgtatgtgtattcattctgggtatgcgtcgttcatctgatatatgatttaatttaaatattttcctgtctgtagttttttttttcttctcattttctttctttttttttgagacagtcttactctgtcacctagggtggagtgcagtgtcatgatcagggctcactccacctcctgggctcaagtgatcctcccacccctgcctcccaggtagctgggactacaggtacatgccaccacgtttggctaatttttgtgttttttgtagaaactgggtttcgccacatttcccaggatggtctcaaattcctgatcgctcaagcgatctgcctgcctcagccttccagagtgctaggattacaggcgtgagccactgcgcttagccttctttaattttattattattatttttttttgagttggagtcttactctgtcgcccaggctggagtgcagtggcatgatcttggctcactgcaacctccgcttcctgggttcaagcaattctcctgtctcagcctcccaagtaggtgggattacacatgcgtgccaccacaccaggctaagtttttgtatttttagtagagactgggtttcaccatgttggccaggctggtctcgaactccttacctcagatgatctgcctgcctcggcctcccaaagtgttggggttacaggtgtgagcccccgcgcctggcctctttcattttcttaatggagtcttttaaagtacaaaagttttgaattttgatgtttatcatttttttcttttattgattttgcttttggtgttgtatctaagaaatctttactaacccaacattgtgaagatttttttttcctgtttttttttaagtgttagttttagctcttgcatttaagcctctgatacatactgagttaatttttgtgtatggtgtgaagtaaggtgaaccaccttgttttacagttgaagacacagagacagaaaggtaacatgactgcttaaagccatgtagctaattagaggcagagccaatactggcatctgtgtctcctgtagcctaattcgggatccttgttcctgtatctacattgattcgttcttggatataaactggaagatgggggtcattgtctcacagattaagggaatgatctcccctgcttttttctgagaagggtctcactctgtcacccaggctggaatgtaatcacagctcactgtctcactgtatgaactcctggctcgagtgatcctcttgcctcgtcctccccagtagctggactacaggcatgtgccaccatgcccgcctcattgttttatttttttgtagagacagggtctcatatgttgtccaggctggtctctacttctgggctcaagtgatcctcccaccttagcctcctaaagtgttggggtttacaggtatgaagcactgtgcctggccaagggaagtatctatccttagagtgaaaaaaatctgatggatgttccacacctgtcacgtccttccagtctgctcctgacagcctctctccattttcccaacagggagaaaaaaaattttttttctttgagctacagcctagtataagtagcaagtttcagtaaagcattgtattcttattctaactttgcttccataccaaaatgtttgttacatagtattttataataagctatagtcttcaaaatgaatctttatgatttcagattacactcaactttttcaggaaacacatgattaaaatctagaaaaaagggtttgggatcatttaaattttgttttcaaaggattgtattctagagaaatcagtgtaatggtgtcatctccatcaaaacacgtacatttatttgaactgtaacatgtttatttgaactgtaatttttttcacatttgcttctcagcagtatactatttatgggattgtttctcacattctgttttgttcttcgtctttctggtaaaatcctacagagaacagaatctcctcttaggaacatattaaaagcctatagattgaaaattcaaaggacttttttttttttttaaagaattgtatcaccttaagcatgctttggcaagatttgaagttctttaagtatgattatgtgtaaaagatgttagtatcattctcacaattaatcattgatctttcagtatttttgagcccttagtcttagattagaatttctgagcatgtgttatactgtatttggcatgtgttgaagcagctgtaaaaatttgggctttggggttagactgacccagattcaaatcctgacattgcctcttactagttatgtgatcttagacaaattatatgattagtttccgtgtcagctttttgtctgtatagtggggagaatagtacctatgtcactggggccgttatatagattgagtgtaattatttgtgggaagtgtttagcttgtataaaatgatagttgttattatctctgacttttttttacccttccccttgtcctcatatttcccaatttttggtattgccatgaaatatgaaatactatgtgatgtgaaagcttgtgacacttaaaatagtttgaatctgtttttaatgcttagtggaacattattgcatttattttattttcgcatctttttttttcttagtccaggcctcattcaggtttagatggatttagggatttatgttggacatcgtagtataactgtaaggaccatcaccatgatattgctaataatacaatatgatggcagagagggctgtgccagttaggttttattgccctgcatcttgaaaagtctcaataagtatttactatttacctcagactagaaaattgaaaacttaatactaggtttaaggtgtgattcacctagctttgacactttgaaggcagtgcaatatatttctattcttgactttcccttctttttattttcattgattgtttactagccacacattttgagtttaaagttgtggttttcaaatacagattccagggccttacctttagcgcctccataaatgtgaaggacttcgtgctttcaatagagtggtgcttaatagtgtatttttccattgattgggagactcagctaaggtgacattttctatgaggccagcattgggccaacaacctcatagtgttgtatcaaataaggcttacatttctctgcatgtggggaaaatggaaataatagtggcttaataaaatcctttttcccccttatataacaagaagactggaggtggcagcctaggtgctgtcaggcacccaggctcctagttttttcatgcgaccacacttagcaggtgactctccttctcatagttggaagatggttgttccacctctagactcatgcttgtgttcttgtccagaagaatatggcaaaaggacaaagacacatgacagctgagttggttctcttttaaaaggctttctttcctagatgccttactcagtgacttccacttctattttactggccagaactgtataatttggtcatttgcaaggcagactgcaaaatgaagctttagctggacacattattacttcaaacaaaataggtcaggattatcttactaaagaaggggaaattgtatgtttgctaagcaactaagaatattggcctcatttttttttaaaatgaaaatagtcaaatagggtattgcaagtaaataatttaacctgatgcatagtaatcagttaataaatgttagctttaatctgaagaggtagttgcctactgattaagagcataatgttgaaactcaggtagttcttatttctaggccctactctgcctaactaactgtatgacctaagttttaccttaattacattgctttacttacattgtcttgtaagaccatgaatacctatcacatggaattattgtaatgattagatgaaaagaagaaatgtaagtaaagaaagtgctcagcatagacttggcacacagaatggatgctcagtgaatgttaatgtacatgatggtaacgatgaaataacacccatgaagactgggctatttctgtgtgtgttctgccccaaacaagattttttttccttgaaaatataccccactatgtgattaattcattcagcaaatatttcttgaactcctgttatgtgccaggcactgttctggatgctggagataaaacaatgaagcaaacacaaaaaatgcctgctttcacagagtttataatctagaaactctaaagaagaaaaagcagggaaaggggttagggactgctaggggtggaggtggggtttcagttttaggtcagggaaaacctcactgagaagatgacagttgaggaaagacctgaagaaggtgaagaagtgaatgatgtggttatctgcaggaagtttgttccaagcagaggacaacaagaacaaaggttctgaagcagaagcatgctaatgtgattaaggaatgctaaggaggtttgagggcagctagagcagagtaaatcagaaggtgaagagacagataggtgaagaggttagaaaggtaaggtggtatggatgcttggtcctgattgtcaggttgtaagttgttgtaggaacttggcttttgctttgagtaagactgaaaatcattgcagggttttgaacagagatttaacgtgacctgactttcgttttaaaactcaggctgcaggctgggcgaggtgcctcacctgtaatcccagcactttgggaggcggaggcaggtggatcacatgaggccaggagtttgagaccagcctggccaacacggtgaaaccccatctctactaaaaatacaaaaattagctgggtttggtggtgcatgtctgtaatcccagctactcgggaggttgaggcatgagaatcgcttgaacccgagtgacagaggttgcagtgagccgagatggcgccactgcactccagcctgggtgacagaatgagacactgtctcaaaaacaaacaaacaaacacctcaggctgcaatatgaagaatagttttataagggcacaagggtggaaggaggttatccaggggagagaagtagtagtggagatggtgagaagtggtcagattctggatatagcatattttttgaagttaggaggatttgctgttggattagatgtgagagaaagggaagataagatgattccaagatttttggctagagcatctggaagaatggagttgccatccgctcagatgggagatcaccagagtgaacaggagagcgagtgatgattcattgcaaaaccatcaggctgcttgaatacttacttgaagcatatggcagtgtctttattttcatctttgtatggagagaatagcatgatttttatgatgatgactattcttacagatgttttgccagttaattttcaacatgactctgacaagagaccttatttagaaaaggggttaacaaaattgtaaattcttatgttttgtgtggttcaggtgacaatactttagtcatctttcaaaacagcctgggctagtgcttttcttcagtgaatgcaaaaccttactaaaatatactttaaaatctttagactataagcctattatagtgatggctgggcacaatttaggagaaaatgtgttcatttgatttgattcatttaattcattttttcctgacaggaatatctacttttacattatctctctcttttttaaaaaatttatttttgaggtggggtctcgctctgttgcccaggctggagtgcagcagtatgatcatggctcacctctgcctcccaggttcaagccatcctcccaccttagcctcccaagtagctgggactacaggcgtgtgccaccacacccggctaatttttgtatttttttgtagagacggggttttactgtgttggccaggctggtctcaaacttgtcagctcaagtgatctgcctgccttggcctcccaaagtgctgagactacaggtgggagccacaatgcccggccctacgttctctctcttaaatttctaagtttagtaaagcggagagaaactgaaattttttcttagtcctgctcatgcttgggcagatccttctctgtctcaagaagtagagttacccagtttgaaagatttaaggagaagtttcatccatattttctgcacattaatttattctgctgtgtgacgtaggctaacgttggttgcagttaaagaactaactaggagaggacagaagaagagtggaagaagtgaggatgtaggatggggcattgaggaggcgtgccaatgtgaagtagtgaaaggctgaattaggatgttttattgcaaattgttttaaattttccatggtgttggtattcagattaggccaatgcttagtcgagggcattagggaagtagctatcacactttgactaaaccattccttttgttctttaaaaaattttttttttctaaaacatcctattatagcagactaaaccattcctaacagataccttttacccgtatgtatgaatatttatactgaagtaacagttttacaaataacttttgtttttgttatgtgcagtgtatactgatattttctatttgatcctatttacatcaagaagaatgatggtaaacccagtaaatggttaaacaactgtattaaggaaccctgctttgaagaagagatgaaatattttttatttgtatctctaatccttctgtattattagattattgcaaaatattggtgaatagttaaaataattatgataaaacttttagatattcttccatatcgtatttacattattaattgctattttctgtgaagtaaatttttttctaatgagagaacgtcattgattattctgaattactgttaaaagtagtgagtttttaccgcattaccataatcttctatgttagaaccttaaaatacttttcaattgctgaagattattttgacatttgttttgggaagataatatgaagatggatgaaagtgactgttagcatagaagaactggagcctgcaaatccctttttatcaatgggtgtgggaaacattagcatcttgtcatttgaccatttgttaaatcacaccagagcataatatcttgctcatgagaagatttgttcattaagtgaatgaatctttgagtgaaagaaagatactttagtatctaaacaattatgattgataatacatatgtttggtgtattgttattagtgaaattgattctgtgtttactgatgactagaaaataataactaaagttaaaatcaaacatttctttatctacatttttaaccccagcatggttttggtttacataggacatgctattaatatatttcaggttttatgtatataagataaatcaatcagtgttagattatccaggggtagaatagctgctttgagaactaatactggttaaaaagaacaccactggatagtacatttgtaaaaatattgcaaagaatcagtgaacacatctgcatattagaagatgtctgttatctgggaccaaaggtaccttgcagaggccatgttatgtctcctgtgacttgagaaatgcctttcttgtagatttgtgaccagcatgattagcttccttctcctattccgtggtgtttccaagagtcagccagtggcctctcactgaaggcaagagaaagcagttaaactttcttcagggcttctatgcagaaataattaagagaggatgggatctgagagggagggaacttaatggcaaacactaccattctgcctctctgtcttacacacataacaaagggagctcagccaagaagcagatcaactgcaaactatttcaatagtagcctgttgaatgatttttatcaagtaataagttaatgttcctaaactgttgtcaaaattgtttatgtacactaggggatgatgttattgaatgctaaatatgttcttttcttttctttttgatttccttcctttcgttctctttctttcttttttgtttttttaggcaaggtctcactctttcacccaggctggagtgcagtggtgtgaacatggctcactgcagcattgacctcctgggcccaagcaatcttcccatctcagcctccccagtagctgggactacaggtgtgcaccaccatgcctggctaatttttttatttttcattttagagacggggtcttgccatgttgcccaggctggtcttgaactcctggccccaaatgatcctcctgcctcagcttcccaaagtgctgagattacacatgtgagccacaacccccagaagtgtgttcttaaatattggattttattttaaattttgcattatgtgagttttgtgccattacttgtttgtttggtttttgagacagagccttgttctgttgcccaggctggagggcagtggtgcaatctcagctcactgcaacctctgcctcccagcttcaagcaattcttgtgtctcggcctcctgagtaacggggattacagatgtgtgcgacgacacccagctaatttttgtattgttttaatagagacagggattcgccatgttggccaggctggtctcgaactccttggctcaagtgacctgcccacctcggcctcccaaagtgctgggattacaggtgtgagccactgtgcccagccccgtgcagagtttttacttagtttgtcagaactgtgatttggatttattcatgttggtgttgtatgtatggttgtatttatccatgttggtgttgcctatggttgtgtttattgagagattttcaaatggatttaaatgtaacaaacaaattctgtcgaattatatagttatatgtgtaaatcatatatgtatattttttattttggagacaagagtcttgctctgtcacccaggcggagtgtggtggggtggtctcggctcactacaacctctgcctcctgggttcaagcgattctcctgcctcagcctcccaagtagctgggactgcaggcctgcatcaccatatccagctatatatatatatatatatttttttttttttttttttttctttttttgtattttttgtagagatgaggtttcaccatgtggccctggctggtctcaaactcctgagctcaagtgatctgcctgccatgacctcctgaagtgctaggtctataggcatgagccaccatacccggcctcatgttaaatttttaatgtttgtagcacattagtattagaaatgtgttggcacacttgaaaggatttttaaataacagctttattttattttcttttacttttgagatggagtctctctctgtcattcaggctggagtgcagtggtgtgatcatggcccactgcagcctcagactcccaggctcaagtgatcctccccacctcaggctctatactaggtgggactacagacgtgcaccaccacacctggcttttttttttttttttttttgagacagggtcctgctttgtcatccaggatggagtgcagtggcatgaccacagctcactgcagcctcaacctcccaggctcaagcgatcctcctacctcacgctccctagtagctgggactacacatgtgtgccataacgcctgggtaaattttgtatttttgtagggacggagtcccactatattgcccaggctgatcttgaactcttgggctcaagcgatccatccaccttggcctcccgaagtgctgggattacagacatgagctcccgccctggcctggctaatttttttatttttcatagacagggtcttgccatgttgcccatgcgggtctcgaattcctggactcaagcagtcctcccgccttggcctcccaaagtgttaggactacaggcgtgagtcattatttctggcctataacagctttattgagatataattcacacaccataaaatttatccttttaaagtgtacaattcagcatacttacagagttgtacaaccatcaccattaattccagaatgttttcataactccaaaagaaacaatgtacaattgtccctcagtatatgtgggggactggttccaggactcccaaattcatgcatactcaagtatacccaaattcatgcatactcaagtcctgcagttagtcctgcaggaccctcattgtgtgaaaagtcagccctccatatatgtgagtttctcatcctgtgaatactgtattttccatctgcatttgattggaaataatcttttttttttttttccccaaaatagaatcttgctctgttgcccaggctggaggaaagtggcgcaatctcagctcactgtaacctccaccttccgggttcaagtgattctcctgcttcaccctcccaagtagcagggactacaggcgtgtgcccccatgcccggctaatttttgtatttttagtagagacagggtttcactatgttggccagatggtgttgatctcctgaccccctgtgatctgcccaccttggcttcccaaagtgttgggattacaggcgtgagccactgtgcccagcctgatttttgtatttttagtagaggcagggtttctccatgttggccagcctggtctcgaactctggtttcaagtgatccaccagcctcagccgcctaaagtgctgggattacaggcgtgaaacactgttcctggcggaaaaaatctttaagtggactcgtgcagttcaagttcacattgttcatgggtcaactgtactcattagctgtactccccatttctccctcttcagaccctggtaaccactaatctactttctgcttcaatggatttttataatcttggtatttcatataactggaatcatactatatacagacttttgtgcctggcatcccttagtatgttttcataatgcaaacagtgtttttaggcatgtgtccgtatttgctccctggctcatgtctgtatagctccaacttttttttttttttttttttttttgagacagagtatcactgtgtctcccaggctggagtgcagtggcgtgttcttggctcactgcaacctctgcctcccaggctcaaatgatctcccacctcagcctcccaagtagctaggactataagtgcacaccaccacgcccagctaattatttttgtattttttgtagagacagggttttgccatgtcgcccaggctggtcttgaacttctggactcaggcgatctgctcaccttggcctcccaaagtgctgggattataggcatgagccactgtgcctggctataactctgactacttccattgtctcatctcctctgactgaccctcctgcttccctctttcacttacgaggtcccttatgattacattgggcccacccagacaatttaggataatcttcccatctcaagatccttaacatctgcaaagtccttttttgccacatatggtaacattcacaggctttggggattaagatgtacatttttgggaggcccgttattctacctaacgcatggattttagatcttttatcattatcccaccattccctaaggctttgttctttttttttttttccctagtctgttttctctctgttgtttagatagagcaaactgttaatcttgtcttcaagttcaccaaatttatcttctgtcatttccactctgctattgagtctgtccagcaaatgttttattttgataattgtatgtttcagttgtataatttccatgtggtactttaaaaagtaagttctacttctttgctgagattttctgttttttatttgtttcaaaagtttttttttttttttttttgagacagagtctcactctgtcacccaggctggagtgcaagggtgcaatctcagctcactgcaacctccgcctcccaggttcaagtcattctcgtgcctcagcctcccgagtagctgggattacaggcacccaccaccacacccagctaatttttgtatttttagtagagatggggttttaaaccatgttggccaagatggtcgcgatctcctgacctcgtgatccgcctgcctcccaaagtgctgggattacaggcgtgagccaccatgcccggcctgtttcaaaagattttgtagtcgtttgtagaagcacttttatgacggctgctttaaaattcttgtcaggtaattccaacatctgatttatcttggtgttggcatcagtacgatcgtgtggtcatcttttttcttttctcattcacgtgtgcttttcctggttcttggtatgacatgtcatttttttttttttattgtaccttggacatttaggttattatgttaggagactttttttgttttatttttctttaatgagacaggttcttgctatgtttcccaggctggtctctaactcctggccttagatgatcctcttgcctcagcctcctgattagctaggattacaggtgcatgccactgcacctggctgagactcttgatcctatttaattcttctcttttaataggtagttaccctatttaagtttagtgtatagctcttgtcctacttttgtgagctgtaatcctatggtaattcagttttcagatctcttggaatgctatttttttctgttttattcttctggcacctctagaactcccgttctatctctgcagctgcctgggctgacctgtggatgtggggccctggctttgctgctgctaagggcagattggcttgacattgccgcacgtgtggggtagacacctggctggcgctgtggagaatctggcctgctactgtttcaggcatagtgtggagaccctgctgatgctggggaggactgggttcaccactgtcctggatggggactggaaaatgtatctctctgctaggtctctgctgagctgcccctttcatagactgttggccagagagagcagagttttctcatttatttatttgtctttatctgccttatccatccatttttggtgttcattccagtttacaagcctctctggtgtccagtctgggatatttgggagataaagggaaaacccagtgaacttactgtggtgttttcttgaagtcttgagatccctaactagtctacctctctcttttctacctttcagagccctcttatgattgtttgttgaattatttttaggctatttagttgtatttggaggagaggagtgaggaaatgtgagcctatgccattgtatcctggaactggaatactagcagtttagatattttttttgcactggtatttattggcagtacatatgaaatggttgaggcttttgttttaactgacactctttagagcatttttctctatctgttatgcgctgtaggaacaagataaggattactcttgtttaaattgtatgggaattagaaatgtcatgtttttatatatccatctacttatttactcttttatgtatttgtttttagggagtggagcaactgctgtagtccaagcagcttattgtgcccctaaaaaggagaaagtggcaatcaaacggataaaccttgagaaatgtcaaactagcatggatgaactcctggtatgcacatcttatacttctgaaatggagagatatactcatatattcacattacaatgggaaataacttgaagtttttgatttgtttctttttaaaaaagtttatgatttcttcattaataaataatattcattgtaaaatttataaagtctggataagtagaaaaaaattagttataatattcttactctgagactaacatttaatatgtaacctttcagagtgaacatttgaatatatttgtatttttatgataatgtagtcagattcttgctcttttcatttaataatttatcatagaactttttctgtgtctgtaaatatggatcagtatcatttacagtgtgtttatagtattctgttgaatagaccacactttattaactatgatatttgctaattactttgtttcctcttttttattgttataaacaatgcttgcttttctattcccttaaaataataccatggaattgtgattcctgggtcaagtggaatatcctttgaaaggctctggccttttaaactttcattctaatgctggatataagacaagagatagaatgacccccaggcagcattagcttcttcaaaggctagggaaaggaagaagaaagggaagtcccaagcaatagctgtaagaatgttctgtgacattaaaatgtaaccatacagggattgtattgtattttttttaggcattgtgctacccagaatagttttaagtatatagtaagtgctcagcaagggaaattagtttttaaaattacttattattgtttcaaaattttcagtttctttggcttaatgaaaataataatacttgctttggataccttttgaggtttttcttgaggctcaaatgatacagtatttgaagactctaaactgccatacaaatgtgaactaatattgttactttattaagtaatttctttaagagcatatacagctagtgctagaaaggtcgggtattagaactggaatgacctgcccatccagaagtttttttcactgtcccaaattgtattttatttctggtggtgtctgtactgagtattagggaataattggaattaaagaaaaagaggtaatggaattatatattgcataatatataattatatatgagatggacgagacaaatgtatttctttaggaattggtaatgtacgagcaggagctgaaggagtgggctgctggaatgatcttgagccatctttggtgagagaatgcatacttcgaaggaaatgctgatcgaaatcttattttaagatcttggattgatacatacaataatactttagagcaccatttggacacttgaactgcagtgatgataaaagaagtcgataaactgcgaactaattctgttaaagaaaaacaaaaatgttaacctacatattaagactagaatttgggaagtccaatatgaagacctataatttgccagttagttaatccataaggatagagtaaaatgaatgaaagtcttattatttactgcttcatgattaagctgaggctcaaagtttaaataacttaagttcacttgatgataatagcaaacatctttcagtgctaggtacttcagtgtactttaacctcacacacatctccatgagctaagtagtagctgttttctagatgaaggaagtaaatcatataataagtgatagagtctggattaaaaatcaggtctttctgacttaagtctattattgtctgcttagtatagtactaacaaaatgattataatcttagttcaaaagtagaaagaacatttcttttttttttttttttttttttttttttttttttttttttttttttttgggtttctttgagatggagtctcgctctgtctcccaggctggaatgcagtggcgcgatctcggctcactctgacctccgcctcccaggttcaagcaattctcctaccattgcttgaacattgatcgcaccattgcattccagcctgggcaacagagtaagactccatctctgaaaaaaaaattgaatacgacttacacatataactatataattcgacagaatttgtcttcattacatttaaatccatttggaaatctctcactaaagcgacacaaagacaaccataggcaacaccaacatggataaatccaaatcacagttataacaaactaagtaaaaactctgcacagggccaggcacagtggcttacgcctgtaatcccaccactttgggaggccaaggcgggtggatcacttgagccaaggagtttgagaccagcttggccaacatggcaaaaccctgtctctattaaaacaatcaaaaattagttgaatgtggtggtgcacgcctgtaattccagttactcaggaggccaaggcacaagaatcacttgaacctgggaggcagaggttgcagtgggccaagattgtgccactgcactccagcttgggtgacagagcaagactctgtctcaaaaaacaaacaagaaacggcacaaaacttatataatgcaagatttaaaataaaatccaatatttaagaacctgctgctaggggtggttgctcacgcctgtaatcccaccactttgggaggctgaggcaggaggatcacttgaggctaggagttcgaggttagccggggcaacgtggtgagaccccatctctaaaatgaaaaataaaaaattagcttggcatggtggtatgcacctgttattgcagctacttgggaggctgaggtggcaagattgcttgagcccaggatgttgatgctgcagtgagtcacgttcatgccactgcatgccagcctgggtgacacagagtgaggccctgtctcaaaaaaaaaaaaaaaaaaaaaaaaaaaaaaagtcatgtgaaagaaaggggaggaagagagcttctaattgtgaaaatggaggactttgtggaaatgtttgtggcctgggccaccagggctgtgtagactttaaacaggcatagatagcaagtctgcttggcaggggtttaaaatcaggaaagaatagtagacagcctagaaaccataaagaagaaataataagtgaaaaaattaggattttatttgataggaaatattgattagctacagaaatagaggcaagtgtctttgaagattttttttttaaagggaaatgacttcattagaactgagttttaggaagtttagttttataatactttttaaaacataacagctttattgatataaaattcatgtatcataaatctaccctttaaaaatatataatgctatggtttttagtttattcgcaaagttgtgcaaccatcaccactatcaccccaaaaagaaactccatacccatgaccactcattctttattctttcctcccctcagccctaggcaatcactaatctactgtctgtctgcatagatttgcctattctggacatttcatataaataggttcatacaatatgtggccttttgtgtctggctttcatttagcatgtttccaaagttcatccatattgtagcatgtatcagttcttttttccttttttattggtgaataacagtccattatatagatataccacatattgtttgtcctttcatcagttgttgggcatttgggctgtttctacttcttggcttttatcagtaatattgtgatgaacatctgtgtgcaagtcttcatatgtacatttgtgttttattatcttgagtatatacctaagagtggaattgctgggtaatatggtaactctgtgtttaactttttgaaaaactgccaagctattttccaaagtagccgtaccattttacattcccaccagcaatatatgagcttttcagtttctctatatcctcaccaatacttgttattgttcatctttttttgtcatagccatcctagtagattagttctgtaatatttggcaaagtgaattgcaaaggagtaagacatcagtggcaaagagactagttggtaggctttgctgtggtctagaccaacaactttataaaactttgaaaataagaccctcactaagagagatacattctatcattacctggtatttaaagatatatattcataaatattataactgaaacattttcatattatatagaatatactctcattttctatcctatttattcatctttttaaaatacaatccactaaatttatttcatgacccacatagattacaacacatagtttgaggtacactgtgctatacagagatatcgagactctaaattcaggcagtgatggtggtaatggaaaggaaaacacagatttcctggatggaaaatacattagtagtagaatgagcactcagttaaggcagagactttattttgtttatcctatatgaatgaatgaataaattaacattatttgggtgtgtgaaatggaggaaaactgactacatttagggaattagaaaaccagaaagtaatggtagaaatgatggtgagtgagtttcacgaaggaataaaaagttaccattagaaaaaaaaggcttcagaaagcttgaggtggagaactaaatagttcaaacaaaaaatctggctctagcagacaataaaagattttcaagaaagcagtttcattagaaggggtggaattcactttatttatttattttattaatttattttttaaatagaggcggagtctcactctgttgcccaggctggtctcaaactcctgggcttaagggatcctcctacctcggcctcccaaagtgctgggattataggtgtgagccactgtacctggcctataaaggaattcactttataggtggttgaggaagctgctgggtaatttaagtcagtattcatataccactcttgtgaatcatttatatatttatttttctttttgaaaggaggaaaggataactctactggtagttaaggtacaagaagattcccccttccccctttaaaggaatagaaggcaagaaaaagaatatttaagccccttttcatctttggattttgtgtttttttgatagtcttttgctagaaaaccctttgtagtactccccttttcagattaaagctcaaaacccttagcttaacatttaagaccttccacaatttgaccctaactctttacattgtcactctctcatgtgatttttctttccttcaccttccctatcagttagtcaccaaatcctattgtttgtacctctctattattatctcgactcttcccttttcattcatactgtcactaacttttttaaccttttcttttgaaatagcttaaaacttacagaagaattgcaaaagtagtacagagtttccttatgctatccacccaacttgcgctaatattaatataactgtagtacagtaatcagaactgataaattagctgtttatcatttctccatcatctctcactcacatggtggcaacagcttaaacagaagctttgtctccagtcttgtcttcttcattgattttctatgtggtatccaagggtaatttatgaaaatgtataatatagttaaacctttgatatctttccgttgctgttaggatgaagcctgatttttaaatatactttcaaagtcctttatgatctagtcccaggtaattaaacaatcaacaatcttaaaaacctacttacctttcctgttgcagtgttaatgcaggaaacttccaagccttccatgttatgactcctattttttaatgtgcctctccaatgaaatcatgtagtgtctagtacttcccctgtcaagctgtttattattctgtattgtaaagtagtatttgtctaacttctttaccaaactgtaagtttcatgaggactccccatgttgatcgagtacctagcactatacctggcacgtagtagggattatagtaggtgcttagtattgttaatatgtgttgaaaacatgaacttcttatcctagacagatttactcattggatgtcttaggtatgtcatcatttatgaaaatcatatgtacctatcatcttgtactgttatttctccctatcctatagaattaaacatggttcccacctattctgtaaaggctttttttgatcacacttgcctaccttaattgttctttcctatagattcttataacatttatctttttttccttcatgctgtttctcagcagaatcatcttgcaacattaacatctttactactcatttggtacctatatgctctcttatctgtttcctcttatgtgtacttacctttccttgaaattctgtataactatgttagtagcaaggtgcttactttagttctttcttccttttctttcatatttacttagcttttagtacagaagaccgtgctggtgactttggggttgcaagatatgtatggcaagatccttgccataaaggaagttgcattcaagtaaagatgatgagaaattgaaagttagcatttattgagtactccttatcagtcagggattatggacgactttcacacagttgatcttattgaacaaatcccaagggcatagggcaggtacattaataggtgaaaagccttataaagtgctgtagtatttcattcattcaacaaatatttattgaaggtgtactctgtgccaggcacaatgatatgtgctaagaacagttttagttctcactgagcttacagttttgtgggggatgtcaaaagaaataggcaattatagtatagtcagataagttccacagtgattgagaatctacttttgagtacttgccttcatggagctctcagcctagaagggagagacagacagataagcacacaatgtactatccagtattttatgtaccatgatgggaggagacatacagggtgcttggaagctaagagaaggagcatctaactaaacctgggaagctgggaggaaattttgtctagactgagatcagaaggaagaattggagttagctaagcagagatgataggggaagtgtatttgaggctgaggcacaatagggttaaatgtccagagttaaaagaaggtaaacagggccctgatcacacatggctttataaggcattttgtcataccaaatctagtttaaaatcataagctgagatagagtaagcttagatttttggctcagatttctactctggatttagtttttgacgttgtcctgtttcagtttgtttctctttagtgtgagaattatttcacaaaaatggaatgaagtaatattttgcaaagaaaaaaaaatccctacacaaactataaaaaaaccctgtttattagttaatatcttttatagctataaaaccagatttcccaagatggttcttcaagggcaccttgaagcaaaaatatatgtcccaaaggaggcctcctggagtgttgtgccagggtgtgttaaatagtgtgcttctagtttgaaagattactagtgtaatgagtgaaggaaattgagtcagaatggactgagggagacaaagtggttttattggtttaacccttcttgaagaaatcagagccatggagatcccagaaaggtgtgacacagtcttgagatttcaaaatctggatttgctaactcacaacatttgttttaggcttgcatataatgaattattatgttttctcttctttgtagaaagaaattcaagccatgagtcaatgccatcatcctaatattgtatcttactacacatcttttgtggtaaaagatgagctgtggcttgtcatgaagctgctaagtggaggtgagtagagtacaaggaaatgctataagtaccatggtttgaaaagttagtaaaagtttccttcttttctatcctgatttcgttttcatggacatttgcatttgaggagatactgaaaatatagtatttgctgaagatgctaatctatgagccaagacagttttcacacattgcatttgattcattttgttgtcatgctgcttaaatctctcttaattctttttagagactgtctggctctgtcacccaggctggagtgcagtggtgcaatcatagctcactgcagcctcaaaactcctgggttcaagtgatcctcccatctcagcctcccaagtagctgagactacaggcatgtaccaccatgctcagttacttttatcatttaatttaatataattttttttttttggagatggggtctcactatgttgcccaggttcatgtcttaactcctgtcttcaagcgatccttcctacttggcctcccaaagtgctgggattacaggtgtgagccattgtgcctggtctaaatctctcttaatttaggatgcttccttcttgcttcctcccttccatgatgtaaacttactgaagagtctagtccagttatcttgtagaatatgccatattctggatttatctaagtatttcttcttggtggtatttaacttgatctgtagtcctctatttcttgtatattgaaaattagatctaaaggcttgattaaattcaggttaaatattttgtaggaggatacttcttggtgatgctgtgtatttcatattgtattacatcaggaaatatttgctatctggttgaatctttaatagtgatgttagttttgtttgcttaagattaggacagccagggctctccatggaaaaggtaacatttccccctttgtagctagcaagtaatcttactttgtaagtatccagttctccataagtcttttatcttaatgattttcacattcgttgtttgaatccttgtttgagtcagttatttcatcaggggttgtaaaacggtgatttttcttacggcatcatttcttttatatttataaactgacatccttctatgaagaacttttcgttatcaactgggacgctgattaatctgtactctagttcctactgaaaaggcaagataaataatggagtcttttttaaggatcaagttttagtgtaaaatgttggtttagtaatcatctccagtggtagcaactgagagggtttaaaaattttcctttttccagttgggtagggccttcactttttcaagtattattatagacccaaggatttttatgtattcagtgtctttccatcagttatactctattctttttgatatgcaggttgtccaaaatttgtcagggggagcccttttaaagtcactcttgtgtcctcttgacgtgaacccatcagtctttcattacatccttaactttataattcaagattcccgagggttatatttgtattcattttcccagaccctgaatcagccaatactctaatgagctttggtattttttcctcgggaatggtacttagaaagcataacttggatgcttggagtgctcattactacttcattgcttccagagcttggaaatatattaaaaataaaattataatttgacatcaatacaagtttccaatacaagtttaatatcatggactttttaagcttgaatctcttttcctttacacacaaaatcttggtacgcaatattaacataattacttaagtgctttatcttgcagtatatatacaagtatttctactttattcttagaataaaatataaatattgctgattgcaaactgtgaaaccttggcatgtatagatcgaacattttgttttggttacccaaaagctcatgccatttggtaaattagtcattttgccaaggcatggatttgaatcacatggcaagactttgtaggactagttagtgatggagccacactggccttcctatcactgtgctggttggtttttgcttgcatgtgtattttgtgggggagtatgatttttcatcttagaatgtagagttacagaaaagataatccacatttgtttagtttgcagttttattgctgtatctcactgaacaccatacttccccagagagactataaacaacataaggctttagaattaaatttcagtttttctacttagcaattgtatgtcattgggaaaactctttcagctctttgaaactttttacttgtctgttaaatgtggggttacctttctgcatttcagggtattgatgaggagtaaatgagatgatacatgtaaatcatccaccactgtgctgacatttaataggtgcacaagaaattttagtcattaatagtaataagcccttgttatttgatgcttttcagtgtagccagaatcacctttttgtttcaatcccattagtgacacactggagaaactggattgctttgttaaaggccctgttcatatgatggttggaagctttgctaacaccaaccacctttcaagatggtggtcaagcatggttctttcagtatggagagatatgggagtattaggtaatactgtatctttcgttattgatcacctatagcataattttctttatttgtaatttacgagaatatgtaatacaacatttttaatgttttgcaaaaaagtcctctgatgaatgggaataaattgtctgcttaattctctcgtccatatctgtatgccagcctatgctttctgctactcctaagcagaacgacttttttttttttttttttaagaattcctgttcctctctcagtgagtatatgtcttgatcatagaaggggcaggacatgtagatggatggaatgtcttttaaatgtagctctttgtccctcttggtcttaagttttctgggacattacccaatttttctagcctagcactcagcagatttcctggaggataattttcaaatatgttccagttagtcataactctttttataagtgcctatatttttatgagtcaacatgatcattacatctaaaccttttaaatattaaaaattttgcatttttttaggaaaatgaaatcttttgttgttataaaatgaataaacatttaaactgagatgaaacgttaggcaacatttagaaaacaaaagttagaactaagcacagcttaaattttttttttaaacaggaggaagatgtgtcaggattatagcttaattaaaatgccattcatcaaatacttattgatctccagtacattggtgaataaagctatcagattcttgctcttgtgggctatgggaacaaattccaggagaacttaaccttattgagggagaacagttgcagtgagattaactaaaacttgcctctggaggtgaagtccaactgagatctaaagaataagtaataattggctgggtgaggtggctcatgcctgctgtcccagtgctttgggaggctgaggcggaaggattgctttaggccaggagttcaacagcccagcctgggcaacatggcaagaccctgtctctaccaaaaataaaacaattagctaagctcgtacatgtagccctggctacttgggaggctggaggatagcttgaggccaggagtttaaggttacggcaagccatgatcttgccactacagtctagcctgggtgacagagtgagactctgtctctaaaaaaaaattaaaaattaaaaagaataataattagccaggtgaaatggaggctggagttagtactggggaaagatgggagatgtgatccagctagagagaatactgtggaaacggggatggagacaggatggagtgtgtatgtcttgagaactgacagattcacagctggagcagagagaatgagagaagaggactattggtagaggcttactgataagcaaagactcccaaaattaaaaaatataaataaccagagttaacagaaatatgtatagggtaccttctttcatatcacctttttagtcagaatattgaaaacaaaagcacagttttgatttaggaacgttgtactgttgtagaatttaataaggtaattaaatcataaaatgaatagtgagtgtcactcttaccccaccaaccaggtgtacatcctggttaaaataagtttaattgtgtcaatattataatcatttaatgatgcttcattataactgtaatattcctatctttgctagttaaaactgtcatgttgaatgttgggatttattactgcaggaagttaagctttagaagttagaagcacttttggtataaatagctatttccagtttattagcactaaactgcaaatgtaagctttttagaaatcaaagtaattaagaaaacttctgagaggaaaaaaaaggtacctgtagtacttaaagggagtaagtgtagaaatgtagaaatctaatgtaaattcactgtcttagatggttgtttaaggatgccctcaactttgtctttttctaagagataaaatgcatggggacttccttgatctaaaggaggatccaggtaaaatgtctgatactaatagtgaccagctttggatgttcaagcaacaatgcagggttttaaaatttctgtaacatcttttggtctaaaatggaatactcagaccaagcaaattttggcctctttgaaaccttctgaggcttaggaagacataagcaataactgtagtagctaaagatttattaaaacttcctagtagagataccagtaactaagttgaatgaattgattttatatttaaagagtatcttttcatactagtaaggtgaggaaattaacttgttgatggggtcattactttgattgagttataattttcagacttatcaagtgtctgaagccagcagctgcttcactactttgtcaatattattttgatattctgtaatgattttattgtacaattaaagttttgcattgctttttaaatgttccatgccacaggctatgaagcctgacaggggattattttttgggaatagatgatctacatttaaactttttgctttgttacaaaatttgtaccaaataccctgtttcccattatttgatttatttacttttattctgaaaaatgtttggattttaacggacagctttcatcaaaataagttgttaaatgccttttaaaatccagcttcttgggccctacctcagttctcttgaatgactgtcttatagggcctgggaatatgcatttttactagcttgccaagtaattccttcacacattaaagtttgagaacagattatccctatatactatttcttacaagttgtgcgtgaggacaaaatactacatacgcggttataactttccctcattattcctactttaggtattaattgggttattcagtgataatctacttcttccttttgcttagcatattttctcttcacctttctcttagctgacctgcattctttataattttgatatttgaggatggaggattataaacaccgtcatcgagttagaggctacaagaggcttagaaaaccaaatggataagaagcgggggagcttacaggaccagtatctctcagttaaggatgaaggtcttagtgacgattagtgtcttagtgacgattcctccacccataagaattatcttgttgggaggagtttgaaactgaagataaattgttatgccaaagaagaagggtttcttctataaactttgttcaaaatgtctgttctggacatagactagagatgtgcattgctttaatcttcccattgatcattggatgatgtgaaatcaatacaaatctaaaagtttgaaaaggagttcctgcttcaaactctttgcagacttagtcactttttatgtgccccaagatatttgatgctgcatttgtttcatctaccagactagaagttcccttaaagttagcaatcatgtcatgtatatcttgccatatttggtggcacccagtcttagatctcacatgtaatgtaatagggcttaattgttaagtgaataagttgtgttaatttttcatttccagtaggaattggttttcctttgcattccctattttaggtattatgttataaacagtgtttacgataattttaggtattacattgtaaacagtgtttatgatcattgttaatataattgttttcttactaagcagtacttatgtggcctggatttcctgaacggtgaaacatgtggccctttggtataatcactttgctttggggattaatgtgtggttgattaagcagaacaaacttcttccttaggtctctccccttctggatcacaagcttatgaattccagcaatggagaggggaaagaaccagtgtaataatgtgttaggaaaacctgtctggaagctatctggagagtgagtctctttggttcactcttcagagaataaactgcctatctcctattggaggtgaagagttagtaggcaagcctccggggaggaataggaatctgagaatcttactctgtcttatctgaactttcaaccagtttttctgttttcaaccctttccttcacttcttcctcacttggtgtggggaagtatggtacttggtgtgtgtagttctgagactttctggagctctgggtagggatcacgttgtcctaaatggcatagctcctctgcaagcactgaagttcagatttctccactgtgcttagttactttttctttttctgctatcttccagaatattgttgccatctctcttctgttatctttcctgttctctttttaaattatgggtttatgcctttttaatcaagtttaccaagttagtggattttaagtaggagctaaaataaacttgcgttcagtccttcatgtttttgagaattccatcttctttctatgtatttggaagtatattttttcttgttaaagtgtgtgaagtaaaagtacccagtagggcaagtttttaagataactatgtaagcagttgttttgattttagtcttgatcattgaggtgttgtacaaagaaatgggtattgaatcttttctttgcagtctatgtaatgttctagacttcttggcacagttgctaatattgttttgttttggttctgtgattgttatgggccattatgtggccagaaatcttacaaatttccaccaaactttttactgattataatcttcagttttggtagtcagcactgtgcttttaattactatataggtgtcttttcctcctctgccttcaacctttagtaggagcattatttcttatcctgggaagtttaggattgataatacagctggactgttacttaaaaagaactgttatttttattctttttgtatttgtctttgccttagctcttttatttctataatttattaacctgaaaaataattttagtcctaagttagtttgtgtatgtatgtgatccttaccctccaagtatttcgctcctgatttgattggcatttcaattgtatttttatatctttagtcatacagcagtgcatattctaatctgatcttaaaagcctatattggtttgtggtatcttataatagtactgacgagcctggtttacctagggattatttaggggcagttaaatatcctctactacctcactagacatccaaaggagatgctggcataacatactatttgaatatcagccagctactttttgttttagattggaattgaaaataagttattaattttaaacttctgtatttcctcatatttgctgtttttttcatttctgcacagttaagtttatgagaaggttcacatgtgttttgattctaaaatggatctgaattatattgaatgatttagagatttttagaaaattatgtcttctgttttcaggttctgttctggatattattaagcacattgtggcaaaaggggaacacaaaagtggagtcctagatgaatctaccattgctacgatactccgagaagtactggaagggctggaatatctgcataaaaatggacagatccacaggtatgtaaaagacaatactcttgtgttacatcatctcattaaggccattcccactcttttacagaatcgtgatctctgactgttatcatagctctttgtatcactagttttagtacactgtggttagagtcttaattatacagctagtaaacattaaacaagtactgtagtaaaaccagacaatataaaaacaggaaaaattcataatttcgtaccaagaggcaactacttgataacattttggaatatcgctttccattttcttttatatggttaaaaaatatctaaaacaatactgtatatgtaattttgtctgttgctttttaaattttacattatattttcagtatttccctaaattattaaaagctttttataaaataacatttttaaaattatagccttttttctttttttttttttgaaacagggtctctcttagtcacccaggctggagtagcatgatcataactcactgcaacctcgaactcctgggctcaagtgatcctcccacctcagcctcctcaggctaatttttaattttcataaagatggggtcttgctatgttgcccaggctgtccttgaactcctggcctcaaagcgatcttcctgccatggccttctaaagtgctgggattacaggcataagccactgtgcccagccctttttttcttttttaataaataagagcattttaatatttcatgatcctatctaaataatctatcttagtagttaagtgccctgtttaggttttgtgtataggtcctggcgtactattgtgagctatggttccaatgataatttgatttttagagcccttgcagtgcttttctagtctgattttttttctcctggcactgtggggactcccattcaatccttgatcatgccatctatgggagtggagtggatttccttgggccggttgctgccaagtggagaatacgtggtagatgctggactcaggactcacgggtctgtgagcactctcctagtcccatcatgtggactcccacctggtgccagtggggcttccattcagtccctgttgatattgcctgtggggatggaaggctcttcccttgggcccctctttgctcctgggtggggagtggggaaacactggacctgcatagtcctttgctgctgggtggagggctaagagatgccagctgtgctgactggtgctgctggtgtgggtgatgtgggcctaccggctgtactgcatatgggggaggggatgaagtccccctgtctgctctttattggcactgctcgttaggcatggtgggctctcctgcaactccaagtatggagtcagggatgggaccacctattagatttctgctgggctgccccttttctgcttctttaggcagagagagagagagagcaggcttggggctctttttgatatatgtctgtcagttgttctgggtttcagggctgtgtaatgcccagtctgagttatagcagattaaaggaaagctcaggaaacttttttttaaacctttcctatgatgttgaaaaactcaggaaacataatgccatgttgtccttcaagttctgaggcccctagccactctgctttcctcttttctcctttcagagttcttttatgattgtctgttggattatttctgggaattttagatacatttaaaggggaggaacagggaatatttaaaggggaggaacagggaagcgtaaacctacaccatttggtttgggaccagaactagtccctggatttggaatggagacaattttatttaaatctattttgttcctgagttcagattctgagtgtgtagtgtgacatgttgttatgtgatacatggaaccattctccaaatattttatgtttatattgcttttaacattgtgatgaacacttttctctgtgatttttataattttaaaaaatctaggtttccataaaacacattttgaagaatcttaaaagatattgccaaattgcttttcagaaatgtagtgatttatgcgtctattagcagtacataagaatggtagattcattggtcccatgctagccttgcctattaaaatttttaatttacatgtttcgatacatgaagaatagtatcgattttgacatcttggattattagtgaggttggacacagatttatatgaagccattggtatttcctgttgtgacgcatctgcttgtgatttttgcctatttttcttttattttgaaatggggtcgtgctgtgtcgcccaggctggtcttgagctcctgggctcaagcattcctcccacctcaatctcacaagtagcagggattacaggcatgtgctgctgagcccagctcaacttttgcctatttttctgctggtatcttcctgcctttttttatcctgagctttttatatattaaaaattactcttttggcttggcatggtggctcacgcctataatcccagcactttgagaggcgggcggattgcttgagcccaggagtttaataccagcctgggcaacatagtgagaccttgtctctacaaaaaaattttttaaaattatccagatacgggccaggcatggtgactcacgcctgtaatcccagcactttgggaggctgaggcgggcggatcatgaggtcagaagattgagaccatcctggctaacacggtgaaaccccctctctactaaaaatacaaaaaattagctgggtgtggtggtgggtgcctgtagtcctagctactcaggaggctgaggcaggagaatggtgtgaacctgggagacggagcttgtggtgagccgagattgcgccactgcactccagcttaggcgacagagcgagagtgtctcaaaaaaaaaatccagatatggtggtgcttgcctgtggtctcagctactcaggaggctgaggcaggaggatcagttgagccccagaggttgaggctgcagtgagctgtgatcatgccattacactccagcctgggcaacagagcaagactctgtgtcgaaaagaaaaaaaaattactctttctccatttttgtcttttagttttgctaaagatgtgcagtttgggacttgggctccaaacaggcaacttgtagaacaaagggacaagagggagtcaggttattagagcatgattaaaatcttgaaaactggatgaggctgatggaaaatcaagacaggtcagtggattagtgatctttgaagttagagtagtcatagtagagtagttgaatagttatctcgaaagataggagagtggggtgtctgaattagtaatttcataattgggtcagttttggtgataataagataaaaaactgaggaagcagatgacccaggtagagtggaggacggggtctttagagatggcatcagtgaactcaggcagggattgtctctgtgattgttaaagtttcttgggataaggcaagatgacttggaaagcaagacttaatgaacaacaaagagagagagaaagtataatattaaagctggatggcatgagtttgaagggaaatgactttttttttctttttagagacagattctctgtcacccagactggagtgtagtggcatgattgtagctcacttgcagctcaaactcctgagctcaagcagtcctcctgcccaagcctctctagtagctggaactacaggcatgtgccaccatgcctggttgtgggcgaaagattacctaggtgccgaggcaagagactgaaggcacaaactgtttcagtataataaagaaaatagaataagaatagtcataatacaaattagatatagagatgatcatggacaattatcaatcattattataaacattattaatcattagcttttaatattactctttgttgcattactaatataacttaggaataaccagtgggtatagggtcaggtgctgaagggacattgtgagaagtgacctagaaggcaagaggtgagccctctgtcacacccgcataagggccacttgagggctccttggtaagcggtaatgtcagtgtctgggaagacacccattacttagcagaccacgaaagggagtctcctttccttggaggagtcagggaacactcttttccaccagcttcttgtagaaggctggatattatccaggcctgcctgcagtcatccggaggcctaaacccctccccgtggtgctgtgcttcagtggtcacgctccttgtccacttccgtgttcctcccgtacccctggttcctctttgaagttcgtagtagatagcggtagaaggaatagtgaaagtcttgaagtctttgatctttcttataagtgcgtagaagaaaacgctgacgtatgctactgtctctctctgcttcggctacctaaaagggaagggccccctgtcctatgatcacgggacttgcttcaccttatcacttagaagattcaccctccttaccctgccccccttgtcttgtatgcaataaatatcagcgcgcccagccgttccgggccactactggtctccgtgtcttgatggtagtggtcccccgggcccagctgttttctctttatctctttgtcttgtgtctttatttattacagcctctcttctccgcacacagggagaacacccgctaagccccatagggctggaccctacacctggttaatttaaaaaaaattttttttgtagagattgggtcttcttatgttgcccagactagtcttggactcttatagactcatagtggtaccaccttggtggtcttggataagatcctggggaattctctgattaccaggcagagactctttttctctttccttactttctcctgagcaaatggagtctctctgtctctgggcggagctgtctggagctgggggtgggatgacacaagcacccctgtggctaccagcactgggactgtcctggatcagacttgaagacatcacagcactgagtcttccccagggcccatggtaaccactacccagctattgcctgtgttgttcaaggtcctagggctctgcaatcagcagatggcaaagccagccaggcctgtgttcctcctttcatggcagtcattttaccccaccctgggtgggtgcagagatgccatcagagagccagggcctggagtcggaaaccttaggaatctacctggtcctctagtctactgcagctaagctggcatccaaaccacaagacagggtccttcccactcttcccccccctttccacaagtagaggagtctctccccgtggccaccactgccccaagctcatggcaggtactgcctggctacccccagtgttcagctggggcccaagggctcttcagtcagcttggggtgaatgctgccagtcctaggactctcccttcagggcagctggctgtcctctggcccagggcacgtccagaaatgccatccaagagccaaggcctggaattggggaccccaagcgcctgcttggtgctctacccaaccgtggtccagctggtaactaagctgcaagacaaagtcccctttacttttccctcttctcaaacagaaggagtccctccctgtagccaccatagcttggaatgtgctgggtcacacctgaagccagcacgtctctgagtctcacctaaggtccacagcaagtacagcttggctgccactgccaattatgcagggaccaaaggctccttagttagcagatgatgaatcctaccagaactaggtccttttctttaaggcaatgagttcccttctggcccagggtgtgtctagaaatgtcatctaggagctagactccgcctggtaccctgttccactgtggctgagctgatattcaagttgcaaaacaaagtcctctactcttccctctcctctcttcaagcagaagaaaggaatctctcccagagctgcaagctgtgctgcctggggtggggggaaggggtggcacaagcagtcccttggctgccccattggtgtctcactgggttgtgtgctctgcaagtctactggctccaagtccagtacagcaccagaacttgcccaggaattgcattctttgtagccttgactgccttgcaaatttatttaggaccccagagcactttagcctgcagaggcacggcttgacagaactcaggttctgactgctgagatgggcaattccccctggctagagctggtctaagtgcttcctccatgggtgctggctgcgttctgcctggtgttgcgttctgctgtggcagagcagcactgagttccaatgcaagcacagattctctctctgtgccctgcagctacttctgggaaatggggaaggggtggcattgacaattcaagactgtctttcctatcaccattagtgtctctaacagtgatgtgaagttgaaatcaggtactgtgatcactcacctgagttttggttcttatgaaggtgctttttcatgtaggtagttgttcagtttggtgtttctgtggggaagatgatcagtggagggttctgtttggctatcttccattggatctttctgtgggtttagaaatgaacattttctaagttcagtttctgttttccagtttgcctgggtttcatttttggataggcccttttgtctcctatgctcatgtgcacatcctcagggttggccaggagtgtgtgaatagcaggggcctctttgtctccactgtgtacctttggccaagaatatgttcgtctctatctagactgctacaacaggctagtagagccactgatgaccttctcctgctggtccgccttcagaatgtcactttagttgacagtgtcactgggtgtaggtgttgcctaccatgtccaatcaaaggagcctcttttaactgtggcagagaagctgccagtcatcgtggtctgtctgccttagaacctccatgctgactgagctggggccagaaagtgatggggctagtcccagagcagaaccccatagagtctcagtgttcttacctgaagtgcagctgtttttcaagcataaaaggtttctcaggttgatttccagagcactgaaatggttgttttgtcatatttgtccagctttaagattgctttttaagggggaagatttatctatttcttcactcagctgtagctggaagaccccactcttcatgtgcatttggttgccttgagattatcgtaagaaataaatacatttttgttctatctaaagaaattcctaaagtaaatctctaaagaaaaaaagttattatattttgtattcttaaaattaattttgacacaagaaactttgtatattgtcacatgcatgggtaatatgttactattattaatcttactttgctggtgaaaaaaagaggctttattaggggatttgctcaagcttatacaatgggtctagagtttttcagtggcttataagctaactttgagggcaattctgaatgagaattcccaggacatttttaacaatgacattatgtcaaggtaatgcttttgaaatggcagcattttaggccacttttaaaaaggatgttactcacttagttaagtgagagttgatacattatgcaaagtagatgttatagtcatacaaaataaagcagaaactgaatttctttgtgcctgaaattgatatgaatccacttattgcattcttaaaaaaaaaaaaaaaagagacaatgaccctaaatgtatacttcagtggatgttttgggttaattttgctattcgctatagaaactctagatatgtaaaggtttaggaaaaagaagatactttcatcggtgttctgaagtaaaaactttgacttgaaaaaatagatatatggatatgctaagtaaaagaggacaacacaatatatttaaaattaatctcagtggcagactaaaattctattgagttagcaaccaaaaaaatgtaactgatattaagtcgatggatactcagcttcattgattagcacagtctttcttagcaggctttagaagcagactgcctagattcagatcccagctctgtcactaattgggtgacctctggcaagttatttaatctctcttttgccttattttctcatgtataacatagggatgagatagtatctatctcataaagtagttgtgaagattaaatgaggtaatatttgcaatgcacttagaatagtatttagcacacaagaatcagtgaacggtcattgtcattattttgtacaccagaggctgacaaaccttttctgtaaagggccagatagcaaatattttagactttgtgggtgagatgttctctgtcaccactactttgtttttcttgtatgaaagcagctatagacaatctgtagctgaataggcatggttgcatcttttacagaaacaggcaatggactggattcagtttgtggactgtagtttgccaatctctgatttacagggctgtagaagataattttgtttttctttcacataatagtctgggcataaatgacatcagtccagtatgatgactccatggagtcagggactcaggctctgattttattgctgtaccagctctaagttcttgcttcatggcccaagttgatttccaccacatccacatttcagcggaaggaaggaaggaaaggggaaatagaggttatgccatttcctattagcagtggttctcaggacatttagcaatacctggagccatttttggttgtcacaacaggggctggagttggggagtggaatgtgctactgacatgtaatgggtggaggccagggatgctgctaaatttatcctatcatgtccaggaagccccttacaacagaattacccagcccaaatatcagtagtgctgggacaagaacacctatgttaagggaacaactaggaagttgtagaaaccacttttgttcgcatcacagtggctagaactttagtcacatggttatatctagcctgcatggaaggctgtgaaatgttgcctttcttcgggatggtcatgtccccagtaaaaatttcttgcttgctttctttgctttcttctccttccctccccacccccgtccttcctccctcccccctccccctcccctcccctcccctccctttccttccttccttccttccttccttcctttcttccttccatccagacattgagggccaattagtagtctgtggcacttttttcccacaagattatttgatgaacatggaatcagaactgaggtaattaattgaattatgttaattgctaatatcaaggtatgcatacatacaattatcataatacagaggactagaattttcagtttttcagtacattttttctacttaacagtgccggaaaaatattcacaaatgtttcctctttggccgtaccccatttttagcgatttgttaacatgttaaccaggtataggaacaattgattaggtacagttttagatggaaattcatattgttttaagagtacagatgcttctcgacttaggatgggtttattgggacacaactccattgcaagtagaaaatatcattaagtcaaaactgaacgatcataaattggggaccctcggtgtttccaagattccttagagtttatacattattcattagagtcagttgttctcattcatcctcataaaaagaagtttctttttctttgtaagactgaagcaggttagaaaatttaggcaactagaaatactcattttttcctagagtggaatggttctgtagatgactgatttttacctatcatgtatggagtttttaaaaatgctgatattctaggccgggcgcagtggctcacgcctgtaatcccagcactttgggaggttgaggttggtggatcatgaggtcaggagatcgagaccatcctggctaacatggtgaaaccctgtctctactaaaaatacaaaaagttagctgggtgtggtggcacgcacctgtagtcccagctacttgggaggctaaggcaggagaatggcctgaacgtgggaggcggaggttgcagtgagctgagattgcgtcactgcactccagcctgggcgacagagcaagactccatctcaaaaaataaaaataaaaataaaaaaatgctgttattctaagagtaacccagttaaggagtgtgtgtgtgtgtgtgtgtgtgtgtgcgcgcgcgcgtgcgcgcatgtgcatgtttggtggggtatggtaccttgcttttttctccatgttgtgattactcattgaaacctcagctttacaatttgtagtagtctgattttttttttcttttgttagttacttttctgggtctttgctttcctatttgctcaaggattagggttaaatagttgatttttaagattacatctttttgtgtctttctttttcagccttatttggttattgattgattgattgacaggggctcactctgtcactcaggctggagtgcaacagcatgaacacggctcactgcagccttgacctcttgggctcaagtaattctcctgcctcagactcccaaatagctggcccacaggtgctcactactatgcctggctatttttttttttatttttatagagacagggtcctacactttggcattgggacctttttaaaagttcccccaggtaattctaatgttgcctaggctggtctcgaactcctgggttcaagcaatccttctgcctcggccttccaaagtgctggaattacaggcatgagctgccacgtccggcctcttctttggtttcaattgagcatttcatatgattccatttcgtttcctctcttaggatatcaattatactttttttttttttttttttgagacggagtctcgctctgtcgcccaggctggagtgcagtggcgcaatctcggctcactgtaagttctgcctcctgggttcatgcgtcagcctcccgagtagctgggactacaggcgcctgccactacgcctggctaattttttgtatttttggtagagacggggtttcacccgttagccaggatggtctcaatctcctgacctcgtgatccacccgcctcagcctcccaaagtgctgggattacaggcgtgagccaccgtgccccggccaagaagttcttttaacatttcttgcaaggcaggtctgctcactgcaaagtccctcagtttttatttgtctgagagaagtacttctttacttttgaaggataattttgctggatacaggattctaggttggttttttttttttcctcttgacactttaaacagttcactccactctgcttgattgcatggtttctgagatgtgggatgttaattcatacctttgttcctctataggtaaggtgttctttttcctctgacatctatcaatatttttgtctcccttacccagctcagtctttttagtgagcctgtgctcctgggctatcaactgcacaagtgcttctcagttcccccccaaggtgagacaggaaggcttgatgggactgagactgggtatttcccttcccgtagatgggttaggttctggtaaaaccaaggtggttaagctctgataaaatagtttcccttgagggtaggtttttgtttaggagaatagaatgcttagggcatatttcaaattggttacttttttcttcctcctgtgggaaattaggggaattttctcctgtctataccccgagaatctcatggggctgtaggaggtaaagctcatccagctcatccaagtgtatgagtctcccttagactgggtctgcttggggtttttaactctcaagctgttccacactgagcctccagacatttgtcaactacaatttaagtttttataccccagtactgactccagcaatagtcttctgctgctgggcatctgctccattaaactgtaattctatcttcctgtctacatttttggaggcaggtgtttgccctgtgacctcagtctctgatggatctaagaagagttgttgattttcagacttttttcctgttgtgaagacagaagtgacaagctcattacatattgaactggataagattaaatcttaaaattcttttaccttctgatgtccaaagcttttcctgtataggtgatctcttgatgtcctgtttattaacaagatagtggccctgatttgcactattattacatctttgccagcaggggtagttgatagatgcaacaaaattcaaaggcctgcttgccaaataaactttcatgggactatttgggcagattcacaatgtttagtccctttgacagttgaggaaaaactgctgtctctttgaccctctgctaccctcaccacaccaccaaaaaggaggcctagcactatttgggctcgttgggcattagacagtatgtacctcacttgggcattctgtctggtccttcatatcagctaacctgcaaatcagcatcctttgagcgggactctaagtatcaggttgcattggaacctgtccagctctctgtggcacggtcccaggaacccctataaccctaatgactcctttgaacactgtgatagatgttataggtacatacaggttcaggattgttattttcctggtgaattattccttttgttcctataaaatgacttttttactcctataaagtgacctttttactcctagaaatgtttttgttttaaagatagatcttatttgttgtaaagacaattaggtcttaaatgttttataaagataattaagatcttattttaatatagctatcctgtctaacctttggtaagcatatctttcattgtggcctagtctttcaagggtcttggttttatttagggagttttagttttagctcctaaccttatatcagcccagtgccatgttttctattacctgtggatttgaaaacctgagccccctagccatttggccagtttccctcttctgtctcccaggtcttcttacctactgctctgcctcttaagtgtctctttcatttctgaaccttgagaattttttccttactttgcatctagctgtgtggtattttccccctaatttatccagcatctctttgtgtttgtagcaagggaagggtgtgttttgggtcaagggcctgtatagtagtgatgaaagtttgttttccaacgcagcattcgccatttagctggaatgggaattctctgacactttaaatcgtagactttcagcctgggctgcatattggaatatgggaagctttaagaagttttgatacctgggtccactgtcagaaatttatttaattggtttggaatgaggccttggcattgggacttttaaaagttccctgggtaattctaatatgcagccaagtctgagactattacttagactttagcagtaaccagctctgtaatacactgagacctaggcttaggagaaagttgtttcattgggaagcagaggcagatatttttaggatgtcttgctacttctcgtatcttcaaagtccatttgtgatttcaagtggatttgtatgtcagcctagtggattaggtaaagtaattttcctctgtctctactgtgtttcctctttgacttctaggatttagaggttttgagtaggatgaatgggtctctaaatcagacttttctctctgtatctacccaaatatttttcccattagagaggctggctgtgacagaaatgttggatattttgtcagtttaagatatttaaatgtagtgtatttacagctttggttttgattcattgcttttcttgacctttttcaagttttccataaatggtgcctattgatgagtaataaaaatgttatgggcagaaacttgtgttctgtattaatgaaaagtcaagcgtgtctgtgatattctttttaattttagaaggagtgtgtaactttggggcaacagtgacatgtgagaaatgacattaagcagtaaaaaacaaaactcttcttgctacttaagagtggatagaggatttagcttttggagctgctgacttgcttgatattctttgtggcagagtaaaaaagttctttaactggggactatattgatttccagatatttagttacaaatcttttccttgaaaggtttgttgtcctgtttgagggcagactgtggtgttttttattgtccagtgaattgtgctattctgcttttactcctggaagctattctacagattgtacttttggtttcaaaagggaaacatggattgattatctggggcattgatcaggaaaagtagtcactcaaagtgcaggctctgctgagaatggattattgtctcttcacttatgaaagactaaaacttataaaacaggatttgagtgagtaatatgtatatatggctttaaaaattcaaacagcacaaaatggtgtatggtacaaaataagtcttctcagcatcactgatgttaaattatttgatagtatgtctttcctgtgatgtcatgaaaatggcaccttacttttatggttttccttacaaaatcccctgacaccaatctaaccatgaaaaaaacattgtatacattccagtagagtggcattctacaaaatgcttgaccattactcctcaaaactgtcaagattctcaaaaacaaagaaaacgtgaaaaactgtcacaaccaaaaggagcctaaggagacattgcagctgaatatagtataatatggtatcctgggcaggatcctgggactgaaaaaggacattagttaaaaagtaaagaaatctgaataaactgtggactttatctaatcatgatatgtgaatactggttcatttattgtagcaaaagtactgaactaatataagatgttaataataggggaaactaagtgtgaggtgtgtaggaactcctgtgcactaacttctcaacttttacgtaaatctgaaactgtcctaaaacataaactattaagtcttcttctttttatgaatccacaataccctggtccaaagggaatcacttgttgccattttcttgtgactcctttgagagatattttatgtcaatataagcataatgtatgtctctgtgtcatgtttttcttttaaagaaaatacaaatggccacatactttatttagcattcatttttcccttaataatgtatttggagatagttccatgtcaacatgtatgttcattagtattcaaagtattttatggtttagatacaccacagcttaactggtctccttttgatggataattagattgttcccatttttgactgtaacatattagtttataaccccgacgtttggaacagagttaggaggtggggagtagggattggggaagcagggagggaacagtgtgtggttggcattttttcttttttattttatacactactttttttttttttttcccaggaagaggatttgaggcaggtcatctcctcaatggttatgtaatagttgttaaaaatttaaatagttatttaaatctatttgaagaatatctcttcctatttgcagaatgcttcctgtatactaataataatgctaagtaagtacaggtgactatagtagtatattaagatacaggcccagatctagctcatggtgaaataaggaagggagacagacctagaaatatgatcatataatactccttgctaacattatagtacagccttctgcaaaaacacagagaagggagtgactaaactatacttttcttccctcattgggttttaggtgagctcagaaaagggagttggaagttagtggttgactcagttggatgatctttgtcacaaaggaaagagaatgtcctctattctctcctgtttgtagtgactagaatctgagactagattcatggagtaaagcaggctggcctgcactctactaagtcagcctctgggagaactacctataaattgcttgggattataagcagtacaaaatactcaggaacatgatttccttatgtttcagtgtatactcaggaaaggcattgtatactgtagtatgatgctgcttctgcacacagttgtgaaactcttgttcattgtttgccaaggaatggttatatctaaacatggaggaaaaaggggaccagggataggatgaagtgctgcgcttttcactggctccttttcatgacaaataagacgttcttccatgagcaggccttgcttttctttcttgtgtagcttcaagggctacctttcttttgcttatttgattatatttacttttaattacaaaatgactgtatttccacaagttattcagacactgttccctagacttcaattccattaatctccacaaaaattgcatttggcaagggaaaggggtgtgtttgtgcaacattaatggtgtcatgaaatgcactggtctcttatttgatttgttcatttaataatgtatgttagcatttcatgtcacaacatgttgattgacattatttcatggatgtaatagaaataatttaacctttctactgttgctggctgttactagtttttgttttttattacaaacaatgctgcagtagaacccccttgtactttccctgtaaattgtgagagttcctctaggttatcaagaaatggttttgctactcttaggatttggggattttaaattttgccaaaaacttgtttttgctaaaaaaaaactaagttgtagatttgaatggatagtataatattgtttacattgggagaaaagcccagatatgtcatcggtatatagtctgttaaccagactgataatagttgaaaactttggagagagtacttagacttgagaatgatggtcaaagggattttggcttttttagttgtgtttaggtttttaaaacaagaatatttttctatattacgtgttataaatagttaaaactatagagatgcctgagtaatttccatctttttgttacaggcaaagaatgttccctgttttcagttgcatactgatgattttaaaaatttgataattcattggggtatagaaaaaaatatatttcaaaatgtagaattaggtgagggtcacattctttggccacttttatcccgatcaagaatatttgatcacttgtgttttctagatattatagtaagaacctttctagctttctttttaatgtgtgggtttctagtaccagtgacaacaattttactattagtcttaatatcctttaatataaaataggacatttaaatattgctagtattacatgaatatagtaaacaattgcttaaattatgttactccaaagaatagatgttttttgatacataactttttttttttttttaaagagatgtgaaagctggaaacattcttcttggagaagatggctcagtacagattgcaggtaatgattagtatttctttttatttgatttaatggtcagtagaaccacattacttatcttttatgtttccttaatcagcattctctcctgttccctggaccatctctattcaagcatcctctgttggcatgtcataggatgccaccgactctcaagatatcttctcatactcatccttcatttctgctcttagacatttttttctgaccattacttgtttccttccagctatccactccttacttccattagggtcttctgctatgggttctcatagcattctgtactttcctttaaaggaaaagtagttgaggatcttcattgtgtttaagaataagtacgttatatagaggctatacagagcttcttctgtcctgggggaaatggagtatttgtcaattaggaaaaagtgcctgagaagtagaagtgcacttttggcagtttcagagctgaagggataagagttgcagtccagggcctaccaaaagtggctatcctgatgaaacaccccctcctccaggctgagactccagaatgactgtacccagggattgtctagcaagcagatcatctgagaaaacctcagcttggtcccagactgctagaacagtcaggtgtttggcaggaggaagataatcacccaaatcttaaattatttcttcatctttaagaagataatttaggcgaacatcttcatgtccgtgaggtaaggaaatattttaaccaagtcacataaagctctaatataaagggaaagattgataaatttgactcctttaaaatgagcaacttctactcatcaaaagaggaacaaatggtttattactattaacagagtaaaagggtaaaccacagagtagagaagatatttgcagcatgaataattgttaaagggctcaagtgtaaagcgtataaaaaactcactgagagaaaaaaaaactctaaaaaagtgggcagaaaactggcataggcacttcccaaatgaagacatccaaatataaatgtagtaaaagatgttcaagcttacactagtaatttgttaaatgcaaagtaaaatcacattgtgataacacgttaaattgattggcctggcaaaaacatcttgacagtactaattgttggtgtgggtataaagcaaggaaaaaaatctcatttctgatgatgggaatataaattggtacaaccatttcattacagttgaagatatgcatactgttagacttttgctcctaggtgtatagcccagagaaactcgtccgtatctgtgccacagtgttcatagtcattacaagtttgaaataatcccaatgccagtagaatggataaataaattgtggttaattatatactggaataccgggtttttgtttgtttgtttgtttgtttgttttttttgagacagtctcgctctgttgcccaggctggagtgcagtggtgcactcttggctcactgcaacctgtgccttccaggttcaaaagattcttgtgcctcagcctcccaagtagttgggattacaggcgtgcacccctccaccgactaatttttgtatttgtagtagagacagtgtttctccatgttggccaggctggtcctgaactgtacccactaaaaaataattcctcattccacctctcaccccagccatgggtgaccaccattctcctttctgtctccatgaatttgactactttaagtacctaagtgaactcatacaatatttgtccttttgtgattgactttatttcattttgtataatgtctttaaggttcatgttgtagtgtcagaatttcattactttttaaagctgaataataattccattgtatttacgtgctgcattttgtttatccattcattcatcaatgggcatttgaattgcttccaccttttggtcattatgaataatgctgctgtgaacacgagtgtccaaatatctgtctgagtttcttgctttcatttcttttgggtatatcctcataagtagaattgctggatcgtatagttattctgtgtttaagtttttgaggaattgctgtattatttttcatagcagctgtaccattttacattcccaccaagagtgcacaagaatccaatttctccacattcccaccaagagtgcacaagaatccaatttctccacatcctcaccaacgcttgttagtttctgggttttttgttttttcaggtggtagccattctaagggatgtaaggtgttatctatctcattgtggttttgatttgtatttccctattgattagtgatggtgaacatcttttcatgtgcttattggccatttgtatatcttctttggagaaatgactccttaattcctttgcccatttttaaattggagtgtttattttatttttgttgttgttgttgaattgtaggagttctttacatattttggatgccaatcccttatcagatgtatgatttgcaaaatattttctcccagtctgtgggttgcctttcactgtgttgatagtgacctttgatgcacaaaagttttaaaattttgattatctactttttcttttgttgcctgaaatttggtattatatctcagaaatcattgctaacgccagtgtcatgaagcttttctcctatgttttaagagtttttatagtttaggggcttctaactttttcataccttattacagataacacttattataatgtattataattgcctgattccaccttctatattagaagttgcacaaagggggggaccttgtcttccttgatcattacttttaatcctgtcacataataggcaccaaagtccatcttgaactttaattgaaattttgttaatgaaggaactaaattatttttttcacatctaagttactctttctctttagttggcaatttaaaacgaaaggcaaatggcatttttgctctttggtttctgtttttaactttatggttggattgattatgtttccttagcattgtagctgtgcaggttatttaacaagaatattttggtaaagggggtattatcacttacattccttagctaaatgttttaactagtcttcagggttcacttggaaacaagcagaggtataccagctgaagatacaaaaattctggatcattattaagttctgggtttaaaattctgaatattttaaagctacttgaaggtttttagtaggttttaaaaagtaaaaactcttcataattcaacctaaaaaatatgttgtatatacataagttgtttgagtctttatcatatttaagtattttaaggcacgactttgtctctctggttagtgataagaatacctagtacttattgagtgtttagtattaaaatatattacagggactgttctaagtatattattaagtcatttaatccttaacaacgaccttgttaagtaagtactgttactgcctcctttttacagatgaagaaattgtagcacaaagattgaaaatacctgcccaagttcagctgactagtggcagagctgaatgcactaaatgtactttttccccttcatatgcacttcaaattgtttactttgttattgttgttacaaatggaacattttaaagtttttagatatttcccggtttaggagtattgaaaactgttaagatgatgatgatgatgatgatgatgatgatgatgatgatgattttagagaaagcgtcttgctctgtcacccaggccagagtgcagtggtgcaaatgtagttcactgcagcctcaaactcgtaggctcaagcagtcctcctacctcagcctcccaagtagctagggctacaggtgcctgccacaatgcccagctaattttctattttttgtacagatggggtctcactgtgttgcccaggctggtcttgatctcttggcctcaagtggtccttctgcctcagcttcccaaagtgttgggattacagaaatgagccactgtgcccagccaagattattgtgtgttttttttttataattctaagtgcattcagacaagattattgtttttaaaactgtactatatagacttgctatttttaaactgtactgtatagacaagcaattatttcaaataattgtttgaaaatggcagaattcatagacttctgaatctggaattttaaagtttgccatgctaaaattagccttctcacaattgggttttctgtaatttattgtattttcaaatttatttctattttcataatttctattttataattctgttttcaatttgaaaatagaacaaattatggacaaatacagactcatttaacataatgcagagtattctggaatggacacaaaacaaaaggggagtcagaaaaggtgtataaaagttggataaggtgtgtaagagcctcactatattagttaaagttcttttggttgtattggaaattatcactggctgacttaacaaagcagaaatttttgaaatacactaggaaatacacagaataaaacaaatctagcctcagaatgggcaggaacccagttgtgctggtgaccttcaggatgctgttagcatggctcagctccagtgacccttaatttctttgtctttccattcaagcttcacatttctaggagactaatataggcctactttggattaaggtgtctaaccctggctcaaatcaggtatgcccagggatcaaggtgagggagtacagatacacaaccagggctatttacagaaaaggggggatcatggtgaggcaggcagtcctcctcatcagtgactggtactttggcttcagtattgtgggacaaaatctttgtagagaaaatcctgaggcttagagaggtgaactaagtttaccaatgtcatacatctaccaagaggtgaagttaggatatgtgtttagaattacgaactctgatttatttggggctgagttcttgagagctctttgaatactaagctaaaaaggttggatttcattctgtaggagtttctgaactgaaagggccatgtcaaagtgataatttaaaaatgaatggataaatgaatctgatagtggtatgtagagtggattagagcaagggggaaaatctgagaagatgatgatatgtgggggtggagaggaatggagtgaggtacctgctaagctatgtcttttttgttttttttgttttgtaaagatgaggtctccctatgttgcttaggctgttcttgaactcctgagctcaagtgagcctcctgccttggcctcccagagtgttgggattataggtgtgagccactgttcctagtctaagctatgtcttaatttagtcaagaagttcagcaaaaagataagaaactatcatgctttttatttatatataggatgttcactacattgtattgttttcctattcatttatgatagttgatgcactttaaataccttgctgttgtattctatttcagactttggggttagtgcttttttagcaactggtggtgatattacccgaaataaagtgagaaagacctttgttggcaccccttgttggatggcacctgaagttatggaacaggtaccgtgtctttttttctgttttaaatgggttagggctttgttttgaaactgaaaaaacttaatagtgcttgcttttctttggcataccaggttagctttgggaaacatgtccctgttccttggttaggattttagtccacccttgaaaagaaaacaacaaaaactctctagaactttgcaaaggatatatgaaactcaggaataatataattgaggtttgttttaataattttattagtacaaattataccaaattttacatatagatttattggtttaatgatttctaaattatgtccagttttgtttcctaagcctccatatagttatttctagttcttaatagatgcttcacataaatgccttataggtatatcaaactcagtatgctgcgaaccgaattcatttttactctgttttaatcacctgtattcaccctgttggtgagggaaggattcccactgtaaagttatgggaatggctgaacatacaacacctgacactggacagatgagattgacagctgtctattagtcacatatactcacagcctaggggaggaggataactgcatgctgtgcaggaccagcagagttgcactgagtaacagaatgaacgagaaggggctttggagacaggctttgtagtaccagcagattgcgatgccccttggtttccttgagaagataagattggctgacacggaaccgaaatctgcttctcaggggcaagcaggaactgtacctggtcgtttgataaggaggattgttgggctaggagacattatctgcaagagcagagtggggaggggaacttctgcttaggtctctagaggcccttcagttttaccagatggcagggcagcacatactattgatccttaattttaggtcttacacactacacactccccaaacctatttctcctatattgcttaggatagaaaattaaaatttataaccatgtaatgtgctggtgacagtgtataagtagagaaatttggcaacatattcactctaaaaagtttaaaagtattcacaaccttcctaactttttcattatagaaattaaggtgataataccataatacagatcctttggaaaacaaaaaagctaccccactacaaaacattttgttttgattctttctagtattttactgtttgtaaaagtttcaggacgtatgagcaattttgtgtttttttcctcatgttttatcacaaatgttttttatatgttcacatagaattaataaatattgcttttaattgactgtaattttaaaaatataccatacttaacagtttcttcactgttggtgaacattcagtttgtgtctttattttttgtattaccaaatatatttagattttgcctactttattttattggtttaaagcttatgaacactttcattgttcttggtacacattagaggtagcttttttgtttgtttatttttagagacagagtcttgctctgtctcccagtctggagtgcagtggtgccatcatggcttactgcagccttgaactcctgggctcaagctagcctcccgagcagctggactgtaggcatacgtcaccactcctagctaattaaaacaatttttttttgtggagatggggtctcaccatgttgcccaggctggtcttgaactcttggcctcaagcccacctcatcctcccacctcagcctctcaaagtgttgggattacaggcaagagccaccgtgccccacctcagaagctaacttttttttttttttttgaggtggaatttcactcttgttgcccaggctggagtgcaatggcatgatctcagttcaccgcaacctctacctcctgggttcaagcgattctcctgcctcagccttccgaatagctgagattacaggcatgcgccaccgtgcccggctaattttgtatttttttttttttagtagtgatggagtttctccatgttggtcaggccggtcttgaactcccaacctcaggtgattcgcctgcctcagcctcccaaagtgctgggattacaggtgtgagcctccaccctggccagaagctaacttttaaaagtccttttatgctggtaaaaataatcatgcaaatctgttttgcaggtccgtggttatgatttcaaagctgatatttggagttttggaattacagcaattgaattggctacaggggcggctccttatcataaatatccaccaatgaaggtgaggcttgtattccaaatactaccccagctcaagtcccaattccttttcagagccatttgccagtcttttaattttttttttattgtggtaaaatacacataacataaaattgaccatcatctttaaccattttgaatatatagttcaatggtattaaatgcgttcatcacgttgtgcagttgtcaccaccatctgtatccaaactcttcattttaaaactggaactctatacccattaaatagtaactcttgattcccattcttagccccttggcaatcactttttgtctctatgattttgactactctcaatacctcatataagtagaatcacacagtgtttatctttgcatggctagcgtaatgtccccaagtttcatccatgttgtagcatgttgaagaattttcttgctttttaaggctgaataatatccattgcgtgtgtgtgttgagaagctaaccatctacagcagattatttacgtgaaatacacgtaataactctgggttttaaacaactgattcagatatgaacttacagaaaataaaatgtttgtatgttggtcggggggtgcctgtattgaaaaatcttgaccacaatagttaaactttactgagtcatcacaagtttatagtatattgaaaattcttgcaggttttaatgctgacactgcagaacgatcctccttctttggaaactggtgttcaagataaagaaatgctgaaaaaatatggaaaatcatttagaaaaatgatttcattgtgccttcaaaaagatccagaaaaaaggtaaaatatgagaaaaagtctacttttctctctaataaaacattgtgagaagtctaagaatcacatactcatatgtacaggaaattattttcaaaagaactaaatataaactttaaaaaagtatacagagaccattatactggattggaaatgaattgatttctgccttctttgtagtatacagtgtaccctaaatagttcagctttttccttgttaatttcttacaaagttgtacattgtgaattctgtattaataaatgccaagttagtggagagatttgtttttaatttgcatttaaaatttataaatgaatgtcttaatgccatttacagtattaataaaggaaagacacatagaaaatttatatttagtgtaataatcatacttatttccatgttagaaagatattttagtaagtggaccaaaaattcaaatagcttccttatcaatgttagacagattgaatgacaagtgagcaaataaataagaacatccgatatgtgtaacttcatgaattaagcagaatcgtagaatgttggggatcattgagtacaaccttttatttttgaggtcacttgatacttagtcataggagtaggacttgaatctcaaagtcctgattcctaacttagggctctgttccttctgaatcttatctgtctgtttcacatatatattccactcagcttcttagcactgagttctttaatttttgtttctctaaagatcattaaaagggaaagactttgatgttcttgatcacatctctagtgtatgtaatagggtttcagaatttattgttggaaatattggaaagggtaagaaaaacaggtagcaaaatttatacctgtgtttttataatttttttttttctgtttctgagtaaacagttaaaaaagacaggaaacacttttcttttatcaaattagttggttaaaggaacaaaattatcctgttacaaatacctagaaatgccagataaaatctatccaacttaaagattctcagatgccagaaataatgaggaagccctaagttaaagaagaaatattgtgaactaatcccatggctgttttcagtgggtcactattcattctggtaacctactgatttggatttataactcccatgtgaaaactggaagtgagatcttgggtccacccagtggggagtttgaactgagattcttcttaaagctaagaacttcagatgtcagtatccttagtaaaaggatagacaagaataaaaattgtcatcaccaagagacaacaaaaacctctcctgaataatcaagcccttcaacctggacattccacaggtttagagtctatactccctatgttatccaggaacccacaggattagaaagttaaaaaagctttaccaaatcagtttttatttttgacggaagtagtcacagagctgcactggaagaacactttcaaactctagctcccattggattcctgaacataatgccccactgtaataaggtcacaatccaaaattaagaaacacacagtgaaacaatgcattatgaactagttagcagacacaagcagaaggattagtgctccagaagatttaggtaatgcagtgaaaatctgaaaagatacaaaattaagtatattgaaaataattaaaattagaagaaatcagacccacaagagaagactgtgactatgacagaagaaccaaatagcaatgccagaaatgaaaaatacagtgattaatgtttaaaactttccatgagtgtgagctggacttgttgactcacttctgatgagtagagtatgaaaaaggaaaaatagcaactttacaatgcacctcctctacccaatgaccaaggttaacatcactattaataatacattgataagactgatatgtgcctcttgatatggtgcaatgagaagggcatatatataacctgtgaggtattcttcctccaaatccgtaacttcggtctataatgagaaaacatcagacaaacccaaatcgaggaatatgcagcaagatacctgaccagcactcttcaaaactgtcaaggaagagagactaagaaactgtcacagattggaggaaattaagaagacgtgaagacggaaagcaagagtatcctatactagatcctgggacagaaaaaggacattagtggaaaaactggagaaatggaatgaagtctgtagtttagttaatagtattgtaccagtgttgatattttagttgatttctttattattatactgtggttatgtaaaaggttcacaatagcagaaggtggtgaatggcatgtaggaactctgtactagctttgcagctcttctgtaagtctaaaattattataaaactttaagaaaactggaagctatagaaaatctattccagtttgtaaaccaaaattaaactttgtttagaacattgctaagttaaaataacacgcacaatggactggttaaacagaacaaccaataaaacaaaaaagagattatttactcatcaagtaccaggcactgtggtaaacacttaacatatattgtttaattctcacagtaatcctttgaggatagcactgttattttctttattttacaaatgaagaaactgaatcacagagaggttaagtaaccttctccaaagtcacacagctaataaatggtggaatcagaattctgacccatgcaattggactagagttaacctgttttaatcagactacactatactgaggaaattgctcagaatgtggcacagaaagatcaaagagggaatatgaaagaaatattaacatttggagggtagactgagaaggttcagtatgtttgtgtgtatgcacatccacacacacacacacacacacacacacacacacacacacacaaatgtacgtatacatatacatgaacttaccaggaaagactagagagagtataggagaagcgatattcaaagaaataatggctgagaattttcgagagttgatgaaagacctatattctcagagtaaagaaccatccccccagaattccaagcagtgtcccccttcttccacttgtacaagttgctgtgaaactactggacacgaagcaaagacaaactcctacaggcaacctcggggaacagattacctactgaggattagcaggtagacttgacagctacttccccaataacacaacagttgaggccagcgtttagtgaaatgctcagagaaaatgcagtcatgtgtcacttaaaatgatgaggatacattctgtaatatgtgtattaggcagttttgtcattgtttgaacatcgtggagtgtacttacacaaactttgatggtacagcctactgcatgcctaggctatttagtgtagcctgttgctctgactactgtcagatacacagtatattgttggccaaagcattaagaggctcatgactgtgactttaacccagagttctccagctagtcagactatcattcaagaatgagcatgaaattattttgcacacagaaattgagttttccagtcacgttctgtcacttaaagaacccataagttgtactttagaaagaaggaaatgaagtcagaagaaaggaatgaataataagaagcaatgttgagcaatcacattgttgagcatattgagaagcaattgttgagcatatgaaaaaataagagtgataatgtaggatttcagtttgcatagcactttcacatttattcagctttttaatctttataataatcatctgaggtgctggttcttaaacttgaatgcctattggaattacctggggagttttaaacattactaaagccaattaaagattctgctttaattggtttgaggtacagcctggtcattggttttgtttgttcgtttgtttgtttttgagacagtcttgctttgtcgcccaggctggagtacagtggcacaatcttggctcactgcaacctccgcctcatgggttcaagcaattctcctgcctcagcctcccaagtagctgggactacaggcgcacgccaccatgccctgctaatttttgtggtttttttagcagagactgggtgtcaccatattggccaggctggtcttgaactcctgatatcgtgatccacccactttggcctcccaaagttctgggattacaagcatgagccatggtgccctctggtcattgggatttttacattcttcccagatagttcaatgcacagcagtgtttaagaacttaggggcttggccaagtaatactgaaccttagagaggttgtgatttgctcaggatcaggtaggtgtgtggcaaaatcaggtccagtctcttaaatgttaaattctttattctgaatgatactcttttaaaagcttgtaaaattgacagtcgtgtctttacttaaaaggaaataagaccatgaagaaatgagttaaacactgagttttgttaaatttggggaatatacttttagaattttcatttttaaagggagattgtgaaatctgtttttagggatctgtggttacctaaattgaaggctggcaggctaccatgtggcaagaagtggaggtcttgatttggtccatttcctctttgtgtgtttaaatatatttttatgccttgctaaaaatgttagatagatattttctagcttacttattgggaaataatattaaatattaaattaatattattaaatagcaaatatattagactctattaagaaatcatgcttccagaaaaaacatttcactaatgattttttcaaagaatctacaataattatcagaatatttgttttgagttttttattttattcaatgtcctgtatcaagtttattttacttttgctttttagcagtttaaggaaagtagagtatactgagtttttattttgctgttgaaaaaaattttttctcatttttgatgatggaatctgacattacacttgaattaattataaaaacttttcttccctcccttcctggttttagaccaacagcagcagaactattaaggcacaaatttttccagaaagcaaaggtaggaaattccagcttttgattatgtgtgttcataggatgctcctcaattactcagattatgttcagtgcttagaagttggatgattatgtttggaaaaatgatggtagataaaataattgcagaaagcactatgtatacagtctttgataattaagataattgcttcagaatttagtaaatccgtttttaaatattaggttaaactgatcataggaacaatgattattaaattttgccattataaatataatttgtgaaaaataccgaactctggttttaaggtttactactgaatttgtaaacatctcatttcccaaatatatcagatagtaggatgttactgtagttggaaatgtaggaccatgatctcaaagaacatacagtacagcaaactcttcatagacagtggttcatacagtgtactacatcttaattttctgcctcaatttatgaaactgtggtagtaacatactaaaggagcttcagagtgaaagaatgaaagtttttctcacacttcattacagaacagttactatatcacattttgattatggtgaacttttttgtgggttttttttggtaccttaaaaacttgtaagaacaaaatacttacttttcctctccagaataaagaatttcttcaagaaaaaacattgcagagagcaccaaccatttctgaaagagcaaaaaaggtaaatcagaatttaactcagttttcctgaagaatttactttatttttgcattttgaaaacatgttaagtaatacattgttaatagtatatgagaattactggttttctgtcgatcctttctaaagcattctttgatacattcattcagcaaatatctttggtctaccatatgccttggtattactctgctatcttttaggatgaaaagggatgctagacagtaattggtaaattaattctaaactctgtttgataactgtttccagctaccagagtgagttgtgattttacatgacatttatagctttgggtataagtcacagtaccctctttggaactccaaattttctactgcctttacagaaagactgaaagaactttattacgcatatgtaatttctaagaagtttggtcatgatgtgagcatacagaatgctttaatatctcagtttgggcagaatatattaatcttcctgtccatgatacttttatgaacctctgtgagagcagggagaagaaaatcctcccttttcctcactcttacttctctgctcaagcagacttatccaatgtgaaggaaaggaggcagtttgggcttctgctgatgatagacttgaagaaggtaaaggtcttacaccttgtataatatagtggtaggcctgtccaagaagttagaagcattatgtctagcagtggcttattctcttccgtagatctcactgcttgggaattttgatacattccaagaatttaacacaatgaagaaccagaaatgtatattaaatacttggaaatgatattcttaataagcactggtaaaacagttaacttgtctctattttagagatatatctttttcagtggctataatgcatcgttacatatcagaatcacttggggacttaaaaaaaaaaagaaagaaacatggacaatgtcatcccaaaccaattaaagtcatgactctagtggatgagacctggacaattattctcatggatagctactaggttaaaaactcacttggctcattccttcactttatgtcaagtctactcaattggcctttcctcagaataatattctctgattactaaaacagtaccctcccatgactctctatccctttaccctacttatcaccatctgacattttacagtgtttctttaccattagaataacagcttaatgagaacagggactttttttcattgctgtatcttcagtgtgcctagaatagttcctgacacacaggatattcttaaataatatgtatatatttttatgcttattaataatatgtataaaatttctatgcttattattgtttataataaatcccatctgagatacgtgttgatttatatctgaaatctgattaatttaagaagagtaagttgggtgcagtggctcatgcctgtaatcccagcactttgggaagccaaggcaggtggatcacttgaggccaggagttcaagaccagcctggccaacatggtgaaacctcgtctctactaaaaatacaaaacttagcctggtgtggtagtacatgtctgtaattccagctactcggaaggctgaggcatgagaatcatttgaatgcagaagagggaggttgcagtgagctgagattgtgccactgtactccagcctgggcgacagagcaagactctgtctcaaaaaaaacaaaagaagagcgagcctcagaccggggatatggtgactcacgcttgtaatcccagcacctgtgggaggctgaggtgggaggatagcttgatcgcaggagttcaaggctagcctgagcaacatagtgagaccccatatctataaaaagaatttaaaaattaatgagctatggtggcatacacctctggtcccggctattcaggatgttgaggtgggaggatcgcttgagcctgggaggttgaaggcacagtcaactgtgatcataccactgtacttcagcctgggtgaatacctgcatatatttccaccctcctgccaaaaattacctactaaaagaactgttaagagaataaaaagagatcaagcacggtggctcacgcctgtaatcccagcactttgggaggctgaggcggatggattgcttgagctcaggagttcaaaaccagcctgggcaacatggcagaccctatctctactaaaaatacaaaaattaaaattagccaggcatggtggtgcgtgcctgtggtcccagctactcaggaggctgaggtgggaggattgtttgagcctgcagggcagaggttgtagtgagccaagatcatgccactgcactccagcccgggtgacagagtgagactgtgtctcaaaacgaaaagaaaaaagagaataaaaagaaaaggcataaacctctagtggacaaaaaatgagagaagtgaaagctgcaaccaaattttcaaaactttgatgcccataaattagtggtaaaggacttggcaaatcagcagactataattgctaagccagtattaagaaaagcttgaaagctaccatatacaacagaaccctgaaaggtaagggaattaatagtgccaggtacctccagaaatgagagtgaaagtagggctaaaaacaggaagattggttgacaatcttaagatagagttagactctggtccctcccccactccatgctgcactccaggagatgtctggaggtttattctgcagaagggtaaaagaaatggtctctgaactgaaggacaccaggcacagttaaacatgggaataacttactgaaaagggcatttaagtaattgtttacacattgaatgttaagaatctatccatatcacttcattcaactcctggaacataaacattaaggcttattaccccatagacaagacgttgaaaaatccttatttgatcaatctgactagcctaagaggaaaaacagaagtattgacattggaggtgggaaatgctcacccacatcactctgcagtgaagcaaactccacccacttaaaagctcagtgtttccaatcagtgctttagttccttgctcttaaatatgagcatagatctaggatcacaggatacctcagggaaacctcttaatgtgaaaaatagaggtcaaaataaacagaaaaaaagagaaacttacaggaaacagactatataggaagataatttaaataaaatcatgactgtctttagagataagagtttatatttgccaggagtggtagcccatgcctgtaaatcccaacacattaggaggagaagtcaggaggattgcttgagctcaggagttctagaccatcctgggtaacaaggcaagacccagactctaccaaaaaaaaaaattagctgggcatggtggcatgtgcctgtggttccagctgctcaggaggctgaggcaggaggatcgcttgagcccaggaggtagaggctgcagggagctgtgttcgtgccactgcacttcagcctgggtgacagagcaagaccctgtctcaaaagaaaaaaaaaaaagagtttacattcacaaaaagtgaacatgacactgttaaagaagctttcgtgccatgacaattcagtgaagactaaagaatcatcatcttcaaatggccttggtacaactgaatattcacatgcagaagaatgaagttgggtcttttactctcgtcctacaaaaaattaactcaaaatggattgttgacctaaatataagagctaaagttataatactgttggaagaaaatatagctataaacctttgggaatttgagctaggcaaagcttccttagatatgataccaaaaatacaagcaataaaaggaaaaagtaggtaaattgattttatcaaaaattaagacttttgtgcttcaatagacgctggcaagaaagtgaaaagacaacctacagaatgggaataattatttgcaaatcatatatatgataagggacttgtatctagaatatataaagaacttttgcaactcaataataaaaagacaacacatttttaaaaatgggcaaaggatctgaatagaaacttcttgaagatacataaatggccaataaacacatgaaaagatactcagtattattagccatcagagaaatgcaaatcaaaataacaaagagataccacttcacacccactaggatggctataatcaaaaagacagtaacaactgttggtaaagatgtggagagattggaacacttctgcactggtgatgggaatgtgaaatggtgcagccactttggaaagcagtctggcagttcctcagaagcctaaacaaagtcaccaggtgacccagcagttctactcctaggcacacgccagagaattgaaaacgtaagtccacacaaaaatgtgtacgctgctcatagcagcattattcgtaataaccaaaaagtgtaaacaacccacatgctcatcagctgatgattagatttataaaatgtggtatattcatgcagtagaatattatttgacaataaaaaggaatgaagtactgatacatgctatagcatggatgaccctttcaaacattatgctagtttaaaaagcccatcacaaaagaccacatgttgtgtgattcaatttatgtgaaatgttgaaaataggcaaatgtaaagagacagaaagtagattagtggtaacttaggactgggggttttggagagaaatgggcagttactgctaaagagtatggcatgtcttgtagggagtgataaaaatgttctaaatttgatggtagtgatggttgcacaactttgaatatactaaaaatcattgaactgtatactttgagtggttcagttgtatggtatatgaattataagggagcttttagagaaccaggaccagtaccaacaaaaagcttttggaaattgaaaacagaagaaatgaaaaattcaatataaaggttgaggaaatttcccagaaaagagttcaaaaggcccagatatagataacaaaaaagctgagattagaggaccatttgagaaggtacagcatttgagtaaagagaattccagaaaaggagaactgagaaaaacagaagaaagtaaatcattgacaaaataattcaagaaaaatgtccaaaactggatggtcaggaatttccagattgaaagagtcttgagtactcagcacaattaatgaaaatagactaatgctgacatacattaccatgataagtcagaatactggaggcaaaaagaagactctgtagtcttccagggaggggggaaatgtcacagacaggatcaggagtcatgatgacctcagcagcacttctggaagccaaacaatgaggcagttttcttcaaaggtatgaaagaaaataattactgatgcagccttttcttttttaaccaaacaatgaatgaagtgtgaagatggaatcaagataagttcagaaatgcatgactttaatacatgctaatagtggagatggtgcttaaactaaaaacagaagtcatgtgatccaggacgcacaatcctctggctgatggtagaatttgatctgaaataggagacatgctgtgaaaccagtctaggatggaacagatcaggaggttctggtgagagtcttcttcaagaagatgataccgacagaatacccatttgaatgtggtaaaaggagttataaacagctgagagaataaatactaactacaggggaaatagaagtggtaatgtatgataaggttcagctctgaatatgatatatataatcatgttatgtaaacattgaatattgatctaaccaaaattatagtgtatcttgagaaaagaatagagatttcataacagagttaaattttcatcttctatgtgggaagtcctacagataactcctaaaaccaaaaaatcagtgaataatgataggaacacatgttcaagagatgaatgtccaaaaaagattagctaaaatgagttgaaagtggttgccagtggagatgaagctgaaggttaggaggttgctgtttttcttaacaaaacatgcacagctctagtgctcttgaaatcatatgcaagtataattttgacttaacaaaaagaaaaaataacagattttaaatcttgggtttattcattttgagcacccaaaacctcttttttttttttccttaaatgtctcaggacatttaaaatcagattttacctgtgattttacataaaaaggattttgatgtttgggctcagagtatagaagtacagcggttgttactaaagacaggtagtagagattgtcaacagagagcaggtgatggttggaggatatgaatttgtatgggaacatttatggggaaaatgattatctacttaatggattgaagtgatagaagaagagagaaatatggagttttctacttagtaagcatgaaataccaccataacccacttctctttctaatgagcaggttcggagagtaccaggttccagtgggcgtcttcataagacagaggatggaggctgggagtggagtgatgatgaatttgatgaagaaagtgaggaagggaaagcagcaatttcacaactcagggtaaattttattaaactgtgtactttagctagaactttttgtagttcttgttcagcttaaccagctaaaatataaagaatacaattgtaacaggattttcttgaacagcttattaataataggagcccagttaattctgcatggaaagttggacttagatatctgtttgaatatgataatatttagagtatataaaaatgacccaaatctaccaaatctagagacgaaagctgcaaatgtctgagatgcaaaatacactggataggattaatggccaattagacattgcagaagaaaagttagtgaacttgaaggcccagcaatggaagcttttcccctgaagtctgttatccttctactaaggaggaatggtgtatctcttattcagttggtatatcctagatatctgtcgtgcacacgtgtgtgtgtttcctaaaaacagtgaagacaagagtcttccttttggttcatttcatcactcttgcctaaaagcactgcctcaagttgtcaggactcattcattcctaagactggaagtgtttataaggaaatataaatgtttgagggtattatacctttgactgcttaggactgtttttgtgggatgaatagtgagtatactggtatattgcttcctgcttttaggatctgctttggtgaaagcacttaagactctcttgataaacactgaatatttgttgaccttgtttatctaatgaggtatttgagtctagtccttctgcagagctaagtttgtaaagtccttgccaatggaagttggcaaaaatcgattaagctctaagcttggaaacactgtttagaaggtaaatgcaaatattcgtttacatacaattgtgagtttaaggtttctttataaatgtgagactatggcatcctttcttccttactttttcatgtgactcctgtttgaattgatactctcatgtattgttatattaaagctaccagaggaagctaaagctgcatgaattttatagttctaccttcctgtgaaagggatgatgatgctatttttcttctgactaacaaatatttggagagatacattatagcttttcagtatctaattattactctctagctatctatagataaatttggtagttctgaaatagttatagtagctttcttataacctaatacattggtatctaaacaacacagaaacttatatactttggccacagaataagtagttttctgtccagtatttttcatgttatctttatagcatttttgagaccatgaattctttttaagaacatgagtcttttaaaactaaattgaactatgttaagaaaataatataccatgaccaaacgggtagggtgcaatgatggttcagtattaggaaatctcataatattgatagatctaaggagaaaaatcttatttttattttcatagattctgaaaaaggctttgacaaaattccgcccatattcataatgctcttatgtagatccagatttccatctttatattattttccttatgcctgaaaaactttccttaatattttttgtgttgtaagtcttttggtgatgattttatgtctgaaaatgtctttgttttgagaatgtgtgtttgtagggtatagaattccaggttgacaggcttttttctttcagcattttaaagatgtttcttcaccatcttcttgcttgcatctttccactgagaaattttgtgacattcttattcttgttcctttataagtaacatgtcttttttccctggctgcttttaagatttcctctttacaaatggttttggaaaatttgattgtgatatgcctaggtatatttttcttcatgtttcttgtgcttggggtttgttgagcttcttggatctgtgggtttataggtttttatcaagtttggaaatttttcagccattatattttcaaacattttttttctgtcccccagtaacatatatattaggcagctcgaagttgtctcacagcccactgtttctcttaatttttttaaaattctttttttctgtctattttgtgtagtttttatggtagctttcaagtttatttatcttctgcaatatctaatcttctgctaatcccatccagttcctgtttcatctcaggcattgtagtagtctagaagtttaatttttttcccatcttctatgtctctacttaactttttggagatatgtaatacagctatgataactattttaacatccttctcttctaattctaacatccatgtcaattctgaattggttttgttttgttagttattctcttcattatggcttgaggagtattttcctgcctctccacatctagtaatctgattagatgccaaacattgtaattttcaccttattgcttgctgacaattttgtatttctgtaagtcttcttgagctttgttcggggatacattaaagttagttggaaatagtttaatgcttttagatcttgcttttatgatttgttagttgggtctgtagtagtgttcagcctacagccatttattccccattactgagacaagacctttttgagaacactacccaatcacctgtgagttattagtttttccagtcgggctggtggaaataggcactgttcctggccctgtgtgagtgctatgcactcttacctctcatcgtttttgatgttttcccccctattctcaggcatttcctcacatgcactcgttgataagtattctgtcaaacattcaaaagtgaccgtctgcagctatctagggttcactctctttgtagctttctccttccttgtactgttttatcagcttaatctgccttggtctcccggtctcttagctctgtttcctcaactcaggcagttccttggatttcatctaggttccacctccctgtgccacagcttggaagctttcaaggcagtatgtagggacaaggcccaccactttttttccctgtcttccaggaatcactgtttttctttgcccagtgcccaatgtcttgaaaatttttgcttcatatattttgtctttttttgcagaggtggggttgtttcaggcagaaagataaatctggtccctgtttattcatcatggcctgaagtggaagtctacaattatattttaagtgaatgtgtaactgtactgaaggggaatataaaaagaaagaatccaagtaacctatgaatatagtatttgactatgtgttctcaggtggagttgatgggggaaagaaaacttaagacaaaccttgagctccttttattaggattatttttcatagttgtatatgcaaaacagttcagaaactcttgtaggattgaggaaatgagtaaatgtctcaatgttcttgggagccaagattctcactatagaagaagatatacgcaggtacggaacagggcaaagtgagaaagaatcctgtggcaatgggtttgaattggaggcattggtgtgaattcaagctttgtaaagtatgtgtgtgaatgtgtgtgtgcgtgtatgtatatacgtgtgtctgtacttgcatatatttctcagctttgtccactgaatggcctgaaagcaaagaaaccccaataatgacatgccttgtatccagataatggtctctaataccattccccactaaagggaagcagagctcctttgagaaatggttgattccagggcttgggcagggaaaatataaggggaatcttgaatattatgttcctttgccagaaggaaaagatacttaaaaaaaaaaaaaacaactcataaggacacaagcgccagctcgaagttactcctactggcaaaatctgggacaatttaaccaccaaaataaagtgcaataattaattttaaacaatttagaaaatagctatctatgagtctataccaataacaaatacatatataaacaaatgggggaaaaggaatggttcttcattgcggtaggctaccaagtgctgaccagtaaatatggacgagtgttggagatggaaaatcatcattttacaatcatcgtcgcaaggataggattaggcaggaatcatcaatgaagctaaatatagggggaagttttgataagcaggatattttcaaggtcttaaagtgtgcccccacatattacctattcaccacaagggaaaaaaataaggtttttttatactggagaagtaggaaaattccttgactaggtgattaaaattaacatcaccaatgaggggcagatgaacatgggatacagtaagaaggacacgtcagtatgtagaattccaagtgggaattcatgtaaatataataataaggaaacattagataaaccccatgtatgtggtgggagtggagggactgtattctccaaaaatgttgatgttccagattttaaaaatctaagaaacgtgaaaactacctgcaatacatgatcctagactgcattttatactggaggaaaaacaaaaggctacaaaggacattagtgttgacatttacgctataaattagataaaagtattatatcatgttaaatttaatgagaactatagtgtgaagttatataagaaaatatctcattcttaggaaatgtacactctgattattaagtggtaaacagccatgatatatgcaacttattctcaaatggtgtaggaaaaatatatttagaaagagaaagtgagcacccaaatgataaagcagatgaggggaaaaaaggttaataataaatgaattggggtaaagagtatacttacgttcttgtattgttattctagcaccttttctgtaagtttgaaattatttacaaaagtttttttttcttgtagtctggatgaattcattatttacaaagttgtttgtttttttttttaaaaaaaaggttttgggttggtcacttacttggtatgctacattagctattacctgaactttgattactccttaatgaaatggtgataaaagtgttaaaaaaaaaaaaccatcaattgatctttgacatattctgactaagtccatcattgtcagaatttaccataaattgttattcgtttagaggtaagttttttggtaaactacagtgcctgtatccagaattactgctaacttttattatttaccaaataaacagcttaaattttcatatggcagattgtaattggtcatttcctaataaatgtggtttacaccagatatttgagacctcacctcaagtatcagtttatttccactacctttatttttgctagtggtccatgctttatttttggaccacccgtgtttctttagataccagattcccaaatatccaacaccaagaataagggtagtagactctttacatgcagctttcagatcatttttggctcaagagttttctccattaaagcttgtaaacagaattactctgctttgagaatgtgttggataattagcttaaaagtttaggtttggtctgggatcttatatacataatatgttcacgattagtagaaagaattttactttggagaatgtgacagtcccattatgtatgcttataaagctcacaattttaaaatacggaattttaaaattgataagtacattgatgtatttgttacaggctacctggacaaaaaatacaatactatcatgacagttattttttccagaaaactttcagtagacttgctggtgagttaatatatggatcagaattaaatggagttgatttgcatttaacatcacttgcagtttgggactgactacaagtaacctgagttgtgagttaacaatcatcctttttgtatttcgtttagtctccccgagtgaaagaatcaatatcaaattctgaggtaagtaattgtgattattgaatccttgttaaagtaaatgtgcttttgttttggtttcaattcgaagtgcttttgtttgtgcatatgtatgcttaaatgggaatgcaactttataccaatcgaattttaaaagttggcgtaagggctcagaatgttcttccttgcctctttgattttgtgaattttttatttttatttttggcttgggctgctggaagtgaaaagttatttatttatttatttatttatttatttatttatttatttattttgagacagggtcttactctgtcacccatgctggagtgcagtggtgtgatcacggctcactgcagccttgacctcctggggctcaagtgatccttccacctcagcctcctgggtaggtggaaccacaggcacacaccaccatgcctaatttttgtattttttttagagatagggtctcaccatgttgccctggctggtctcaagctcctgggctcaggcagtctccctgccttggcctcccaaagtgctgtaattacaggcatgtgccaatgtgccctgctgaaaagtagtgtttttgcattaatttgtttgcgaatttgtcaaatgccacctgtcctttttgaattctttctttcagcctcagcctcttctcttgtgaaataaattctattttccgtggttactgtgtcagtatgataggaaatcttgttaaacagattcttattgggctggttttccctattctcattaccggagaaagacaatcatttctgtggtctgttctgtcatacagtcttatttccggcagcatcttcattctgagctcagtatttggttttaacacatctcttactcttaaaccaattctattcttgcctctttgctaaaaagtaacctttgttttttcatttattttgtatataaagtacatttgtgtatgtgattatgtacatttgtttacatagaactgtattaagagtaaaaacaaatactgttccttcacatattaacaggccgatatctgttaacttgtattagaactgttgttcacttatatgtgtggctcctcttcttggtaggggaattgcgttttcctgccccttgaaattacatatgccatgtcagttactctggccagtggcatgttagcagaagtgagaaccactcatgattccccttgtctccttattcctgctaccatgacctgcattcctgagtgaggatgataccgagcttgttagcccccgctggcgagagatagacttgaagtgtgtccaataaacaactgttgttttaatccactgacacttcaggattatttgttacttctaatttaacctatgttgactgatacttgatttctcagaaattgaatgagaggctattttacagattatctagtttttatttttagtcttctccttgttcctttgcctaaatatcatctccacatgaactcttgcatactcatattctcatgctcattactttgtttttaaatttgcgataaaattcacataatgtaaaatttaccatcctaatcattttcaagtatatagtccagtggtattaagtatattcacactgtagtacaaccatcactaccatccatcttcagaactattttatcttcccatactaaaactctggctattaaacagtaactgcattctccccagtcgctggcaaccaccattctattttctgtctatgaatttgcctactctaggtacctcatataagtggaattatacagtatttgtcattttgtgaccggcctatttcacttagcataatgttctcaggttcgtcagtgttgtagcatatgtcagaatgtccttactttttaagggtcagtaatattcctctgtgtgtgtgtgtgtgtgtgtgtgtgtgtgcgtgcgcatgtaccacattttattcatctgtcagtggacacttggtttgcttctaccttttagctgtggtcaattatgccattgtcaacataggtgtacaagtatctctttgagaccctgctttcaattctttggggtgtatacctagaagtggaattgctgggtgtatggtacttctatttgtaattttttgagggaccatcatactgttttccatagaggctgcaccattttacgtgctcatcaacgagggttccaatttctgtgcatcctctcattacttttaaaaatatatcctttccatctttactatagataaatgtaagtacatacaatttggaagctaatagtcttttgaaatagtattaataattaacattttcaaaagtagtcttaaaggcctacttttttgtaaaaatctagaaccaatgagtaatttatgacttcttatgtatgaagttaaatgaacacaaaattttattccttgtctccttgattttgcttatgtaatatcacctattcagcctgtactattactctttgaattttttctctttcaactttacattttggctattgcatcgttttttctcccccagtaactgcataattttgaatatgtttaacttgtttttatactcagtatcagtcatttcccccaaactacataattaaaatttatgaactatttcagacatacaaaataacatatataaaatatctttttttagttttaaagcatcacattcacttttaaaatgcatttcagatatgttaaggaattattggttgattgtctttgtaagaaatacaaagtcctcatgcatggaaaaatatagcttctgtaattttgtattacatacttaaatctgtattttggaggtgctgttttgctgggcaaaggaatggaatagattttgttaaagataaatataatgcaaactgaagacagacacaaaagactatatattatatgattccatttatatgaaatatccagaaaagcaaatttatagaaattaggatcagttgttgcctatggctgggtgtggaagcaggaactaactataggcatgagaggactttttgggggtgatggaagtgttctaaaacgattgtggtgatggttgcacaattctatatatggtacaaaaatcgccaaattgtacagttacagtgggtaaatgtagagaaatataaattatacctcacagagttgttaaaagtttaaaagcctagaaatatttgacttccgtttggaatagatatattcggagtagacacaaaacctgtacactacccaaaaactactttgaaaatatcaccctgaaaggctgaacttgctgtcagcagacctgcctccctttccacacaacttaagcaacactgtgtgtgtttttgttacagctctttccaacaactgatcctgtgggtactttgctccaagttccagaacagatctctgctcatctacctcagccagctgggcagattgctacacagccaactcaagtctctctcccacccaccgcagagccagcaaaaacagctcaggtaaagccggggatatggtttcatggtcactcctttggatagatgaaaagagcagatattaacgtggaatataacctaatgtaatcaggttaatgtcttggtagattttgaaacaagttagaaattctgtcttcacatttttaagcatgtacaggtaagagaattttacaaggatcacatgcaggtttttaagcaacagaataagttaatgatggaaatatttcaaacatcaaaaattttgggctaatttcttgtcagctttgtattagataattacatttaacttcagaatgcagctcatgaagttcaacagagactaggagaatcgatggctgtactgtttttgttgttgttgttcactcaggcttatactttttattaatactctttgttttctgtggtttttctctattactctttttaagttatttgtcaattttgtgagggttggtttgttaagtccgggtattataatctgtaaatcatttatccaggtgcacacaaactttattaaatcatacttcattgagagcagccaagtgaatgaaggccccgtagtgggctgctacatgctgtgtaactccttctctcccttcaataaacctcagacactgcatacaacatgtggccctatggtacatggttaaagtaagactttcaacgtccatttattaaatattagaagttccattttcttgtctaacgttttagatgaaaagaaatataaattaaaggtctgatttttttttttttcttttgcaccccagtagatcatctcgtgttctgcctttggagatcactgctttgagcatttccaattagtcatggcacttacttcatttaactttgcatccctcaagctttccatttctgcttggcatatgggaaaagatacagttgtcttaggaaaattgatggaaaaattagattcattttataaacaacttaaatcgaatgcatgtcctcccataagcaagcgctgtacaattttcagagaggattagtttagccataaaaagactggaacctatgtatgggttggatggatttctgaagggcagctggttcagggtctaccttttgtactgccatatggtgcactggcagattttttaaaaatgagaaacctagctttgtgtttttcagtcttgtagaggggaacaggggtctcagaaatataaaatgtaaatgtggctatatgtgaaatttcatctgggcttgagagttttctttctcattgtgttggacttaaactgacattcagcttttgttgctgccttggagtgcatgtcctcctccagcagggaatgtcctggggattagtatgacctcagctggagatgaagaaaattgctgccaagtaaatgattcctctgccagtgaccattagtcacctccccacttaatgtttcaggcaatgactgtatacctttcaatgctttttaggctttgtcttcaggatcaggttcacaagaaaccaagatcccaatcagtctagtactaagattaaggtaagtagacattttttgttttgttttcttttgttttctgaatattctgcatgtgctgtaatagtctgtgcctgagagtaactggataggattgtatgtcctccagcatcaagctctgtttgcttggtggtgtattatttttccccagaaataatagcaacagtgtgaggacctgcatgttagcaggtgttgtgactaactgatgcacatgttctctcagttgtttctgtgctaattggtgatgagtttgtgtatttacagtgtagctagtttgggttaggaggtgtagcctgtaattgaggaacagtttttaggggagcagcactaactggcttatctgaagatcagtcttataattgtgacgaggtaaactctgagatcaactaacccaagaggggagcactttttgattgtggtagatcaaataaaggccttgtttttagaaggttaaaaggaaacttctaaatgtttttgtagtctgtttctgttttgcagcaagtaccctaaattggtggttcttggtgggaacatatagagaggtcctgacagattgctcagcaggaagtgccataggtagcagtctgttcattttaactccctgccccgccccccccgcccctagcactagtagctggattcaaattccagagctttcttgtcagaatcactatggctgttgtattgctctagttaggtctctttctactcataaatgcatttgaaaaaaaattagtattaaagtatcacttgaggcaactcaggccttttaaaactattactaacattttaaaaaagagttccactgaattaccattaactcattccccttgcacatataaattcctagtcatctttctgtaaggtcctaattggagatagaggcagcaagagctatttaagagaatgtggtaaggagaatctcattgctccttgccactaggagcaatgcatttatgccataaatgtgaaaaacatatttggttacctttcctttacagaagcctacttagtatacctggtctcatctcaaaaattctgagttactaggatgtcttgacaacttcatgctgttttaaatctacataaagaataacactttaagaaaattattgtgaaatgtattaagcacagactatgtatagcactcttcggtactgtggaaaggtggatactgagaaaagagaaaattaaatgactcccttaataatcaagtctaggttggaagttgatttgaactatgtacttacacagctaaaagcaaatttcaggtagtatatacatgcagaagtataagtttgtatgtacctgtgtagaaagaacgcaatgcaagggaaaatcatttggggcatgttatatttgagatgggtagttctattttaagcacaatttcagtaacatcctcaagtatattattcatcaaatagaagtaaaccctctccattatttatataaaatagatttgagtcctaagtgagcaggcatatctgcccttagatatagtgttctcatttctctgtctttaaacaaaacctccagggatcctgcttaatctcagtgcatggtgtgatcatcactgtaactgtacctcaccagtcaggtttgaatttctggagtcatatagtaactctgctaccagtatggacccaattcctttccctatcctctctgcctacctaaatcctgcatatctgttaagtcctatataaaaactacctctaaaatttttccttattatccccatctctcatatattctttgaattcctatggaatttgagggagtatcatgtatttcattttatgagtctgccaagactgatcaccagaggtaggcaatgaattgtgggcatgtaggagtggggataaggatgaaaaaggcatcctgtatcattttaatcacacctccctgtgctcatacaattttcctcttagttttatatgttcttggtgtgggaataaggatgggagtgggcatataagaatctactcaaaggcatgaaatttttatattgatcagtaagggacatagattcaaagggttgtaggacaattagatggtcattccgaattggttttgctctgagctctgcagtgtgaacatatctgaatacatcatatgatctatgggaacaaaacagactttcttgaggcacagctttcttaatatatgttggcagaatctctttgcataaatttagaaattcttattttatgcattctgctttctttcataggaattccaaaaaagaactaaatgatattcgatttgaatttactcctgggagaggtgaggcatcaaatggattgaaaacaaaatagcttccaatttgtgattcaatgaaatgtgttgtgaagtttctgtcctttgtgaagttttgcttttaaaggataataaaaattttcctggttttggcgagtatatgagtgagataaaaatgcagttcgttgactactaaacacatttagaaaaccttgtataataatacaaacagtaataaatatatgatagctctttacagcttactataggccaggcattgtcttaagcgttatcttattaaattctcacagcagtctactaaggaaaaattattatccccatagtatcgatgatgaaatcaagacttaaaggcaaagtaacttgttcaaggtcacacagctggaaagaggtatagctggaattcaaaccagatctgtcagaatccaaagttcattctttatacatggttgttctccatgatggtaaagaaacaaggtctgcagtctcctctctcctcagacagaagctgaggtctgtcatgtactgtttctggctgttgaacttcaccttgaacaaggtgtgttttgtttcttgcctttattactcagtgttctaatttggggagtagccagcaagtatctgttctgtgtatcatgcttattcttcttgctgtctcactatcatgagcaactaaccactaaagagaaaagatgcaggtgtacagaggtgtcacctgttttactttttaaacaccaggcaacatcacattttcaggaattaattcaaattgctggttgcctgtgtgaatgtgtggacactgtctccaccgcagtcctcctgttccctctgaggggctcattttcaagcccttggcaaccaataccactgagttggttgaagatgaggttaattggggatattctgtcctcatctttttagtttctggttatacccattgctcagattgtaccacctggaataactagataagaagaaaagcccaccagaataaaaaagtaaatgattttagcaaaaaacttggagtatgattcccaaagagaagagacaaaaattttttgagacaaaaattgttgccttagtttttgagaataaatcattctggttttttagccctagagatgttcagtattcaacatcatgtctcagatatttgctacctggtttatacagattctgccctctagctagatctgtgagaattccacttgagataatctcagtggtaggaaaagtctttgtatggaaggaaggccctgcctgccttcttggttctgtggatttagcatccagcttgggcctagcatggcacactgacacccacatgagctgtgagagttaacagtggcaagcacgcacaaaaaacagagcactgtcttctttgtccttgcagatacagcagagggtgtctctcaggaactcatttctgctggcctggtcgacggaagggatttagtaataggtaactccattgcgttctgctcatgtgctcctgtgtctctgtctgtatacttagtacatagaaaagcaggttttttattccactgagtaggtctgatggttcttgaaatggttcttggctttcctgaaattataggtaatgggacagttccttacacacacacaaaatttcacctctgagtttgctttgtgacctccaatgatggtaagtgaaagcacacccaaggtctttaggagattaatagaaattatggcaaaagtcacaagttaaagtaagcttggccatatctgatctgttttggatacctaatttttgtggcccaagttgagcaaaagtcattagagatttagtactagaaaagcaggaaggaagagagaaggcccagtgaggccacaggtccatgttactgaaggaaaagaccatgtccttagacacagttttccgtgaaaaaccagataataaatagtttaggccttgcgggccatgtacagtgtctgtcacttttaaaccactcttagcttgccggagaacaaaaacagaccacaggctggtttgttgacttctggccttgggctttctgatccataaatcaggaaatcatacctcttttacctgcatgtttttcctaggttaatacaacattttaaagaaagttaatttgacagtggttcaaggtgtactactcagaaatgagtttaaaagacactttcattaggggagtgattatttgatctgtctgcttccattttgattgtacggagcatattcttaactaccatttaagcttttaaaatatggttgaaagtggatttatgtaacttctcattcattaccttctctgtttgtatgattacagtggcagctaatttgcagaaaattgtggaagaacctcagtcaaatcgatctgtcactttcaaactggtactcatcccttcttccttgtgaaaacatcttgccttttatacactggcagcttctccagaccagcttctatatcccctgagtgatgagaatattaaaatgtggtggattgtgttcatttagcctccccagtgccctgggctgatgtttccctttgagtggccactcttcctctgtccatgccaggaaacctctgaccccagagacccttggctattcataagagaaactattagccagtctgactctagctgtttacccagcccccctcttttctggaataaacaccttcgtcagtctcctatttgtatcctagggacctgttgcccactgcctaccttcccactatcccatgtctgttttatttgctacctgcaagtttgtttataaataatcacagtttctcattttgtttggttcttaggcatctggtgtcgaaggctcagatattcctgatgatggtaaactgataggatttgcccagctcagcatcagctaaaccacaaccctggaagaggcggcctaaggagattccacacatgcgtatctctgttgcttctattggcctaaacccactactgccaaagaacccagcaacaaacctcccggctaggagctttagaagtctttatgttcttcctgccatcattcctccttttcccacagggaaagaaaagttggatcactagtggccagcatccccagagttccgttagtaaacttacttcatatgtcccctgtcttcctccatctgagaagtggcccatgtgcttcaaggcccaggagggagatctgtcagctcattcttgccttactccaatgatggcccaggtggaaaagtagcagctgtatcgggcttcctcatcctgcctgttcccccacacctgccaggatatggacatcttgggatatctctttaccactgaagtagaattgattgttcagctggagcccagagaatttaatttaatgttttttctttgtacctgatgtgaattctagcaacctttgttaggaaaaagcacagcctcagatggaggcagcctaaactgtgttcttgttttgttcatggtgtttctaagcgttttgctgaagctgctctcaggcacccccttcttcattgctctctccagaaagggttgctagccttaacttcagctggtgcaaaacatctgactgtagccgaacttcagccatcagatccttcaaagtggaactttggattgtttttacagacaacatcgagtaatggcttgtaaatgtgaattttgccagaggtggtttttgaacaggaaaatcataattcatatcattggagaagtatttattttcaaatatcaaattgaagaaaaactcaatcctcccatgaaaatcagttcgcctggcctccaagtcgtgaggaaatgggtatgcaaggctgagatttctacagcaataaaggagacacacactgggccagagaggcctgccttctgcctgctctcctgcactgaccctttggagggggtctctgtgtgctgaagctaactcaagatggaaagtgaaaccacatgtgccgtgacctttaggttttatgagtagacagtgttcatttgattttctacagaaataatataaattattctttaggtttaaaaaagagcactcataatgcaatatgtgaataatcagtgaggttgatttttcttttttcctaccgtttcatagtctttgtctaactgctagtaaccctaccgagttttatatatgagtgggatactcaatctggccttaaaaagatacacaaagatgggctgtgggtccctggaaagggggagagttgccctttacagaatcactcgagccctttccagcactgttggtctgatgaacaaggttgttttaccttattttctcttggaacatatctgaaaaccttccccacaaataacttgtcacaccttttgtttcattctgagtctttagttttagtcatgggctttcttcacctgctctaggtgcaaaggcatgttgggaaagagatggatgttggggaggaagagaggagatggatttcagttgggagttaggaggagagtaggtgagatgatcagacaccggagttcaacgtcccagcagtcttggtaaaaggagggagcctgctgagccaggagggagaaaagaagattgaccagcttgctagaaaaatacttagcttttctttttctttttttgtggaggggggacggagaggaacaaggatggggaggtaggaatgaggtatagaaaagagatagcatcttctttggcacaagactagtggcttaccgcttaccttagagttttgttttttttttttcaaacccatcaaaatctacttatttatgaatccaaggggtggcagcatcactctgttctagcattctttgtggagatggtctggtgcctagctgggagtgagcagcagcccatcccctgttcactttctctagcccatcattacctgtgaactgcagtggggcagtcatggcaaatagaattgggctggggtttctccttcttttcagttcattgtttgccctgctaggaattagaagacagacaccatgtcccaggacagtgttacttcttctgcatgatgtgtggtagactccctttgctggcttgtgcagtgatactgagaaaatacatgaacagaaactgcccaggtggaacagcacgtaacctagtgagtgactgtactcctttctaggaatgctgattcagagtgcacctctttgactaggtcccaggatccccttgtccctggagtagggactaactatagcacaaagtaatatgtgccaatgctatttgtgaaatgtttggtctttctaaacgactaaaggatttgttgggtttttgcttaagttttgaaccaaatcctagagccagctgataatatttaataatctggaggagagaataatgatgtaccaataagtggagattcctccttatgatgtatgctaggttatggaagatgtaaaatattcaactttttcctcctttttttggactttgtattttactgcatgttttcttcatttttaatcaataaagagtaaattgtcct

SEQ ID NO: 264 - DNA, 9287 bp, Homo sapiens
  source 1..9287: mol_type = genomic DNA; note = NC_000001.11:6579994-6589280 ZBTB48 [organism=Homo sapiens] [GeneID=3104] [chromosome=1]
acgctttgacgtcacgtccggcgcggagacggtggagtctccgcactgtcggcggggtacgcatagccgggcactaggttcgtgggctgtggaggcgacggagcagggggccagtggggccagctcagggaggacctgcctgggtgaggagggcgcggggtgagggagggaggggctgcgggccgccgtggctgccttccgctcggccgctcgggacctgtgggcgcggcgtgggcttcgctcacctgtccccggctgccgccctccgccgtccgggatcctctcactgtgccgggccagtccgttcgctctcatcccatgtctcctttccccaaacttggatttttctcaccaggcccttcttcacgaccctggccccccatccagcatcccccctggccaatccaatatggcccccggcccccgggaggctgtcagtgtgttccagccctccgcgtgcacccctcaccctgacccaagccctcgtgctgataaatatgattatttgagtagaggccaacttcccgtttctctctcttgactccaggagctttctcttgcataccctcgcttaggctggccggggtgtcacttctgcctccctgccctccagaccatggacggctccttcgtccagcacagtgtgagggttctgcaggagctcaacaagcagcgggagaagggccagtactgcgacgccactctggacgtggggggcctggtgtttaaggcacactggagtgtccttgcctgctgcagtcactttttccagagcctctacggggatggctcagggggcagtgtcgtcctccctgctggcttcgctgagatctttggcctcttgttggactttttctacactggtcacctcgctctcacctcagggaaccgggatcaggtgctcctggcagccagggagttgcgagtgccagaggccgtagagctgtgccagagcttcaagcccaaaacttcagtgggacaggcagcaggtggccagagtgggctggggccccctgcctcccagaatgtgaacagccacgtcaaggagccggcaggcttggaagaagaggaagtttcgaggactctgggtctagtccccagggatcaggagcccagaggcagtcatagtcctcagaggccccagctccattccccagctcagagtgagggcccctcctccctctgtgggaaactgaagcaggccttgaagccttgtccccttgaggacaagaaacccgaggactgcaaagtgcccccaaggcccttagaggctgaaggtgcccagctgcagggcggcagtaatgaggtactgtgcccagggtgttgggactggggagacaaatagagggaatagacacttttttggtataatagggaccctgggctgggtgtgatggctcactcacgcctgtaatcctagcactttgggaggccaaggggggtggatcactttagcttgggagttcgagaccagcctgggcaacatggcgaggcctcatttgtacaaagactatacaaaaattagccgggtgtggtggcacacacctgtagtcctagctactcaggagggtgaggtgggaggatcacttgagcccaggaagtggaggttgcagtgagctgagatggtgccactaccctccagcctaggcgacagagcaagatcctgtctcaaaaaaaaaaaaaaaatatgtggaccttaagacaatctctgttaatgtgggtttggaacaggctttctccaaaggaagctggtgacctcaggctgacctttctgcaagccccagctgttcacggttgccaccttcctgagaggagtgggcagcatcagggttacaggtgtttccccagggcagtgtttccagctgagcttccagttccccacaaacacagccactttcctctgaatccaagattcagatgctctgccttgggcccctgaaggaacttgtctgatgaagggacttgtcagggttggggcttgggatggaactggagctgggtccctacaactcctgctgattcatttggtgacgccaccccctcctgctgcctattgtgctctagtgggaagtggtggttcaagtggaggatgatggggatggcgattacatgtctgagcctgaggctgtgctgaccaggaggaagtcaaatgtaatccgaaagccctgtgcagctgagccagccctgagcgcgggctccctagcagctgagcctgctgagaacagaaaaggtacagcggtgccggtcgaatgccccacatgtcataaaaagttcctcagcaaatattatctaaaagtccacaacaggtaaacgttctgtttttctattttcttttcctgtctgccattcccacgttgggggaggggtcctgcacttcccacttctgggtgaggtaggggctgggggatccatctcagacccacatagtgtctggccttggtacacctctgataatcaggaagtgagagcctgctttgggttggattcttcttccttgctgtcctgtgagtactctggttggagatgggtttgtgtacatcttgtcaacaggttccacccactgtggaccttgacctccagctggtctctgctaacagaatgagaaacctgtggcccctgtgctagagctggggcccaaccttaggtgtttctgaagcctggcagtgtgggcttgaagcctggcagtgtgggctttgggccacagtgccaagccttggttcagtgctacctgcgtttccagggaagtgttcactctggggtgtcagtggggcattcaagtctatttgtctaaaccttcagcgtccaataaagtaaccaggaactccaggagctattacaatttttatttttacatttaatggagacaaggttttgctctgttgcccaggctggtctcaaactcctgggctcaatcgatccacccaccctggcctcccaaagtgctggaattataggtgtgagccaccatgcccagcccccaggggctattttatgttttttgtttgtttttgtttttgagttggagtcttgctctgtcaccaggctagagtgcagtagcgtgatctcagctcagtgcaacctctgcctcctgggttcaagtgattcctctgcttcagcctcccaaatagctgggattacaggcacatgccaccacacccggctaattttttgtattttagtagagacggggtttcaccatgatggccatgatggtctcaatctcctgaccttgtgatccacccgccttggcctcccaaagtgctgggattacaggtgtgagccaccatgctcagcctatgttgtttttcattttattttatttttttgagacggagtctcactctgttgccaggctggagtgcagtggcatgagatcggctcactgcaacctccgcctcctgggttcaagcgattctcctgtctcagcctcccgagtagctgggattacaggtgcctgccaccacgcctggctaatatttgtatttttagtagagatggggcttcactatcttggccaggctggtcttgaactcctgaccttgtgatccacctgcctcggcctcccaaagtgctgggactacaggcatgagccactgcgcccagcctgttatttttttttttttttttgagacagtctcactgtgtcgcccaggttggagtgcagtggcatgatcttggctcactgcaacttctgtctcccaggtttaagcgattctcctgcctcagcctcctcagtagctgggactacaggtgcgcaccactacgcccagctaattgttttacttttttttttttttttttttgagatggagtctcccctctgtcgcccaggctggagtgtggtggctccgtctaagctcactacaacctctgcctcccaggttcaagcgattctcctgcctcagcctcctgagtagctgggattacaggcacgcgccaccacacctggctaatttttttgtgtgtgtttagtagagacagggtttcagcatgttggtcaggctggtttcgaactcctgaccttgtgatccacctgcctcagcctcccaaagtgctgggattacaggcgtgagccaccgtgcccagccatttttttactttttagtagtgatgggtttcaccatattggccaggctgatctcaaactcctgaccttgcgatccacctgccttagcttcccaaagtgctgggattacaggcgagagccaccgtgcccagcccccagggactattttaacttaaaatttaaaattaaataaaaattcagttcctcagatacgttagccaaatctgaagtggtgaggaaccacgtgtctcctggtggctgaatcgggcagtgctgacatagcacatttccatcatcgtggagaatccccttgggcggcactgctttggagtccctgcaaggcctgtggggatggcggcccagtggcatgccttccagtcctgccactcccagccaagacatcactagtctatcatggtgtgttttcttgccatgccaggttgggcggcacactagtaatcacctagaatgggagccagggggaaacccgttcgctgtccctgtgcaccgtgttcagggcagctgctgccagtggaatgctgggataaccccagtgtcgggggtcctggggcagcctgtgtactgctggatgcttgctttcaagtactctgctggggtaagactctggggcagtttccatcccttccttgggcttcagcttgctggactggccctgagaactgggaggggatggcttcatgaagtcattttgatgggggatgaagatagttgctgtagaggaagaggatgagagagctgcttggcctctggaaggtgggaggagctgtcgcaggctgcacaggggctctgaggtcgagttcgtttagttcattgattaagcagtctaccaggtggccagcaaggctttgtgggtgcttgggatgcatttaagggaactaaacaaaggtgcttgtgcagccgacctgcttgccaggcaatgcagataacagataagtccatctgcctgcagtagacggtgaggaagtgctgccgaagaagaaaaagcagaggcgggccaaggggttggggagttgtgagtggggttcgattgcgattttaagtagccagggtctctagagtcttactgagaaggtgagatttaagcaaagactcaaaggaggtgaggaagttgaccaagtgggtgactggggagcatctgggcagagagaagagccagggcgctggggtaggaggatcctgggggcgtgacaggcagcaaggaggcacatgcctgatccaggtggccagacgacaccctgggagagaagcaggcaaggggagggctgcctgcgccttgataggcctcccgggccctttctctgaatggggaagcactggggatacgtgagccaagaggtactgaggtctgacttaaaggtccttctggctcctgaactgaaacctgtgggggaggcagtcacggagcggggagaccagatgggcagctcccctggctacctgggagaagctgttgccagccttggtgggccagtggagtcaggtgaggatctggccatgggtttgaagctctgggaagactgagttgcttctccaatagtcaggacccaagatctgtttctgccttcagacagaatgcggtcagctgggcctccctgtcggcctctgtgctggccagatccatggcagcctcttaggacctgtgtgagcttcttgccactgcactctcccttgcagagtctccatgctgggggaggcttctgggcttgtccctgcaccttaaccagccggtgtcacctgagaacacttgttccccttagaagggacccagagggggccctgggtgagggagagatgggaaaccctctcagcccccccacccctgtggcttctcctggcaggaaacatactggggagaaaccctttgagtgtcccaaatgtgggaagtgttactttcggaaggagaacctcctggagcatgaagcccggaattgcatgaaccgctcggaacaggtacttgggagctggcccaggtacttgtgggcagggcacactggcctctctgtcttcgtgccatccgggaagggccccaggagactgtctgagaggggtactgtaaactcaggaaagctgtggggtccttggatgtcatgaggtccatgccctggtacaggtggggacacaggtcctgagggcggaagggacaggcataggagggactctgtgggaggcatttggggttggctttcctaggcccctggcccacctccaccttggctttggagaaggggagccgctacaggggatggcagctgggaaaggccccctggccacccccagcaaccccactgctggcttctgtgtcagggcccgccgaaacccaggcccactcttcctagaggcctgtcagcagccactagggccagggactgtgggtgaggccactcggaccctgcccccagtctgtctgggcctgagaagggcctggtgtgcggtgggcttgcagcactcagtgatggtcaggccaggcaggttatgtgttgccctctcccaccctagcgtccccaccctccccaggcagactcttcccagcagcaagcggaagcccgggcagaggctgctgtcataggcagaggcccccgctgatgccggccctgcttgcccctcacactgccaggtcttcacgtgctctgtgtgccaggagacattccgccgaaggatggagctgcgggtgcacatggtgtctcacacaggggagatgccctacaaggtcaggcttggcctgtctccagggccagggttgggtggccccaggatccttcctgctgagccctttacgtggggtgctgtcaggcacctccctcacagtagctgtcagggagcctgccttccctgccttccctgcctttccagtgcccccttatctaggcagggctactgtctgcagcctcacctccaaggtccttattaggcccttgtttctttccatggaggacaggcttggcatcctctgggcagctgagccctgagggccctcctttgcaccatccttcacaccagatcaggggtcctcccagaatcatctcaccggggcctccctctagttcctgccctatagcccaagggtgggtggcagggtttcatgggtgcaggccgccctggaggtgactgtgggcctctttttcagtgttcctcctgctcccagcagttcatgcagaagaaggacttgcagagccacatgatcaaacttcatggagcccccaagccccatgcagtaagtgacagggagggctgggcatgctttgatgctggcatgagcaagagtgagctgtgcccagagtgggcagccggccatgtactttctgttgttcgggggggtgcttgtgggtctcccaggcagcccttccctgctctcaccctggccctggtccctccctctgcctgcctggtctgcctgcagtgccccacctgtgccaagtgcttcctgtctcggacagagctgcagctgcatgaagctttcaagcaccgtggtgagaagctgtttgtgtgtgaggagtgtgggcaccgggcctcgagccggaatggcctgcagatgcacatcaaggccaagcacaggtgcgtgtcgcccgttctctcttggggcccagtcctgctgccagcccaggcttgcaccggcagggaagacagagtttgctgacttttacacagatgagtgtgcccttggcctccaccctgaatctagtgcctacagcctctctgggatagtgggacctgaggggcaagcagctatgccaggcagagaggctgggggcagatgtttcaggctcagacaagcctctgtgcccccggggcagattctgagcttccttagtttcctgtgactcctgctcatagattgtccttctgctctcggggtggaggtggtgcccctttcctagcactgcccaagccctctttccaccaggcatgctcctagctgtagcagagcaagggggtcacttcccttggtgatggcctctgccccatgtccccaccttaacaggaatgagaggccacacgtatgtgagttctgcagccacgccttcacccaaaaggccaatctcaacatgcacctgcgcacacacacgggtgagaagcccttccagtgccacctctgtggcaagaccttccgaacccaaggtgaggtacgccctgcccctcccctcgcctccccatcctgaggccaaggccacaggctgagctcttgccttgtgcctgcagccagcctggacaagcacaaccgcacccacaccggggaaaggcccttcagttgcgagttctgtgaacagcgcttcactgagaaggggcccctcctgaggcacgtggccagccgccatcaggagggccggccccacttctgccagatatgcggcaagaccttcaaaggtacctgggcggccctgggagagccatttcctgctcatccgagttggagggtctctgaggaggaaacgctcctttcttgcctgtgaacctcttttgtgccccacatggttagagttgagagtggacctgctttgaaggcaggggtgtcctgtgcagtagtgaccctgggtggcactggagagcctggcagggcctgtgcagcacttgtaaaccactggtcccctcccttgctgcctgtcccaacctcctgctgggtttcctcgagggtcccggggctcctgcatgatcccccacggtgttctccctcttgcagccgtggagcaactgcgtgtgcacgtcagacggcacaagggggtgaggaagtttgagtgcaccgagtgtggctacaagtttacccgacaggtaggccagggcctgggccccttcccctaccctaggatcccccaaagttctgagctcaccctccccgccaggcccacctgcggaggcacatggagatccacgaccgggtagagaactacaacccgcggcagcgcaagctccgcaacctgatcatcgaggacgagaagatggtggtggtggcgctgcagccgcctgcagagctggaggtgggctcggcggaggtcattgtggagtccctggcccagggcggcctggcctcccagctccccggccagagactgtgtgcagaggagagcttcaccggcccaggtgtcctggagccctccctcatcatcacagctgctgtccccgaggactgtgacacatagcccattctggccaccagagcccacttggccccacccctcaataaaccgtgtggctttggactctcgta

SEQ ID NO: 265 - DNA, 21388 bp, Homo sapiens
  source 1..21388: mol_type = genomic DNA; note = NC_000019.10:47821937-47843324 CRX [organism=Homo sapiens] [GeneID=1406] [chromosome=19]
ccttcagcctctgctgtctggccgctctgtctaggtcctgggccacgggagagccccgtccctcctttctgaaggtgagcgtctgcaggagaggcggaggggaccgaggaggggagaaaaaagagaggggagaagttgggtttatcttattcgtggctgtgtttgccgtgctctgcaggtgatgtttgctgaatagtcacacacaaaacagaggtgccgtcctggcatttgtggaaacggggctaggctgtgattgcagcaggagggagtaaggttagacagcagggactggctgatggcactcggggcattgggaggattcagggtggcttgtgggcaagggggtcccctcaagccctgacggcatccggggttgggggcttctcaccgtggttctaaggcaactcctcagcataccgctctgttggatgttctttaaaactcttagcactgcctgaaattttcatttgcgcgatgatccacaaatggcctgtctccctcccttgttgagcactgatttttccccagtgcccagcgtgtggttgggatttgcctaaatatgtgttgcatagatggatggatgaatgacagacaagggacggaacagacatatacgcagagagcccaggtctgtggctgcaacaggaagaactccgggtggacttgggcctgcccgagagagccaggaatgtgatgactggggatcactgtgctggtgaattgatcacttagggcctcaatgcacccagaggctctggctttcagcccaggctctacttcgggactggggaatcctcacgcccccgccctcttagcttccagcacagtcactctctctgatcttctttctgcaaagtttttttttgtttgtttttgagatggagtcttgctctgttgcccaagctggagtgcagtgccacgatctccactcactgcaacctctacctcctaggtccaaggagtccatccacctcagcctcttgagtagctggaattacaggcgcgtgcccccatgcccagctattttttgtatttttagtagagatggggggtctctccatgttgtccaggctggtctcgaactcctgacctcaagtgatcagcccgcctgagcctcccaaagtgctgggattatgggtatgagcctctgcgcccagccggtctcctgcaaaactcttgattgacaccttgtttcccgtctgcccctgtcaggagggctgaggccttgtctgtcttgctctcggctgtattcccagtgcttgggtcagtcctagacacacagtgagtgctcagtgaatatgcagggaatgaatgaatgaatgaagggcagaagggtagaagcaggtagacagactgccacagagaggaggtgtgatgcggttttcccaaaaggaacgagcgagggctgtgattgccacagagtgaggtccgacttcagggctgcccactgtgtgtgaatttctggatgcttcagggatcacattgttgatcacggagttgatttgctcaggctctaactgtgccgtggatcccagcttcccccaggtctcatggccggcagtgggtgcatccacccagctccttgtccccgctggacagaggagccaacagaggctgcagagagaggctggagtggctgacaagggagggccctgaatgtggctgagctgggagggtcttgccaagggctggcatgaagccacatgagtctggttttttttttttttttttgagacggagtctcactctgtggcccaggctggagtgcagtggcatgacctcagctcagtgcaacctccacctcccaggttcaagcgattctcctgcctcagcctctcaagtatctgggattacaggcgtgcaccaccatgcctggcttatttttgtatttttagtagagatggggtttcaccttgttagccaggctggtctcaaactcctgacctcaggtgatccacctgcctcggcctcccaaagtgctgggattacaggcgtgagccaccacacccggccgagtctgcgtttaaatcttgttcttttctcactgtgtggccttggacccctcatgtgggctctctgggccttggttgcctcctctgcaaagtggggacaatgataagctgtcaccatgatccagccagatgagccatattgcaggcctggcctgcagtgggagcagggcaggagaccagcctcattctgtttctagggtccctaggtagacttgggggtgaagagcggggctcgggggccaaagagatttaaattttacccctggttcttccactcatcacctgtgtgacctcgggaattgacgaaacctctttcagcctcagtttcctcctctgagaaagggacctctgagctccgtggggctgtggggagcatcctaagaggccatatcgccgggtgatcaggagggcaccggctccggggcaggtgctggcccagctctggctctgccgctgacgtgcgagacagaactggagactacacttctctcagcctcagtttccttctctgtaaagtggggatgataccagaagccgcctgggaggaagtttccatggagttactgttgcctgagatcttgttcccaaggtccatggtgcatgcagtgtgtgagaagctggggccccctggaggtccttaaggtcatcagccacctgaactgtgggcacctccctccctcccaggctcagtctcccccgctgtagaatggagttatctgcatgtctgccccaccaggtggctgtgagcattcagacctcacctgtgggaacaactgctcagctgggaacctgggacccagtgagtgccgaaccccacagctctgagaatcagcctggggcctcccaggttgatccccagggcagagacactgatattctttgttccaccccttgaaatcataaaacatcagtgtctggaaattgttgtcattgtgagatcttgtatataaagcctgggccaagtgtctgccgagtgatgaattcctggacattcttttttttttttcctccccaggagacaggtcctctttcgattgattgattttttttttttttttttgggatggagtcgtgctctgtcgcccaggttggaatgcagtggtgcaatctcagctcactgcagcctccgcctcccgagttcaagagatttttgtacctcagcctccccagaagctgggacaacaccatgcccggctaatttttgtatttttagtagacggggtttcaccacgttggccaggctggccttgaactcctgacctcaagtgatccgcctgcttcagcctcccaaagtgctgagccactggcctggcctgttttgttttgttttgagagaggatcttgctctgttgcccaggctggagtgcagtggctggatcatagctcactgcagcctccaactcctgggctcaagcgatcttcccacctcagcctcccagagtgctgggattacaggtacgtgccaccacgcccagccctcactggaggcccttctgtcatcagctgcctcaggttgctgccaaacccagggaaagatttcagtggatgttcaatattattattgttattattctctgctgacatcttgtctaggcagcactttatcattattatcagctgtttgatctggggcccacactttcctcctgctgagcctcctctcccctatccgttaaaagggatgatcctggccaggcactgtggcccacgcctgtgattccagcacttagggaggccgaggtgggcggatcacctgaggtcagaagtttgagaccagcctggccaacatggagaaacccaatctctactaaaaatacaaaaaaaaaattagccaggcatgatggcacatgcctgttgtcccaggttgggaggctgaggcagaagaatcgcttgaatccgggaggtggaggttgcagtgagccaagattgcgccactgcactccagcatgggtgacagagactccgtctcaaaataacaacaacaacaaaaacaaaaacccagaaagtggtgatcgtaaatgtgagctttcttggctttcctggaaggttaactgcttagccaggcaatctgactcagatttgacggcgaagacaatgaaagtgtgtgcttttgttccaggccctgcaaatggtccccagtggggcaggttcaccagtttccttgtctccactctctggaggttcatatttaacattattggtttttggagaagtgggagaggacagagggaacccaggttagggggctgggggaataggaccttcaggaattactctagccttgaaatcctggattctccactgccagcctgtgtgtgatcccgggtaagtcacactttcgagcctgaagatgttctctaaactgtaagcatcaggcaaaagcagtgtctcatgcctgtaatctcagcaatttgggaggctgaggcaggaggatctgctcaggccaggagttcaagaccagcctgggcaacatggcaagacacctctctctacacaaaaatttaaaaaattagctaggcgttgtggcacacctgtagtcccagctacttgggaggctgaggtgggaggatggcttgagctcaggaggtcgaggctgcagtgagctatgattgtgccactgcactccagcctgggtgacagagtgacatgctgtccctaagaccaaaaccaaaaccaaaatgtaagcatcatagtaatacagtctctacctcccaaggttgtgctggggatttaatgactacctgtatagagaaggcttgtgtattagttaactattgctgggtaacacttatcctaaaattgagcagcttcaaacaataaacatttctgatctcttatagtttccaagggacaggaatccaagagtggcttaactggattattccggctcagggtgttccatgtggttgtggtcagatgtcggccaggactgaagtcacttaatggcttggctgaggctggggaactaacctccatggtagcttactctcatagctgttggcaggaggcctcatttctttgccacatagacctctccgtgggatggcttgagcatcctcacaacatggcggctggctttccttagagctagccttggaagccacgctctgtcatttctgcaatatcctgttggttacacacgtcagccagcttgttagtagggactacacagggcatgaatatcagggggtaaggattattgggagttaccttggaggcagtttgattttggggatttaatgtagctgcttttgattttattgtcagcactgagccttctcgtgacattcctaccaggttttacttgttctttctgcttttctccatgatcaatctgctatggtcacacagggtgccttgtttcttctccaacaagaccaagttggagaccctgtcttgctcagggtgacggtgtgagattccagcctccaagcctttgcacctgctgtttttttaattttttttttttgcctggaaatctctattccagatccacacaaattcctagatgcctcacccaccccaaatgccttcactctcataacaacctgttttattttcctgggagttcttgaaactttctgaaggctttttttttttttttttttttgacagagtcttgctctgttgcccaggctggagtgcagtagtgccatctcagctcactgcaacctccgcctcccgggttcaagcgattctcaagtagttgggattacaggcacccatcatcatgtctggctaatttttgtattttagtagagatggggtttcaccatgttggccaggctgatctcaaactcctgacctcaagtgatcctcataactcagcctcccaaagtgttgggattacaggcaagagcccctgctcctggccatggcatctttattaaaaaaaaaaaaaaaaaaaaaaaaaaaaaaaaaaaggcagggcgtggtggctcacgcctgtaatcccagcactttgggaggccgaggcgggtggatcacatgaggtcaggagttcgagaccagcctggccaacatggtgaaaccccatctctactaaaaatacaaaaattagccaggtatggtggcaggcccctgtagtctcagctacttgggaggctgaggcaggagaatcacttgaccctgggaggcagaggctgcagtgagccgagatcaagccattgcactccagcctgggggacaagagtgagacttcatctcaaaaaaaaaaaatttttttttccttgtttgttattggtttctctaggaacggaaccaagaagttcaattctatgagaacagagaagctgcggtcttatttcttcctatattcctagttcctagagcagggaaggcattcaaaaaatatttactgaatgaacagtagaatctcaacttaaaataaacagaatctgtccccctcctcatgtgagggatgagaaggaaaggacagtgagaggaacggaagagtgggagctcacaataaacaccatccatttttaattctttttcttatgtttcaaatatttattgggggtgctggggacatggcaggaaccgagatattaccagtccctgaactcaggtaactgatagaatttgagggagagagatagataaacaaacatataaatatgtcgtttaatacaagctgtgtcttgaagaaaaggaggtagggagcgtgtgtgtgtgtgtgtaaaatccagtttaggggcgtaggttgctttctctggggaaagtagctgagctgagacgtggaggagaaggggttagctggtgagaggggctttggggtgggggagaggcgttcctagcccaggaaacggcttatgcaaatagctgtggagggtgagaggttttctgagtccatcctaatgagggcaatgaggaaccctcagagggttttcatgttctgtttgcttttttgaagattttattgttgtttttgcttttgacaagaacacacacacacacacacacacacacacacacacacacacacacacacaattaaaaagtaatccaaactatagagacaagatatggctttagcattccttcccagaggcagtcactggtgccagtagcttgcttccttcctgggaattttctacgcatatacaagtgtatattctacacatgagtaaaatcaatgcctcattttgtttattaattcataattataatacttattatttttgagatggagtctcactctgcctcccaggctggagtgcactggcataatctcggctcactgcaacctccacctcccaggttccagagggtctcctgcctccgcttcccaagtagctgggattacaggcatgcaccaccatgcctggctaatttttgtatttttattttattgtatttttatttttaaatttactttattattatgactctttttttgagatggagtttcgctcttgttgcccaggctggagtgcaatggcgtgatctcggctcactgcaacctctgcctcccgggttcaagtgattctcctgcctcagcctctggagtagctgggattacaggcgcccaccaccacgcctgcctaattttgtatttttagtagagacagggttttgccatgttggccaggctggtcttgaactcttgacctcaggtgatccatctgcctcggcctcccaaagtgctggcattacaggcgtgagcaactgcacctggcctatttattgttattattgagacaaggtcttcctctattgcctaggctggtgtgcggtggcatgctcatagctcactgcagtctccaaatcctgggctccagtgatcctcctgcctcagcctcctgagtagctgagactacaggtgcggaccaccatgcctgaccaatttttgtatttttttttttgtggagacagcgttttgccatgttacccaggctggtctcgaactcctgggctcaagcaatctgcccaccttgacctcccaaagtgctgagattataggtgtgagacacagcacctggccatctgcattgttttaaaaatcacaaatggttgcgaggtatacatactgcccagcaccatacttgtttcctttgaatatataaatattataattttataatatttataatatataataacacaaataataataaatatatatggtttggtcatatacaatatataaaataacattcacaaacacttattgtcaaagtgcaattaaatgggaaaaaaagaaaaacatttggccaggtgtggtggctcatgtctgtagtcctagcactttgggaggctgaggtgggaagatcacttgagcccaggagttggaggctgcagtgagctatggcaacgccgctgcactccggcctggatgacagagggagaccttgtctcttaaaaaaccccaaaaaacaaatctgattctctgacgcatatataataagcacaggtcaaagatttatttaagtcatgaatgaaggaaccagctgtttcaaaggagaatttgggccgggtgcagtggctcacgcctgtaatcccagcactttgggaggctgaggtgggtggatcacgaggtcaagagattgagaccatcctggccaacatggtgaaaccccgactctactaaaaatacaaaaattagctgggcgtggtggcgggtgcctgaggtcaggagttcgagaccagcttggctaacaatggtgaaaccttgtctttactaagaatacaaaaaattagctgggtgtggtggctcatgcctgtaatcccagctacttgggaagctgaggcaggagaataacttgaacccaggaggtggagtttgcagcaagccgagattgtgccactgcactccagcctgggcgacagaacaagactccattaaaaaaaaaaaaaaggagaatttgatgaacagaagttgataggtttagtcaggaaagacgggctggagaaaatttgccaggttagatacaaaactggttaaagacctacaggacaatacaactgtaacctttgaggttaccttttctaccagagagaaatcatttgcaaccaaacttcctggggttaccatttaccttgtcgaagtctagactctaatcaataatgaataacagaccgggtgtagtggctgacgcctgtaatcccagcactttgggaagccgaggcaggcggatcacgaggtcaggagttcgagaccagcctggccaacatggtgaaaccccgtctctactaaaaatacaaaaattagccgggcatggtggcgcatgcctgtaatcccagctcctcaggaggctgaggcaggagaatcgcttgaacccaggaggcagaagttgcagtgagccgagatcgcgccactgcactttagcctgggcgacagagcaagactctgtctcaaaaaaaaaaaaaaaaaaaaagaatagtaaatcaaatacaggtacagtcccttagaatagggtccccaacccccggtttgtagtctgttaggcatggggttgcacagctggtgagcaagcattactgcctgagccccgcctcctgtcagatcagcggtggctctagactctcacaggaacgtgaaccctattgtgaactgcacgtgcgagagatctaggttgtacactccttatgaaaatctaaggcactgcccactcccatccatggaaaaattatcttctacgaaaccagtttttggtgccaaaaaggttgaggactgctgccttggaatatgaagcaaactttgggtgggtctgttagacaagactcccagatgacttggaaatggcatgctgtcagctttttttgtcttattgccgagcctagaactttttttaatttttattttttttgagatgaagtcttgctcttgtctcccaggctggagtgcagtggcacgatctgggctcactgcaacctctgcctcccgggctcaagcgattctcctgcctcagcctccagagtagctgggattacaggcgcctgccaccacgcccggataatttttgtattttagttgagacgtttcaccatgttggccaggctggtctcgaactcccgacctcaggtgatccgcctgctttggcctcccaaagtgctgggattgcagatgtgagccaccacacctggcccctagaacaattttttaaaactatataatggagatcttttaaaatcagttcagagagcagccttatgttttttttttttttttttgagacggagtctcgctctgtcgcccaagctggagtgcagtggcttgatcttggctcattgcaacttctgcctcccgggttcaagcgattctcctgcctcagcctcccgagtagctgggattacaggcacgcgccaccatgcccggctaatttttgtattttctgcagagacggggtttcaccatgttggccaggctggtctcgaacttctgacctctggtgatctgcctgccttggcctcccaaagtgctgaaattacaggcatgagccactgcgcccaggcttactttaaaaaaaaaattaattttttgtagagacaggagagtttcgctatgttgccacctgaacataaatgctattttctttttcttttcttttcttttttttgagacggagtccgtagcccaggctggggtgtggtggcaccattttggctcactacagcctccgcctcccaggttcaagcgattctcctgcctcagcctcccaagtagctgggactacaggcgtgcacccctgtgcccagctaatttttgtatttttagtagagacggggtttcaccatgttgaccaggctaatctcaaactcctgacctcaagtgatctgcctgccttggtctcccaaagtgctgggattacaggtgtgagccactgcgcctggcccataaatgcgattttcattcccattttccaacaaggcgactgaggtatacattgaaggtgaattactaggacaaaagaaagatggcattttacttcaataacagtttgttacaacctgtactgctacctatctgccatgggagtgtgcctttccccacactgacaccagtgctggaagttatcaacctccttcatctttgccaacctgataggtcaaaagtgatcatggaagatccacactcgctttttttttttttttttttttgagataggggtctatttctttttcttttttcagagatggggggtctcactatttctttttctttttttcagagatgggggtctcactatgttgcctaggctggttttgaacttctgggctcaagtgattctcctgccttgacctcccaaagtgctgggattacaggtgtgagccgccttgcttagcccttactgtcgtttttttgtttgtttttgtttttgtttttttgttttgttttgttttgtttttgagacagagtctcgctctgtcgcccaggctggagtgcggtggtgcgatcttggctcactgcaacctctgcctcccgggttccagtgattctcctgcctcagcctcccaagtagctgggattacaggcacccgccaccacacctggctaatttttgtatttttaatagagatggggtttcaccatgttggccaggctggtcttgaacttctgaccttaggtgatccatccatctcagcctcccaaagtgctgggattacaggcgtgagccaccttgcctggcccttactgttggtttaatgccactctcccttagggtgaccaaccaatccagtttgcctgggaccattctggctctagcactgaaagtcctgtgttccaagaaacacccacctctcctccaacctgggcaaagagggacggttggtcaacctgcagtcctgggttataagtgaggctgagcgtgtttgcccatggtcaagaaagaagggatcttggatgagggtgtgtaacaggatcagatttgttttgtttttttcttagagtcttgctgtgtcacccaggctggagtgcaatggcctgaacacagctcactgcagccccaaactcctgggctcaagtgatcctcccacctcagcctcctgggtagctgggattacaggcatgcatcaccacacccagttaactttttaaagaacactttttttttttttttaagagacagggtcttgctatgttgctcaggctggtctcaaactcctgggctcaagtgatcctcccgccttggcctcccaaagtgctgggatgacagatgtgagccattgtgcctagccaggacgagatttttagagggtagagtaggaataagagcttgcacttatgaggcacatgatggcttcagctgtctgctttgcagagtctcaagaaagctctgagaaccttaagcagaggccattttacatgtgaggacacagaggtacagagaggtgagataaatggccaaggtcacatacctaagaggagaaggaggcaggatttgaatcgcagcctgcacgtcaccccatggtgagtaactggtaagtgagtgagcatccctcctcttctcttgcaggccccctgacttgggcctcagtgtccccgaagatcatgatggcgtatatgaacccggggccccactattctgtcaacgccttggccctaagtggccccagtgtggatctgatgcaccaggctgtgccctacccaagtgagtacagtcgtttctcttggcaccccaggctggcctcatctcttggaggacctctggggtccctttgcccccaggaagaaggcaatcacaggggcgacttcagggccatacaccagccctctgggttcatctgaaatgtatgtcacttagaaaaacattagcagtcctagaaattcaggacagaggttccttttggggtgaggaagaggggatgtaatctggaaggggaatcaagaggaattttcatctgttaccaaaactttattatttatttatttttcagagacaaggtctcacactctgtcacccaggctggagtgcagtggtggtggtcacggctcactgcagcctcgaactcctgggctcaagcaatcctcccacctcagcctcctgagtagctgggactgcaggtgtgagccattgtgcctaggcccggggggcactttttttttttaattttatttttgagacagggtctcactctgttgcccactctgaagtgcaatggtgcaatcacagctcactacagcctcgaactcctgggctcaagcgatccttttgccttggcctcccaaatagctaggattacaggtgcacgccaccatgcctggctaacttttttaagtttttgtagattttgcaggatctggattatacaaaacatagaaaaaattattattatttttttttttgtagagattgggtctccctatgttgcccaggctggtctcaaactcttgggtccaaataatccgcctgactcagcctcccaaagtgctgggattacaggcatgagccactgcacctggcctgcaaagccttatttctttttctttttttttctttcgagacacagtttagacggagtttcgctcctgcccaggctggagtgcaatggcgcgatcttggctctttgcaacttttgcctcccaggttcaagtgattctcctgcctcagcctcccaagtagctgggattacaggcgcacaccaccatgcccggccaatttttgtaaagccttatttttaagagaagtgagtactcagttatttgtagcattattctttagctcttgtttttttttttttttttttcaagaccgagccttgttctgttaccaggctggagtgcagtggcataatcttggctcactgcaacctctgccttctgggttcaagcgattctcctccctcagcctcccgagtagctgggactacaggcatgcaccaccacacctggctaattttttgtatttttagtagagacaggggttccccatgttggccaggatagtctcaatttcttgaccttgtgatctgcctgcctcagcctcccaaagtgctgggattataggcgtgagccaccgcacccagcccagacttgctacttttataggctagaaacggttgaatgtcagcaatgtcatgcttcaactgattatgtcttagtgcataagaaagtttagaagagggaaaaacgactcgcacacctccttgttgagctaaagccttggggtcaggcatgagccacagagtgccaggcacacagtgaggtgtagaagggcagggaatgtgtattccatccttagtttaggcagatggcaaccaggatggaattcttggcatcccacccagcctcagggcctcacaccagcccatgtggatgacctgagggtcctgtttcccatcccaccccaggcgcccccaggaagcagcggcgggagcgcaccaccttcacccggagccaactggaggagctggaggcactgtttgccaagacccagtacccagacgtctatgcccgtgaggaggtggctctgaagatcaatctgcctgagtccagggttcaggtggggtggtgggtccctggacccctcccgacacttcctgtgatctcaggaggcctgcccggaacaaagagtgatgggaggagggagagatcacagagtgacagccaaagttataaaggggacaataatccctctccccaccatcccactgaccgcctcatggctctcattgcccctcgctcctctccagctgcgctggccctgacctgcctgccaagcaccctcctgccttgggcctttgcactcagtttcctctatctggaatgcttatttccagataaccacacagcaggccccatcgccttgttcgagtctttgcttatccatcagtgagacccacactgaacacagcatttaaaattgcatatgatttacatatggtatctcagagtctgtttatttagactctgtctctcccaactagaatgtcaattccactgacggacactcagagtagtagaaaatggttaatacatgtttattaactgactgaatagacggatggatggatgggtgggtggatgcatagatgaatgtatgtatgtgtgactgtaggtgtgcgtgtgcatgtatgactggaagcatggatgagtgtatgtatgtgtatatatgagtgtctgtgtgtatgatgggatggatacatgtatatatgtgtgtttgcatgaacgcacataggtatgattagatagatgatgaatgtatgcatgcatgatatatgtatacgtggtgtatgtgcacatgtatgtatacatgcttgcatgattggatggatgggtatatttatttatttgaaatggagtctcgctctgtcgcccaggctggagtgcagtggcatgatcttggctcactgcaacctccgcctcctgggttcaagtgattctcctgcctcagcctcctgtgtagctgggattacaggcgtgtgccaccacaccgggctaatttttgtatttttagtagagatggggtttcaccatgttggccaggctggtctcaaactcctgacctcaggcaatcctactgcctcggccttccagagcgctgggattacaggcgtgagccaccgcgcccggccggatgggtgtatttatgtatatatgagtgtatgcatgtatatatgattggactgataaataaaatgtgtgtgttagtatgattgtatataggtatgactggatggattaatgtatatgtatgcatgatgtatgtgtgtatgatgtatgggtgtataattgtatatttgtatgtttgtataatcagatggatggatgaacatgcatatgatgtatgtatgattagatagatccattaatgcatgtatgatgtatgtgtgtatgacctatgtttatataattatatgtataagatggatgaatctatgtatgatgtatgtgtgtacaattgtatgtatcatcagatggataagtctatgtatgatgtatgtatgatcagatggactggtgaatgtgtgtatgacatatatatgtgtgaggtatgtatatatgatcagatggatgtctacataatgtatgtgtgtatggtgtatgtatgtataattgtatgcgtgtatgtttgtatgctgtaggtatgatgttacatatatgtgcatacacacgtgtgtatgattggaaggataaatgaaatatgtatgtttgtgtgattgtatgcacatatgattagatagattagtgtgtagctatgtatgctgtatgtgtgtacaatgtatgtgcctataattgtatgtttgtatgtctgtatgatcagatggatgaatatgtatatgatgtatgtatgatcagatagctggataaatgtatgcatgatgcatgtgtgtatggtgtatgcatgtataattgtatgtatgtttgcattagatggataaatgcctgtaggtatcatgtatgtacgcatacatgcatgattggatgactggatgggtttatttgtgtatatatgagtgtacgcatgtatatataattagatggataaatgaaatgtgtgtctgcatgattgtatgtatggattaatgtgtatatatgtatgatgtatgtgtgtacaatgtatgtatgtataattgtatgtttgtatgatcagatggatggatgaatgtgtatgatgtatatatgtatgatcagatggctccattaatgcatgtatgatgtatgcgtgtatgatgcatgtacacttgcatgtatgatcagatgagccagtgaatgtatgtatgatgtatatgtgtatgatgtatgtatgtatgatcagatagatgggtaaacgtatgcatgatgtatgtgcgtatggtgtatgtatgtataattgtatgtgtgcatgtttgtattagatgggtggatgaatatgtgtatgatgtatgtatgatcatatagatgggtaaatgcaggcatgatgtatgtgtgtatggtgtatgtatgtataattgtatgtgtgcatgtttgtattagatggatggatgaaaatgtgtatgatgtacgtatgatcatatagatgggtaaatgtatgcatgatatatgtgcgtatggtgtatatatgtataactgtacgtgtgcatgtttgtattagatgggtggatgaatatgtgtatgatgtatgtatgatcatatcgatgggtaaatgcaggcatgatgtatgtgcgtatggtgtatgcatgtataattgtacgtgtgcatgtttgcattagacggatgggatgaatgcacatgggtatgatgtatgcatgtgttcatgcacacatgcaggtatgattggatggatagatggatggatgggtgaatagacgccccacagctggatgcaaagtagacagatgtgaacccagcacctctcaccaataagtgtcctcatccccgggcaccctgcggctctcctgggcctcttccccacttacccacccccatctccgctcttatcccccaggtttggttcaagaaccggagggctaaatgcaggcagcagcgacagcagcagaaacagcagcagcagcccccagggggccaggccaaggcccggcctgccaagaggaaggcgggcacgtccccaagaccctccacagatgtgtgtccagaccctctgggcatctcagattcctacagtccccctctgcccggcccctcaggctccccaaccacggcagtggccactgtgtccatctggagcccagcctcagagtcccctttgcctgaggcgcagcgggctgggctggtggcctcagggccgtctctgacctccgccccctatgccatgacctacgccccggcctccgctttctgctcttccccctccgcctatgggtctccgagctcctatttcagcggcctagacccctacctttctcccatggtgccccagctagggggcccggctcttagccccctctctggcccctccgtgggaccttccctggcccagtcccccacctccctatcaggccagagctatggcgcctacagccccgtggatagcttggaattcaaggaccccacgggcacctggaaattcacctacaatcccatggaccctctggactacaaggatcagagtgcctggaagtttcagatcttgtagaggacgcagtctccatctctctccatcgggcctcgggaccctttctcttctgaatctgcttccctgcagtttagatcccgggatggcattcctgagaaagcaacccgaaccagctgtccttctgacagctcggtgttcagcttacagagaccacccctttcctccacagggagaggctcctccctctcctgggacagctcacaggtcctagtgattctctcaaccctaacaccgtctggcacgattgtgaccgctgaagtacaccacgagctccaggcttcagaaagtggtgctgagaacttgctccaagaagaagtcaaaccaaacttgcagttgatttggggtcatgtttaggtcagaatcaccgtgcccttgaacaagcaggtaggggggcttgataacttaactttccacgtggacagaatttttttttttgttttgtttttgttttgcagacacagtctagctctgtcgcccaggctggagtgcagtggcacgatctcagctcactgcaagctctacctcccgggttcacgccattctcctgcctcagcctcccgagtagctgggactacagatgcccaccaccaggcccggctaattttttttgtatttttagtagagacggggtttcaccgtgttagccaggatggtctcgatctcctgacctcgtgatccgcccgcctcggcctcccaaagtgctaggattacaggcgtgagccaccgcgcccggcccttttttttttttttttttttaattgagacggagtctcactcttttgcttaggctggagtgcagtggtgtgatctcagctcactgactgcaacctccacctcccgggttgaagcgttgctcctgcctcaatctcccaattagctgggattacaggtgtgctccatcatgcccggctaatttttctattattagtagagacagggttttaccatgttggccaggctggtctggaacccctgacctcaagtgatccgcctgcctcggcctcccaaagtgctgggattacaggcatgagccattgtgcctggccctacacgtggacacttctttagcatatggttagggacctttctagaaattccaaagacagactttaagaagccccgtcgggaaaccttaggccaatgatgtggttacattaaaaataaattatctgggaatttcacagacttcacaaatgtcaggcttacatggtaggtttaggggaccgtttgagagacaaagatctacattcatatatgtagctatacatatatgtactttttcttcttagtttctttttaaagacattttatcactcattcgctcattagcacattgggaatgtgtgtatttggtagggaaatgaaaggcaccttgcctgttccatctctactccttttttcttttgttttaggattttctaaaggtgagacactggtggaactggggtagctgcttgggacgtaccacctatagttgtggctatttcacagagaagcagcagctagacagactcccatctgtaaataaacaagagataggaagagggggaaatagatttggaggaggcagccctacatttcaaacatacattcccttttttagatttttttttttttttttttggttttcagttttgatggtgggattggaaaatagagcttggcttgaggacattttcctggggtggcaccattatttcttgaaatagaatcttacttatggtgacactggcaagcacttgtgagaacctgaagacggattgaggtcatttgatgctcagaagttgggtgctgggtccctgccttctcagtccgagttctcctttcatttttgggtggggaggcgggttccaagagcccttcattggtggagttcacaaggcaaggtgtaaaaaaaaaagtagggcaggaagacagtggtgtgctggcagaggtctaacaatgggctctccaaggaagaggaaaaggttggttgtggagtgtttgtcagtttccgtggtgtaaatactcccaccacggctgacttcaagctagcaaccggaggtcactgaactaagagttgggaagagatagggcacaatatatgcttacgagttggtacacaccgtcagcagcagccagggtcaggagaaaggcgagatgtgaagagaggccgggaggtatcagatgacgtttccagcactagaccagaagaggtgcacacagcctagaccccctgaggggtacaccctgatctctagagcccacaaagaggtttttattcaacataaaacgtgttcatctctcataggcctgagtcatgctgggttctgggacattaagcccaggagtgggccgggtgcggtggctcacgcctgtaatcccagcactttgggaggccgaggcgggtggatcacctgaggtcaggagttcgagaccagcctggccaacatggtgaaaccctgtctctactaataatacaaaaattagccgggcatggtggcacgcgcctgtaatcccagctactcgggaggctgaggcaggagaattgctggaacccgggaggcggaggttgaagagagcagagattgtgccactgtgctctagcctgggtcacaagagcgaaactccgtctcaataataacaacaacaaaaataacccaggagtggctcaagagtccagtgtgggatgaaaatataaacagaggaagacaacatatgtcactggggaggctgggggagctagacaaaattcacacgggaggggcagggatgagacaatattgtgccctgggtctgtgcaaacgttgggaccagaatccactataagtttcattcttcggagacacggaagctctgcactggaggccgggactcaggcgtggaagagaatcttctccttattcaccggggaggctgtgtcttgtgcaaacaagtcatagaaacttgatgggagttggggagggactgaaggatgcatgcaaggttctgggaaggagtgagaagtagtgaaggccaaggggcccccatcacaggccgatggggtaagacttcgagagagcctgatcctggggtcttctgagactccaccaggagccggagagggcagggagccaaatccagctaggaggttacagattgcttttcctgggctgggctcctgagtgttggttcttccagctgtgcacaggggatttcaaacgttctacgtcctaaagccaggaagagtgacaaggcaggtggggacagaaggaagaagccaggagcctccctgagaaggtgtcaccttatctgtcctcctcttccccacacactggcctctgggtcccccttctctgtccacccacagagtgaaaccaattaaaatgttggatctca

SEQ ID NO: 266 - DNA, 14813 bp, Homo sapiens
  source 1..14813: mol_type = genomic DNA; note = NC_000014.9:c60724351-60709539 SIX4 [organism=Homo sapiens] [GeneID=51804] [chromosome=14]
gccatatagtatgcagcaaccggaggagtcacgttgggggaacggcagaaagcagctatccgtttacactactttgctctaacagctatcttaatggtgactgcgtggccggggggaaacctgatcggccagatacagccgaaaccaggagggagggagtgggctttccggagggggagaggagggagggagacgaaggaggaggagtaagagaggaggaaagaaagaggaaaagagtgcgagggagtgagggagggaggaaaataaacaacaaaaaatgtcctcttcctcccccaccgggcagatcgcaagtgcggcggacatcaagcaagagaatgggatggaaagcgcctcggaagggcaggaggcgcaccgagaagtggcggggggcgcggcggtagggctgagccccccggctccagccccttttcccctggagccgggggacgccgcgaccgctgccgccagggtgagcggagaggaaggggcagtggcggcggcggcggccggagcggcggcggatcaggtacaactccactcggaacttctgggcaggcaccaccacgccgccgccgccgccgcgcagaccccgctggccttctcgcccgaccacgtcgcctgcgtgtgcgaggcactgcagcaggggggcaacctggaccgcctggcccggttcctgtggtccctgccccagagcgacctgctacgtggcaacgagagcctgctgaaggcgcgggcgctcgtggccttccaccagggcatctaccccgagctctacagcatcctcgagagccacagcttcgagtcggccaaccacccgctgctgcagcagctctggtacaaggcgcgctacaccgaggccgagcgagcccgcggccggccgctgggagccgtagacaagtaccggctgcgcaggaaattccccctgccccgcaccatctgggacggcgaggagacggtgtattgtttcaaggagaagtcgcgcaacgcgctcaaggagctctacaagcagaatcgctacccttcgcccgccgagaagcggcacctggccaagatcaccggcctctccctcacccaggtcagcaactggttcaagaaccgccggcagcgcgacaggaacccctccgagacccagtccaaaaggtgagcgccaactttcctcctcctcccccttcctctcccccacccccttcccggctttcttttcctccaagtgctcgcaaacatggcgcttaccttccccaccagcctggtccggctgcccacctctccccgccccctacctcgctccccggccggcagaggtagggggcggcggaggcggggggcgggggaacctccctccttaccctccccctctccccccagaagtttctggtcgcccgcctaggtctcagtccccgcccccacctcggctggtcactgctgcccagcttcccacccccatcccgctggctttgaagttgccaccctctccccgtttctggaggggctaacgaagcaaatgtggacaccggcaccgtagctctccctgccgcccgaggcccgcagagactgccggcgccggccggggtctgcacctccgcgaggtcacaccgggcctggcgcgcgcgcacgctcccggatccccagggttcagccgccccccgggcctgcgctggaggtcgcggtggctgctctggtgaagggaagagagtgttgtgggactggcggcgcagaaggggtctcggaacgtcgaggtttcatatgacagagttaatcattcaccctgcccctatggttcccttagcggccgcggcaacgtggggtgctggtgcagctcggctctgtcatgttttgaaacctgattctgaactccttaggatcgggtttcagcgcagccggggtagcagggctgaagggctgcttcctccctcggcccccgaacgctgcttggctccctcctggtacggtagttatgggtggggggcaggccggcttacggcgggcggcagcaaaggagtgggggcgctcccaccccactgggtttgagctttttgcctggcagactgctttccccctctggtaaaaaaaataccggattttccacctcttttgtgcgtcctcccgagtcagacacttggtgtgtgcgtctgtgtgttttgttggacgaaacaaagtaaggagaaggtcgcctaaagacctggtgtctccagccccgcggggataggagagaaagaatccaaaagcagctcgaaggttcttctcggggaagcaaactgggagccggggatccagcccgcctgcgccaggtgaaggtgatcaccagcgcattccagagccggtctcagcccgcccttgccgcttctgggcccctgtgggggtccgacggctcgggctccggcgttcctcgcccaaggctgggagggaggcttggtgccctatccggccctcgcggtaaccaaaacaaaaggtgcaccgggatgtgcgtgcgccttccgcagatatgcggagaggtccagagaaggcgctttggttacgccgagccacctgccctgcgcccactagaggccgcggatcccgcgctcggaaaccaacggaatccgcagggccggggcagagggtggcaagggggcaccgcgagcaggccagctgctccgccgcctccgctcgcgagccgggcacgctccctgggactcccccacgctccactgctggcttcttcgtcccccccgccccaccccataaactccacacccaccccgccgccggcccagttgcctggtttaggcccctctccggatctacctcccacccgcacccccggtgagtcaccctcgcagacggcgacggcggctcagcctcagcttgtaaatcaaagcgctttctgcgctcctggccccgcagcccaaagcccgggtaatcccctcccctcggcatgaaagcgaaccgaccgcggggcactgcggggatgtcggatcctctgctgggccaagtcctgctgcgcttccaaaacgcctctgttctgctctcgtttgctctccctcccagcctcagaccaaatgggaaaccccatcactacccaccccccaaccccgatttggtatttctcccaagtcagagagctgaggaacagggtcctgcctggaacagagggaccaaggacgttggggaagaggtctaatagttagaaggcctctgagtgacaccctttccctcccacctcaccagggcactggatggtgtttgttaaataggcccctttggcttcctttggattcaaaggcgactgcacataactgttcttgggttgaaagtgccttttcctacaacaaggacagccactttgttgaatgagagagttgtcagtctggtggagtagaagtttgggagcaggtgagaaaacgatctcttgttaactaactgaccaaaaaagaaaagctgagcacttcctacctcctgctcctttggcagcttcatttacctccaagataacactaatctgaattggtttgaggggaggggaaggagttcctaaacaggaaagaccgaccacctcatttaaggtgtttttttctatggtgtcagtagcagcatatgtaacagtaaggaatagcacttctacactgtaaaatcaaatatgttcttctcctgtaatgctgaatttacatcttgcagatgtctggactttccctgaatttattgttattttaaatgattgggatctgagagtttatcttcccagattctctggctggtcggaatctgctgaaaggcctcttagtttaaataggactagcagatatcctgctgtgctttccttaaatactgcctttaatggatttagaagctggttttccaaacaagtggcactgtgtagaatgtcatccccctgaccttctgaacattttgatttccccctccatacagtgagtcagatggcaaccccagcactgaagatgaatccagcaagggacatgaggatttatctcctcacccactctccagttcatctgatggcatcaccaacctcagcctttccagtcatatggagccagtatatatgcaacaaattggaaatgctaagatatcattaagctcttctggagttctgttgaatggaagcttggtacctgcaagtacttcacctgtcttccttaatggaaattcttttattcagggacccagtggagttatccttaatggattaaatgtgggaaatacacaggcagtggcattgaacccaccaaaaatgtcatcaaacattgtgagcaatggtatatccatgactgacatactggggtctacttcccaggacgtgaaggaattcaaagtcctccagagttctgctaactcagcaaccaccacgtcctacagccccagtgtccctgtctcattcccaggcctgatacccagcactgaggtgaaaagagaaggcattcaaacagtggcttcccaagatggagggtctgtagtgacttttactacaccagtgcaaattaaccagtatggcattgtccagatccccaattccggagcaaacagccagttccttaatgggagcattggattctctccactgcagctgccccctgtgtcagtggcagcttcacaaggtaacaatctcatttggtaccttaatgcaccagcaaatgtgttcatcagctgctgtaagtgacgcatttggtgatagctatagattgatgtttctgttcaggtaccttattagctgccgaagctgtagagtagccttgatgtgattctcctctttcacaatacccatgtcatatccaggttgctttattcccttgcatcatgaggatgggcttttattttactaacaactgaatggaaaaatacagttcatagcaagtcctgccagttctacaattacagaaatatgataagtcaatcagtgcttacaaaataactcactgcttggcattttaatattaaaaattaataaaattgctaagaacacaaaattagtctagcagttggtaagaatgcatacactttacctaagcattatttatttgaccaaaaaatgttttagaagaacaagctaaaaagaccggatcaattatgtttgaatcctgtttcctcctataatgaagactaacagacctaaaagaaaatcagaggaatatgccattggatttctatcgctcagcatatatactaaccccctaaatgtgtgggtttatttgtgaagataatagtaagccttattttatatgtttgtggctttactaacagcaatcttccagagaaagcacttaaatgaaattcaggaaaactgaggctgatatattagttcttcactgactttaagcaagcctggatcctctatgtcattttctctttaaagaaatagaaatggttagaatttggcagtggagtttgcataatcccttgaattcaggaagggtagatcttaatgcacgtttgccttcttgtagacaaatctgaaaatccagatttttacaaaaccaaagtagtaattgttggctttaaaggtctgcttcctataagatggttttaccacccccccaaaaaaatcaatttatgcacaactctcttgttaccacaactatggtctatgtcagcttattgaaggaattaatggaaaaattgttctaaatttcattctgtacatttgcatttctttaggcaaaatggtactaaaacaagacattcctgcagcatactattcagttcatcattgttccaagttatggaaagagttaagttactatctaacatagggcaaaaatatgaaaaccacagggaaagccaaagtgcttagtttgataataatttaatgtggatctaaccccttttctctcatttggaaaatttccaaacaggtcacattttaaaggcaacaaatttgagcagaaagaatgagttatgtatgttgggggaggagaaaagtagaaatacttttaattgtgtaatctagaggagcactgccatagaaaattattatgaactaatagctgagtttttaaatgggacatttaataggaataagaatagcattttcagttaaaataagtaagatcaaatcttagactgtctgggtgagttgaacagacagtctaagtttaaccagatagttaagtttaatccagtaagcaacatttctatggtagttaggtattgcagttctcaataaaacattttggggattcagttttttctcacaaacagatactgagccattctttaaaatgtcttgacaagatagacttatctttctatagttgggatttatgtggaaaagtagaatatctacatcttttactcactttacagtctgagcaactaagattattattattattattattattatttttaggcggagactcattttgtcacccaggctggagtacagtggcgcgatctcggctcactgcagcctctgcctcccgtgttcaagtgattatcctgcctcagcctccctagtagctgggactacaggcgtgcatcaccatgaccggctaatcttcgtgtgtttaacagagagagggttttgctatgttggccaggctggtcttgaactcctgtgatctgctcacctcagcctcccaaagtgctgggattacaggcatgagccacagcgcctggcctgatttttttcttatcattacaaagtaatgctttgtatctatatggtttttcagttggatttttttatcttaaaattgttgttcaatttttacttcagttgtagttatgctcaaaaatcaaattttagatcaaattctcttttatatatgttataatttctacaaattcagaagtatttatattcagtagcagttggggaaaatgttgcatgtattatgctatttatggctctataaaaagataactaatcattttgttcatgcatacattggcaaacaatttcataaacatacacacaataaactaaacatctatttgagatgtttttttgccacaaatcagctgcctacaagaattttaaagacgccgggcacagtggcttacgcctgttaatcccagcactttaggaggctaaggcgggtggatcacctgaggtcaggagttccagaccagcctaacatattgaaaccccgtctctactaaaaaaaacaaaaattaggctggcatggtggcacatgcctgtaatcccagctacttaggaggctgaggcaggagaatcgcttgaacccaggaggtggaggttgcagtgagccgagatcacgccattgcactccagcctgggcaacaagagcaaaaccccttatctcaaaaataaataaataaataaataaaaataagagttttaaagcatacttaagttgaaggcagtgttttcaaataaaagcagttttttcatatgtgtggtctgaaacagaaatgtaagagaataactgaaacatacttagaaatgtttttcttaacactggtatttctgtgattaaactttctagttaaatgttttaaaagggttcatatgcagtgttttctttttacttgaagacattcctttgcattaaaaatatttggaagacataaacagccctgtggcacttatttatcaatagaggtgataatataatcacaatattctaatacttcaggaaggaaaatgttttaggtgaattaattacctttaacattgggctgctctctcaaaaaagtagtttactgaggccagatgtggtgtcacgcctgtaattctaacactttgggaggctgaggcaggaggatcacttgagcccaggaattccagaccagcctgggcaacatagtgagacctcatctctacaaaaatttttaaaaaattggccaggcgcggtggctcatgcctgtaatcccagcactttgggaggccgaggcgggtggatcacaaggtcaagagtttgagaccagcctgaccaacatggtgaaaccctgtctctactaaaaatacaaaaattagccaggcatggtggtgcgtgcctgtaatcccagctactcaggaggctgagtcaggagaattgcttgaacccaggaagcggagtttgcagtgagccaagattgcaccaccgcactccagcctgggtgacagagcgagactctgtctcaaaaaaaaattttttttttaaattagctgggcatagtagtacgtacctgtagtcccagctacttgggaggctgaagtgggagggattgcttgggcccaggagatcgaggctgcagtgagccacgttcacataatcccagcactttgggagaccgaggctggcagatcacttgagctcaggagttcgagaacagcctggccaacatggtgaaaccccatctctactaaaactacaaaaattagacaggcatggtgacatgcatctgtaatcccagctactcagaggttgaggcaggagaatcacctgggaggtagaggttgcagtgagcagaaatcgtgccactgcactccagcctgggcaacagagcaagactgtctcaaaaaaaaaaaaaagagttgactgaacatctaattcaagatgaggataaacagcccacctatcacaaaagttcccccaaatctacctttccttcagtgaccatatttgaggtcctagattatctaattgccatcatctcatgcctatgtaaggaatcaggaacaaaagagtgttatttgatggtagtggggggtctaattcgtgtacattgtctaagtgatctgatttgaacatctcagctttctacttaacatttttttttctacttctggtctctatagaccattatagtaagagtctcaaaagatacaaaccttttagagaagcattagctctgatcctttatgttaatctgtattttaaaaagcacatttcttattaccattaattgttcctattactacaacactgaaaattcagaactggcacaacaaaaggcaaaaaagcttttgaatgttttgttgacttattactttatggctagtttggtgaaagtttgcaacttgtctatacaggtttatatggttaagttttaagccccagggtaactcattttatgtggtaagttctgcattgccatttatttatattttatgtcagttactgagcagtcagtcctgaatgaaggtgcatttgtgttttctaattctaactggcagagctagcaataactatcaactaattgagagatgtcaagttactagtgaagaaacagaaacttgactgaatcagaacttggaaaagattttttttttttcacacttggcttctaactagtagttctcaatcccccttggtcatcagaattacttgggaaggtgggtactctagaagcccagtccccaccattactcaatatacccgtgtaacaaacatgcgcacatgccccctgaatctaatttttttttttttttttttttaaagaaagggcccgggtgctgtggctcacgcctgtaatcccagcaatttgggaggccgaggtgggtggatcacaaggtcaagagattgagactatcctggccaacatggtgaaaccccgtctctactaaaaatacaaaaattagctggatgtggtggcgcatgcctatagtcacagctacttgggaggctgaggcaggagaatcacttgaacccaggaggcagaggttgcaatgagccgagatcgctccactgcactccagcctggtgacagagtgagactccatctgaaaaaaaaaaaaagaaataataagcaacagaacctttgacatgttctatcctcaagaccgttcgaggtcatgagacataaaaagtaaaggtttggaagtcactgtgttttctaagaagctgatgaaagatggggaacacaggcacacctgcgactcaggaacgcaagtagtttttttggctgtgttgttgttggggttaaacataaaagatgtctccatacaaaatatatctatatatatatttacttggagaggtaaaaacagatgttctaagatgtactaagttacactttcaaggagtagagcctgggaatctgtagttttaggtgcccaaggtaattctgaaccagaattgggctaaatgattgtatggaagtgttgcttctttatagatactgtacctgagaaaaaaacgtgtgtgtaactttttttctttccctctcacttccatcagtgataatcagtactttattttttttaggtaatatctcagtaagctcaagcacttcagatggaagcacatttacaagtgagtctaccacagtccagcaaggaaaggttttcttgagctctcttgctcccagtgcagtggtatacacggttcctaatacaggccagactataggatctgtgaaacaggaaggcttggaaaggagcctggtattttctcagttgatgcctgtcaatcagaatgcacaagtaaatgcaaacctgtcttctgaaaacatctcggggagtggcctgcatccactggcctcctcattagttaatgtatctccaactcacaatttttctctcagtccctctacactactaaatcccactgagctaaaccgcgacattgccgatagccaaccaatgtctgcaccggtggcaagcaaatctactgtgacatctgtcagcaacactaactatgcaactcttcagaactgctcccttattactggtcaagacctattgtcagtccctatgactcaggctgcccttggggaaatagttcctacagctgaagatcaggtaggtcacccctccccagcagtacatcaggattttgtccaagaacatcgtttggttctgcaatcggtagctaacatgaaagagaatttcttatcaaattctgagagcaaagcaacaagtagcttaatgatgctggactctaaatccaagtatgtcttagatggcatggttgatactgtctgtgaagacctggaaacagacaaaaaagagcttgccaagctccagactgtccagctggatgaagatatgcaagacttatgaactttatttcctcctcacctctttttggcatcagcggcaaatcttttcatgaagccccaaggacacaaaacattttcccatttaaaggaaaacactctagttttgcaagtatatgcatacaagagactttagattgatctgcatgaagatcacagttaagtatacaggagtagaactgcattattgcagcctttttgttcacttataaatttctcttttaaatagatggagacaaaggacaaggtgaaatgtatcaagtcaaagtgaatcatttagttgactctataattctaaggtcaaaatggaacttgatagttttttaaattaaaaaatgtatacacctaacatagaaaattaaagatagctgcagaccattagaaataatacaattgtttttgtttacttttactccatgggcattgaaaaggttaagaaacataaatggtacatatttttaaagttaagtagcatgcatatatatatgcacacacacctctttttcagcattttttgagaaagtcttgggtctcaaacacatttgtctcaacacatttccaaatgtgatttctaatagctcagtgtggctgagaaagtgcggaactccactaaaaactctgaaacttcagtataaatgtaaatatatcagttctataagcaggatttgagtaattacagtgaattttatttttaatgtatatgtttctcttcaggcgctatgaactgaaaaatatgttttcttactgtttaatttatttttattgtttgaacaggaagtgaacatagtcgtttccaacaaagttttactttttgtaggattttaaaaataatgatttttaccaggaatctattaaggtcaatattaataacactgaaacaggaaatctaactcccaatattggaattttggtactttttttcacatccttgttctttatttagcaactctgattcatttaaatatgttttttatagaattctatgtgcctttttacctcgtggcctttttattggtagtaaggtacagaagtgtcaacagaagcactgatggttcttttctactatctaacagggttaatttcaccacaaaattgctttaaatctgaagaacttaagtttcactaaataatatatatgacatttatcacacaaatggataaacaactaattattgttgatacttttcattacaaggaaaataagttataaataccatgtcaaattgattatacaggctatgaaaaccattttaaaggaaagaaaatatgtaaattctattgagcaaaattctgtcctgttgaaacttagttctaaaggttttgaatcagttgttacactctgacacatgactgttgtttgcactatattatcatgtcttctttaaaagtaaatatttttggtttctgtaagaagcttgtttaataatgttgtaagccgtggctatagttttatcaagactctgaacacaagatgtaacaatgcaaataaatttatgtagtgagtaaagttgctctctagtctctgaaaagcaaaaaaagtgagaaaataatttcttcagagataacttcaagttgttgaacataaaggtgttagatgttagcacatcttgctttttttttttttttgagatggagtctcgctctgttgcccaggctggagtgcagtggcacgatcttggctcactgcaagctctgcctcctgggttcacgccattctcctgcctcagcctcccgagtagctgggactacaggcacctgccaccatgcccggctaaatttttgtatttttagtagagacggggtttcaccgtgttagccaggatggtcttgatctcctgacctcgtgatctgcccgcctcggcctcccaaagtgctgggattataggcatgagccactgtgcctggccacatcttgcttttttttttatgatcagaacaaagggcccactctagttctctacatgtcaatcaatcaagcatgttgaataagggacatagaggatttaacttttgttatcataaatggaacttgcaggcatatatcaagaaccctatgaagaattcctctcccatcattttgataaagaactacatcatttttgatagaattggtgaatgttcctaaactgctgaagctacatgttttttgttttgttttacaaagtcaggtgtttgagagttcttttccactctactactactcatagagcttgttttttctttgggtgtgtgctgatcctgttactgagattaattacatggctctgcagtgtagtttacataaaaatgatgttttccacttgattgctgcagatatcaagagtttgttattttcaaatacccatccaacaagagagatggggaggtttttagttatatatgctatatatatatatataactggaaatgttttatatgttttccgaaaatacaataagcctctcttttattcagtgttcttcctcttttctcccttatgaaaaagaaaagatagcacaaaacttaagacttacctaggaaacccattcatattcccaccatgatgtaattataaccctacaattacttcaggtagctacacaatataccaggtaagaatcaatgcacagtataaagaacttattgttcttttctattctttcagttgaataagggccagttggtatgcagcccatgtatatgtgaatggagtaagataaaccccatgatctccttgcacagaattgcaaatgtcttttgccataccaagggccagactcagaacccttggagtcatgtggcagaatttccctcttacataaaccaatgcttgaaaatgctgcaaatgaccctctaatgatccctgaagatcaaaacaggggtaaatgactccctgcaaaacccaacccatgctgctggctgtgggatttttggtgtaagcctatctatgcactctatcagccagaatttggcatttagctcttagttaaatctagtaaaggacagtctattgtttaaagagaaggtgcatttgttcctcaatcaagcaagagcacctgtgttgtactgctttatatctcatgtatatttatagtaatgaaaagactttttaaattgtacacgtttcagtgcctttcttgtgttatgaaaggcaggtagatattatagccataggtaaaaatccatagttaaattgcacactgaccttaaatctctctgtgtatgcccttgtatcttgcatgttaaaagttggattattgggcatgtgtggcagcctgccctgctacatgctagacaagtgtgctttagtacatagccacaagttcttcattctttaaaatgttttgacagatcatctcataataaaaataattcaggaaaactatggggaaatagttacatttcacaaaagatattttaaactctttgtaaaacttagataatagagcctagcagttactttgtatctaattgatacattttatgttaatttaccaccatacattttattaatcaaaattgtatagcatgtgactcttttggctttcagagttctcaaaaatattattttgttgcatgtactgtatgtttagaggcaaccaattatatactcaatatggttttactgtgccttacacaaagagaaactctatacagaatgtatatcatggggtggggtaacagagtctttactgcactgttaggtgatggcacacagagcatgtcccagaacatttctgtgcttaattacccaaccaaagagatctgaagtatgtatgtcgtactgtaatgggggtttatgcctggacaattaagtgttttatttgttttctgaaatgatgtgaacttatttttctaaacactatgctaaataaactttatatttatacata

SEQ ID NO: 267 - DNA, 8745 bp, Homo sapiens
  source 1..8745: mol_type = genomic DNA; note = NC_000001.11:c38005514-37996770 FHL3 [organism=Homo sapiens] [GeneID=2275] [chromosome=1]
actcgcccacacggtccgtctgcagtcggcagcctcgccggcagctcgctcggcccccgcttggcccggcccgcaggtaggagccgccgagggacgcggcgcccggttcccggccccgcctgcgccgcgcgctccccgctcccgccgcccgcttcgaggtgagcgccccgccgaccccggctcccagccctggcggtccgcccccgcgcccaggccggggagcgaagggacccgcggagggctgaggccagccgcggccccggtcccctgtacccgccgggctctggccacgggtgcccggggcacgccgagcccgggacagcgcccgccgggactggacccctccgggctatcgggcggggcgggggcgggggcggcagcgagagttgggcgggggagggggctaagtttgaaatagaaaagccggagagagacagacagaccgaccgaccagaagcgctggagaaactgaggttctcggaaagcccggtggagcgagagaccgagacaggcagggactcgaggcacaggaggctaccgagaccactgaaacaaggacacaccgggcgtacagagttactggtggacagacccgaggcatgggggccgtcctaggctttgtggagcattttcagaaaaagcatacgtgggaccccagcgaacacattccctagggcccttccccgggccttggaggtgccctgaggcttgggcgtcattggcctcatgctgaatctgctctctgaggcctgcagagacgctcagagactagagacagagacattcaggcgtgcagaggtggcgaaagagacttggatgcagagacagagaaagggaggtggtggggattgagacattcagccatgtagacaagaagagaccaagacttgagatccacagaggcatgggccccctgggggacagccagtcaagatacagagccgtccaaaacctaaagacagagactgaagtgtgcccagacacagagatgctgagtgaagcagagacagacaccagaaactgagactaagtgggggcagagagacctaggtggtctgacagcttccaggacagcccctgacttacccgggcctgaaccattgggaggtgaggctgtggggaaacagaaactctgagcctaccgatcccccatgaggcagaggccctgagacagtaagttcgagatcaagaagagccccacgcacacacacagccaccaagacagccccaacttatttttgaactcaaatcttggatgggctgcctcagccctgggggacccagggtgaatgaactgttcctctcatgtccccagagcagctgcgggatcttgctccccaacccccttccctaaacttctctgacttccaggccacatgggggagagcagagcttggggttggtgcccggtagcagagggtgagggttgagggagttggatttctccccttaagtctcctgtcagcttctagaaggtgggggaggggtctgttctgatcctgactcacagctgtgggacctggccagggtcctcctggacagtgggcatgttgggggtgggggcagaaggattgaatggttggcatggggcattggaaaggcttctgggtgtcttccaatcacagggctagcagctgaggagaagagccaggctctggtgcatctcctgttcccctgcccttaaaaactgaccacccccatgtcaccatccgcttcatcaccagggcagcatttttagggagagggaagagctctgggctgggaggcaggggacctgggtcctgatcgggaccttgggcatgaacctgctctattcctggcctccttgtgctcagctgtaaaatggggatgatactctgtcctgcctgccttttgtgagatctgatgagattgtggtgggcatggactttgtgagtggcaaagcagcatgcaggtgtctacatccgtggacctgcatgagagatctcaagagttaagcttactagagtcaggctgaccggactgaagcgaccactttccccactggtgtcctcagcaagccccatgggcctggggccccctattctctccctgggcctatgctgagaatgtccaggtcaaatttcagaccaggctgggcacagtggctcacgcctgtaaccccagcactttggaaggctgaggccagaggatcacttgaagccaggagttcaagaccaccctgggcaacatagtgagaaccccatctctacaaaaaatagaaaaacctagctgggcatggtggcacatggctgtagtcccatctactcaggaggctgaggcaggtggtttgcttgagcccagagttgttttttttgttgttgttttgttttgttttgagacagagttttgctgttgtagcccaggctggagtgtaatgacatgatcttggctcactgcaaccttcacctcctcggttcaagcaattctcctgcctcagcctcctgagtagctgggcttacaggcgcccgccaccatgcctagttaatttttgtatttttagtggagatgggttttcaccatgttggccaggctggtcttgaactcctgacctcaggtgatccaccggccttaacctcccaaagtgctgggattacaggtgtgagccacctcacctggctgagcacagaagttcgaggctgccgtgagccatgatcgtgccactgcactccagccctggcaacagagtgagaccccaactcaaaacaaaaaaaaaaaacaaaaaggctgagcggacaccagcttggccaacatggcgaaactctccatctctactaaaaatacaaaaattagctgggcatggtggtgccctcctgtaatcccagctacttgggaggctgaggcagaagaatcgcttgaacctgggaggtggagattgcagtgagccgagatggagttaactgcgctccagtctgggtgacagagtgagaccctgtctcaaaaaaaaaaaaaaaaaaaaaattgggctggcactgtggctcatgcctgtaatcccagcactttgggaacccaaggcaagaggatagcttgagcccaggagtttgagaccagcctgcgcagcatattgagaccccatctctatttaaaaattctagtccaggcagggtgtggtggttcatgcctgtaatcccagcactttgggaggctgaggcagggagatcatgaggtcaggagttcgagaccatcctgactaacacagtgaaaccccgtctctactaaaaatacaaaaaattagccgggcgtggtagcaggtgcctgtagtcccagctactcgggaggctgagggaggagaatcacttgaacccgggaggtggaggttgcagtgagccgagattgcgccactgtaccccagcctgggcgacagagcgagactctgtctcaaaaaaaaaaaaaaaattccagtccagctgcttgacccagacctgcctgtgaaactgctatctggccccagtatgagtgagggcgctaatagtaaaatactaatagctaccattttctgagtatttattatctgccaggtgctttacaagtatcatcacatttaagcctgacaacaaacttaggaggtaggaagtggtagtatctcatttaattagatgggaaaacaggcttagggatttgcccaagatcactcagccagtaagtgcaggagccaggattcaaaccttacagcttgagctgctccatacaccatagccagttacgcagtcattctgagctccaggaggttcactgggaggtgccttgtgaggggagattgttggaggtgcagggttgtgagccatctgtagaggagcagtctcccccaaaccccgccccactgccggtcaggaaggaatacaaggctggctcccttcagtccccgcagtccccagccttgccagggaaaagggcagggagaggggtatgggcagagacaggtgggccttgttggtgccctttactctgtcctcaccagagcccagctggatagactagggcattgggggattctgggaaggaaatagaagccatgcccataccctatttgggttgccctggtttcggagtgctgactgtctctcagggggtggacccaagtctagcctgggcctgagaaggtggcagccgcagtgggccaagccaagaaggaaggaagaggcccaggcaccccctgtggacgcattccacctgtgtggccccctgctgccccgtggctgacagcccaggcaatcctcagatgttgggccagaggaaacctgggcctgagtggcaggaagggggctgagaaagaggagtatcttctctacaccatagcccccagcccaggagttccagctctaaagaccctggcccctggtggcctcatgccctggcctggagcgcaagctggctgttctcccattgcgcagaggcttgatgtatggagagtcaggcctccaagctgggggcatctgctggtgcctggagtctgaacttcaagccagagcagcgcttgttgtcaagaatttcgcactgggggtggatgagaaaaggaggacttctccttcagcttgagccagggcaggccctggcgactgccagcactggagccttgtgggagagtgggttggtggattcctttgtgtgtccctgtaacttccccgggctcatccacagctgtgagaacatctccttcctatgggtcctggtggttcctctccactaccccaggatcccagcccttagagagcagccttcatgatggaggagagcaggggtgggagctctgactttggggctagagactggaatccggggcagcagaaaggtctgggaaccccacttccctaccgctccactccctaggctcctgttccagaggcagctgtgtggatgacctcatcccacaaacatgctttgttcctgagaaaatggaaagtgtctgaggtttggtcgggggctgggtgtctccagcagcagctctcagggctcccccttgtcctactccccacccaagatggggcctgattggggagaaaatgtcttcagtggctcttgctctctctcctttcagctccctagtcccaaaccctgagaaatcggaaaaggtgggagagaccttctctcccagaggcagtaggagggaaatcatgaccccaggggatggaaagatcctggggttttgccagatgttagcaggaggtggcagggggtacactgcactcccagtctgtctccagttcccctctgcctcccccgacacttcattttccttttttctccccattgctggcaaaacctgacatctggccatctgtgccgccacagctgctgcagatgttacaggccaaggctgtccaagctggtgtgacacagcgggggtggggggatgagggcagagggtctagctagggaagactggctgtgtccagcttgcaggatttccttcctgcttgaacctaagctgagcctctgaagttcccattgcttggctgattccccgggagggaaggcccaacctctcacactggcctcttctaccattcattagtccagcacctctctagcattccactgttttctggatcaggaggggcaggcacagcccattcccgtctctaagttctgtactccagagctctggttaagggttcctttatccatattcctaaagtcccttcctgggagtcaggagagggtgggagtactgctcataaggagtagagtggggtggctccctgcccctgcttctcccacgctggggacagtcgggacagtggaggctagacgctggctgggacaggaaatgagtcactgacccaggaaaagccccctccccctagatctgctagggcctagataagaaaacaacttctgcttcctggtttttttcctgacctcttcctaccccgagttaaatacagaaagaaacatgtgggattcctggtttcccagaagcaccccttccccatccccacctactctgaactggcatttcctatgccgggtctcttggctgtgttttgaatgcagaggcctctttgccaggagccaagccacagcctctctgtgtgaccccagttccaccttgtgctcctaacagggttctctccccttgccaccatgagcgagtcatttgactgtgcaaaatgcaacgagtccctgtatggacgcaagtacatccagacagacagcggcccctactgtgtgccctgctatgacaatacctttgccaacacctgtgctgagtgccagcagcttatcgggcatgactcgagggtaaggagagggccaggccaggcaggaggtgggtggtgaccagtggaagggggcaaaggatgggtccatgaggcctgggtgccagtgcccctgctgtgttccccacaggagctgttctatgaagaccgccatttccacgagggctgcttccgctgctgccgctgccagcgctcactagccgatgaacccttcacctgccaggacagtgagctgctctgcaatgactgctactgcagtgcgttttcctcgcagtgctccgcttgtggggagactgtcatgcctggtatgtgttcaggggctcatcttgtgtgagaactggcatctgcgtagggtctttgcatgtgtctgtctgatacatggagacttggtctgtgtaaagacctgcatacacagcatgtttctggaaatttagtatatacgggatctgtttgcctggtatactcctgggggctactatgtacaggcagattgacacatgtgatacatacttgggggcttagcatgtgtgaatatctgcatgtttagtacaggtaggaactagaggtgtgctgagactgtcatgcttgttgcattgggtcttaatgtatgcagaagcagataaacagagggcttaacatgtgtggggacctgcatgcctaatagaaatgctgggactcagcacctatggagaatggtgtgccgaggagatgcgagggcttagcatgtaccgaacctgtcatgcccagggcattagaactttgtgtgggcagatacttacttgcctggtacatgtggggtcccatgtgagtgctaaaatcatcacatctgttatatgagggcttagctcttagtgagacttcatgactgttacatggaggcttgatgtgtgctgaaattgtcatctctgggacatatgggggcttaacataggccaaaaccctcgtgtctagctgggtcatcatgtccggtgtctggggagaggttagcatgtgtaatatacatagggcgggggggttcttgctgcatgtgcacggacaccaccctgctcacgctgagagaggagtggagactcctggggaagttacagagggtggccctcaggagcatgggacacaacctctaaatgggacccctgttccccacagggtcccggaagctggaatatggaggccagacatggcatgagcactgcttcctgtgcagtggctgtgaacagccactgggctcccgttcttttgtgcccgacaagggtgctcactactgcgtgccctgctatgagaacaagtttgctcctcgctgcgcccgctgcagcaaggtgggggctgggccagccaggtgggggtgagtgaggcctgttgtggggtgggaatccccactcatacctactaatggatgctgcccccacagacgctgacacagggtggagtgacataccgtgatcagccgtggcatcgagaatgtctggtctgtaccggatgccagacgcccctggcagggcagcagttcacctcccgggatgaagatccctactgtgtggcctgttttggagaactctttgcacctaagtgcagcagctgcaagcgccccatcgtaggtgggacaagggtcaaagaacggagtgggtagggtgcaggcaagggagtgggatgtggtattgggtgaggttgagggccggaccatccccacatctgcatagctaacttccagcctccctccaggactcggtggaggcaagtatgtgtcctttgaagaccgacactggcaccacaactgcttctcctgcgcccgctgctctacctccctggtgggccagggcttcgtaccggatggagaccaagtgctctgccagggctgtagccaggcagggccctaagccagggctcctggacccaggctttcccataccacgggcccaggactgtggctccttttctaaaccacctctgggactcagctccccccgccaaaaaaaatgggtctccttctgggctccaggattgtctccccactccagcatccccaaactggtactccctgacccagggccccaaacctgggctcttacagagcctccatgagtcaagccccctccccacacctggactccagaattcaccctctcccctgcagtctgggttcccagactgagtcctctccccaaatcagggctctagacccgagccctccaaacctggactctgggacttaggcccccttaaatctagacttctctttataggtttcaggtctcctatgggtgcctgggaagtccttgaaagtggactgttctcaggcttgacctgccccaccccatccccgcggttgaggctgtgggggcagcagatcaggagcccactgataaggggccctagggtacagggtgctgcccagcaggtcgccaccgagtgtcttctcattttatttcagctccattttgcccatagatgggcagaggggtgagattggctcatcccccttccagattctgcaataaagcggtgtgaggaa

SEQ ID NO: 268 - DNA, 19988 bp, Homo sapiens
  source 1..19988: mol_type = genomic DNA; note = NC_000016.10:57396076-57416063 CCL17 [organism=Homo sapiens] [GeneID=6361] [chromosome=16]
gtgtggtagtaggataatgaagtagatacactggctattctggttcctgtaacagtggccattcctaaccctataagtaggggtattagttgtattgctctgcactgacagacttgagctttgaggtgcactgatagggtctgatttcctggggcaatgtcaatgttgggacttaggaagactaaggtgcaggtgcctgtccagttggtggggaggcagatataggttgaagttccacataagaagaatatgccttggctgggtacacagaactggttgtgtatgttaaaaaggtgtgtgagtttgttgttttcattttcccatactcctagagtacttgccaaggtagctccagtgagcggctggaaaggagtgttgggagcaaactgagtggctccctgtgttctattttaccattggagaaaaaatcgttttgtatctactaggaaccattcaagagagtgattgaaataggggatgagaaggcattcactagtggtgggggcgctgctgcagggggtccaggggtgaatggtcatgcagggagtatgtttgccattattaaacctagactgtttgttaagcaggaaggaggtgatgatttttggaggctctgagaagcggacaagccatctgaatggagctgtttgggtgagtcggaagttactgtgatcagttggggcttgaagttgtagggtgtaattacactgatgggatagtaggtgccccaggggcagtcctgataacaggttgcattggatgcataaaggggcttggaaagttaagacagtattcgtggttgcagggccatgtatggttttttcattgcttgtgtaataggttaggttggaaatgtaagagtgtaaaagctggattgcgaagctttggggaagcccaaatctaggaattatttcatgaattaggactttaaccacttcctgatccttctctgtcttgcaagggaaggcttctatccaatttgtaaaggtttcaacacagactaacaagtattgaaatccccttgacttaggcatatgagagacgtctaactgccagtcctctctgggatggtgccctattctttgttgtcccagaggggccttacgatgggccaagggattatgcctttggcacacatcacaggctttgactacttgtcggatggtccggaggagatttggccctgtaaatagggatttggccatttgatgagtgttctcaatacccatatgaaaactttggtggagggtcttaagtattttccactggctgccctcttctgtcgttaaccatcccgaggggagaaaactatgcccccatgaaagtccccattctgtttcagtcagggaatactggggcttaatctcttggagagggttgttccataccaagggtccttctctaggtatttctaatgggagtttccacctggcagcaattttgacctcagcgtctgcctgacggtttccttctgccttttctccttcacctttttgatggcttcagcagtgtaagactgccacttccttggggtcttgcactgcatgcgataactccatgattttcttgtggtatttaatgggagctcccccagaggttaggaactccctttctttccatattgcagcatgggcatgtaggattagataagcacacttgctatctgtgtacacatttattctttttttcctttcccagttctaaggcttgggtaagtgccactagttctggtaactgggcgctggtccctaggggaaaaggcttactttcaagtactgttacatcagtaactatggcataacctgccctttgtatcccattctccgcaaatgaacttccatcagcatataggttaaggtcaggattagctaaggggacttccaagagatcctcttgggtggcataagtctgggctgcaatttgttggcagtcatgctcaattggttccccatcctctgggagaaaagtagcagggctgagggccgcacaggtgcatatttgaagcaccggtccctcaaggagtagcacctggtatctaagcagatggttgtctgatagccataaatttcttttggcacctagtatgccatttacatcatgagtagtccagatggtgaaatcctttccttgtattattttgatagcctctgatactaacatggccaccaccgcaactacccataaacagtgaggccagcctttagctactacatcaatttccttacttaggtatgccactggttgtggggttattcctcgagtctgagtaaggactccaagagctattcccactctctctgtgatgtgtaaagagaagttttgtcctctgggaaggcttaaggctggagcttgtactagggcctgctttaaggttttgaaggctgtttctgcctctggttcccattctactagatggccctctgggtctccttgattagagtatagagaggcttggccatctcgctgtatctggggatccatagttggcaaaagccagtgatcccaaggaacccctgcaactgttttaatgtcttagggtgaggataagccagtataggctgtattcattctttgctgagggccctggttcctctggctaagattaggcctagatatttgacttgttgtaggcagagctgggccttcaatttagatgccttgtacccttgattagctagaaagttcaagatatctagagtagcctgctggcatgaggcttccaaactggtagccaaaagtaaatcatccacatactgaaggaccagagtccctgaacttgagaagtggccgagatcttgggccagtgcctgaccaaacagatgagagctatccctaaaccttgaggcaagaccgtccatgtaagttgggatgtgtggtctgtgggatcctcaaaggcaaagagaaactgggagtcagagtgcaggggaatgcagaagaagccatccttgaggtccagaacagtgaacaattctgcttcctctggtatttgagagtagggtgtaggggttgggtacagctggatatagaggaattactgcctcattgatgagtctaagatcttgcatcaggactctctgagtgccagagcttctgccacctggatgttttcctgggcctccccttctccccacccctggttctcacctggacctgtctgacctgtttccaggtgcttatacattgccacgaccaccatcagatcaatgaaggagaaatcccatccacatggctggggccctctttctagagtgtcaggggtaggtaaccaccagggcaacagcagtggtggcctggggagaggtggaggaaaggagtcattagtttattgccagagatgctgatcaataagacattgaccttcttttttttacttatttattttttttatttttggagaaggaatcttgctctgtcgcccaggctggagtgcaaaggtgggatcttggctcactgcaacctctgcctcctaggttcaagcgattcttctgcttcagcctccaaagtagctgggactacaggtgtgtgccaccttgcccagctaattttttatttttagtagagatggggtttcaccatgttggccaggctggtcttgaacacctgacctcaggtgatctgcccccttggcctcccaagtgttggtattacaggcgtaagccactgctcctggcctgacatggaccttcttctcatgaggttcactgtccacatgatatccctgtgagcctttggatgcattttctcattgtcatccctgtcacagctcaaagatgagctcgtgctcatagtgttaccaaaacaccatgggtgcagtctaggtcctgctgctccccacacagaaagccaatcactgagacaccaagtattgccaaggaagactttaatcgagtgctgcaaccaagcagatgggagctcagtctgaaatccatctccctgattgactaaaaccaggagtttatacagcagagaagaaatgtaacaatgtataagaaaacaggaactggcaggacgcggtggctcacgcctgtaatcccagcactttgggaggcggaggtgggcggatcacgaggtcaggagatcgagaccatcctggctaacgcggtgaaaccctatctctactaaaaatacaaaaaattagctgggagtagtggcgggcgcctgtaatctcagctacttgggaggctgagctaggagaatggcgtgaacccgagaggcggagcttgcagtgagctgatattgcgccactgcactccagcctgggcaacagagcgagactccgtctcaaaaaaaaaattataaaatataaaagaaaacaggaactagacaggggcaatgaagcaatcatggtgaatgagggggtctggtatctggtacagtaatctggtgggtttcagttctttgacactttttttttttttgagaggcccaatggtcattccttgcagaaggaacccagataaagcaaatataagtttcaagctttaagaccagaagggtcaatttccatgtttgtccaaagaacagtgtatgggagcattgggctggtttccatctgagcctcattttccagatgggaatgcaaaggcacagagagattcagaaatttacccgggccgggcacaatggctcatgcctgtaatcccagcactttgggaggccaaccggggtggatcacctgcggtcaggagttccagaccagcctggccagcatggtgaaaccccatctctactaaaactacaaaaatcagccatgcttggtggcgtgtgcctgtaatcccagctacttgggaggctgaggaaggggaatcacttgatcctggagacagaagttgcagtgagtcgagaccatgccattgcactccagcctgggtgacaagagcgagaccccatctcaaaaaaaaaaaaagaaacttacccaaagccacgcacttagtaactaagccagcaggcagcctcactccagacacccttcttcttcttcttcttcttctttttgtaaattgtggtatagttggtgtatagaatagcatacaatgatgaaaagaaagaactatacatttggcatatatcaacacaaatgacactgtcaggtgtgatgccgcaagatgtggaagtatagatacaagatgatggtgtcgatataaagcttagaaatgagcatgaacaggcccggtgtggtggctcacgcctgtaatcctagcactttgggaggccaaggcaggaggatcatctgaggtcaggagtttgagaccagcctggccaagatggtggaaccccgtctctactaaaaatacaaaaattagctgggcatggcagtgcacccctataatcccagctactcaggaggctgaggtgggagagtcgcttgaaccctggaggtagaggttgcagtgagacaagatcacaccactgcagtccagcttgggaaacagagcaagactctgtctggaaaaaaaaaaaaaaagaaaaaaagaaatgtgcatgaacaatgctatatattgcttaaggacatacacacatatgagttagtgagctgtgaagaaatgcgtgggactaatggctgccaaattctgttcctctagtgcatagaggctgtgattaggggaggaaagcggggctcagtgacgtggtaatacatctgttaacctggtggtgggtacagtagtgtggttagcaacgctgatgccctacccaggccccactccttttggttgattttactttcaatcactctcctgtgcccctccaaggaatctggctgaagctgccccccggggacgtcacctgaggtcacacccttgctgggtttccactccttctctgtcttcactccccaactttccctccacttccccaaggagcacatccttaatgaactcaacctgagacagtggagagagcccagtcacccataagctgagagagcagagcccaggcaaggcagaaaggaagggggaccctattgttagccaagtgtggttcaggcgaaagccccacagtgcagagggacagccacagctcagagggcagctgaggtgctggttcttccctgcaaagggctctctagggactcctgcttcccaggtctggggcttgctcagaagtggccacagcccttcccaataccctcagcctcccctggggagagccatgacccaggtggcattgtgcgacgtgtcaaatctccaaatgctgttgagtcgtgaccccattccctgctggcttttgcagtggctgagattcccaaggcctttcaaagaggccagatccaccaggctccttggaaagggtgtgaggcttcttcccaggatgctgggtgcttgtcactgaccctggtgctgaacagatcttcctcgggtgcccagagggtcgagtttggcaggacaatccccccaccccgactgcaggcaggctgccagactaggagcagaggacttctgagttctcagtgacttctgtcactacaccctgaggggtgaacctcaaattttcccaatgtcatcaggggaccatagacctgcctttgaagtagcttggaaacagggacagatgttccttggaaagagagtcagactctagcaatgaataaaaggcactcatttacaaggcttgagtggaagctcagaagtcctggagcccaggcatcagagagacattgagacaagtccattggtaagagtgagagtaacaagaagggtttctgcattctgcttcaggaacaacaccagccatttatccattcactcacttaatccaaaaactatgtattgaaggcctaccatgtgccgagatatattccattaaagaaaagaaacagaaacctctgtcccatgcaacttacatcccagtaggatgggggtgggggtacaggtgggagacagatagtaaacagcagacataagtaagcgaatggcctagcatgtcagaggatataagcatttcagcaaaaaaaaaaaaaaaaaagagcagaggaagagatggggatggcatgcaatttgacttcactgaaagatgtaatctaaacaaatacatatatatatttataatatatataatatatattattatctataatatatataatatatattattatctataatatatataatatatattattatctataatatatataatatatattattatctataatatatataatatatattattatctataatatatataatatatattattatctataatatatataatatatattattatctataatatatataatatatattattatctataatatatataatatatatattataatatatataacatatattatatataatatatatattataatatatatattatattataatatatattataatatatatattatattataatatatattatattatatatattatataataatatatatattataatatatatattatattatatatatgttatatatattataaatatatattttatatatatataatatatatttataatatatataatatatatttataatatatataatatatatttataatatatattatatatattataaatatatataatatatatatatatatattttttgagatagagtcttgctctgttgcccaggctggagtgtagtggtgtgatcttggctcactgcaacctctgcctcctgggttcaagtgattctcctgcctcagcctcccaagtacctgggactacaggcacctgccaccacgctcagctgatttttgtatttttagtagagatgggatttcaccatgttggccaggctggtctcgaacccctgacttcaagtgatccacctgcctcggcctcccaaagtgctgggattacaggcgtgagccaccacgcccggcctaaaaaagtttgaaaaaggtgaaggagtgagtcctgcaggtatctggggacaacattccaggctgaaagaacagtccgtgcaaacctcctcaggaaggagcatgtctgtctggttggtttgaggcatagggaggaggccagggtggctggggcagagtgaaccagggaaccaggagatacaggtgggcagagagcagggcacagaactcgcggggcctcgtggctgctggagggtcttggacttgtcctctgcgtgaggtggagagccacggggacgttctgaacacgggagattcatggtccctctgctgctgtgctgagaatacactgtagggggcaaggatggagacagggagagcacccagaaggcagttgtaggaagccagggattgatgctggtttctgggtgtatttggaaagcagagacatgagctcacccaacagatgggaagttgggggcgagaggaagaggcgtcagggatagcgcccaggtttctggccctagtaaccggaaggaaggggctggcagagaaggaggagagagcaggtgtaggggtgggtgggaatcagaaattcagcttcagacttggggggttggagctgcctatttggtatggcgagtaggcagctggacgtagaaggaggctggagtttgcgagagaaacttgggagtggttggcatatagatgatatttaaagtcagaaacgtgtactatttgccagatataagcagtaaggcagttgatgcaaaccaaagccttctaatgtaattattgttattattttcattttgcagctgtagaaactgaggctcagagagaagtgactttgagctcacagtgtcaccgcctgctgatgggagagctgaattcaaaaccaggtgacctgacctagagtctttgctcctaacccctccactgtgaggtgaccccctcgctggatctttcagggcatgtgttagatgagcggtggatggactttggatcaagggaagataatccatacaagaaggggacaggagtttggaagcagcaaaccaagtcacaaagtgaggggacgcactggccctcaagaaagctcaatgttggggagcagggagatgagactgaataggaaggaggggctagatggaaggtacagcttcaagattggcctgaaaagttttgactggatggggaaggaagcagggagccattgacggttttggaggaagggggcattacatggtcagggcagcccttgtgaaagatccaccacatgtgggcatgcagctgatgagggaggtgtcaggagagaccagagaggaagaaataggcccagaagtttttgagactctctgggtgtgaaggatgagggctgagccagtggagatgagaaggaagcaaggaagccaagctcccactgaagacagcgctgggcagagtctctgcctgatgtaatgtgggggatggaggcgaggaatgagtcaagggcaaagtttcagacttgggggcagatggggagatgggaaacaatgctggcttgaacagaaaaaaaggaggctggtgtgagagggaactcggttttgcccttctggtacctggggctgagtgaaccatagcaggacagacttctgcttcccagcagctcacaggttagtgtgggggacagaactgcacagagctggccaggctgcaaggcagagagagctgaggggtgccacagaaagatgggccggaaggaggagtgtccaggtgggtgtgtctgattagttactggtcagggctggagacagagatttaagaagtatttatcaggccaggtgcggtggctcacgcctgtaatcccagcactttgggaggccgaggcaggtggatcacgagatcaggagatcgagaccatcctggctaacacggtgaaaccccgtctctactaaaaatacaaaaaaaaaaaaaaattagccgggcatggtggcgggcgcctgtagtcccagctacttgggaggctgaggcaggagaatggcgtgaacccgggaggtggagcttgcagtaagccgagatagcgctgctgcagtccagcctgggcgaaagagcaagactccgtctcaaaaaaaaaaaagaagtctttatccagaggtaaaagatctggggtagatgatgtcagggaggaagggaaggttgcttgaggcaaaaacaaagtctaggacagaagcccaggcttgctcctgccaccagctagctctgtgcccatgaagcagatttattttgttgttgttgaaatggaatcttgctcttttgcccaggctggagcgcagtgccacagtcatggctcagtcgtgcaccaccatgattggctaattttcattttattttttttgtagagacagagtctcactatgttgcccaggctggtctcagactcctgggctcaagcgatcttcccacctcagcctcccaaagtgctgggattacagtggaccagttgcttaaactactctggtcagttcctaattttctcatctgtagaaactaatagttcttactccctgaagctgttgtgaggacaaagtaaactaatagacttaactgctgagattcccctgccccaacacccaccccagcctatagtgagagctcagggacatttctgagaagaggagctcacagggagctcagggaagaaccatgtcccaaatcccagtgggaggagcatcaagaaggatggtaggttcccagggatgacaaggcgattccctgagccagctggagactaggaactttatagacttcatctcagttagttttccaggtcataccatgagggagtgtcttatcatcacacccatttcacagatgagaaaactgaagttcataaaatcgctgttagtcacacaaccaggaacaagtagaagagtgactgggactcagggctgtaggtaatgattccagagcctctgctggtaatcactgcccaatgtaaggcagtgggaggttcagggagtggctggaggggatcaagaggctcagtgagagcacctttcctagagcatcagagctggaagccacattgctgaggattaattaaatcacaagtgggcagagaggaaatggtagagggaagtacagaccacacatcggagcagtttggtcatgaatgaaaggagaaatgggagggcagcatgcgagggtgttgaagtcaaggggaggtctttatggaagtggagagacaggatcatgttgtcagcagagggaaagggggtcatgggattggagacagtaaagagctagaagatggcagtgcaactgagggaaggaggcccctctgggatgaataaaggttgagatccaagccacagttgaagcaatataggtttggcaaaaaatggccacaaccacaaggaagttgtaaactagatgggggaggagtcagggtgtccttggttagattcctctgctttatccatgacagaaggattcgggtgtgtctcatgaaatgatggtacacactggtttaaaaactatttggatgaaggaggccctgggatagaatgtgagttgggcccatgttgtagttcagaatctctaagtgaccatccatctatccatgcattcatgcatgtatatatccattcatcatctatcaagccatgcacccatacttctattcatccatccaaccacacatccatctatctagccatacatctacacatacacccacccatccatcagtccatccatctgctcacccatccagtttcatgcatccatccatcatccatcaacccattcatccatccttccatccatccatcatccatccatccatccatccacccattcattcatccattcatgtatccatccattcatccatccgtctgtccatccattcattcattcatctacccatccatccatttattcttttaccatccatctacacatccatctacccatccgttcatccattcatctacccatccatctatctatttattctctcaccatccgtccacacatccatctaccatccatccatctatccatccattcttccatccatccctccatccatccatctacccatccatccatctatttattcttttgccatccatccacacatccatctaccatccatccatctacccatccatttatccattcatctacccatccatctatccatccattcatctacccatccatctatctatttatcctttcaccatccatccaccaatccatctatccatcatccatacacacatccacccatccatttatctaccatccatccatccgtccattctttcatccaccttccagccactcatccattcatcactcacccacacgtccatccatcatccatcctccatccatccattcactcatttacccatccatatccattcacccattcattcattcacccatccatacaaccactcacctatttatacattcagtaaacatatatatattttttgagacagggtctcactctgtcgcccaggctggagtgcagtggtacaatcatggctcactgcagcctcaactttcctgatgtaggtgatcctccctactcggcctccagagtagctgggacaggtgcacactgtaacacctggctatttttttttttcgagatggagtctcactatattgcccaggagggagtgcagtggtgtgatctcggctcactgcaatctccacctcccgggttcaagcgattctcctgcctcagcctcccgagcagctgggattacaggcacacgccaccacacccagctaattttttttttttgtatttttagtagagacagggtttcaccatgttggccaggatggtctcgatctcctgaccttgtgatccgcctgcctcagcctcccaaagtgctgggattacagatgtgagccactgcgcctggtcatttttttgcattttttgtagagacagggtttcaccatgttgcccaggcttgtcttgaactcctgggctcaagtgatccacctgcctctgcctccgaaagtattggaattacaggtgtgagccaccaaactggcctaataaacatattttattgagcacccactaaggtgctaagtcctggagggataagttggaacacaaaagagatccttcaaggattttacagtcttttgtgtgagtcccaacaaataaactagcaatcacaatacaatatgaagacagccaagatgagggaagtcagtgaactctggggacatagaggaaggaaggagtaagggttcaagctgcactctaaaataagagtaggagtgaaaggaagtgagacgggggaacaggaaagaatgttccagacaggaagaacagcttgtacgaaggcttgggcatcagtaaaggcccggcattttcaaggaactgaaagaaggtccatgtggctgggacaaaatgatatagtgggtgatggagctggaggaaaaagttgagcctggagaagtaggcagaaatgtgggcttcgtcctgagagtaacggggaggcattgaaggatttcaagaggggagagccttgctcagacttgtgttttggagatcaatgggcttttgagaggaagatggactggaccaggaaggcctggaagctggggcatgagttcacggctgtggtccagcagagagatggaggaggagaaggagacggattcaggacgcatgcaggtagccaactaacacacttcgctgatggactggatgtgggcagtgaggaagagcccagggacagagatgacccttgggtttctgacctgaggaaccaagaggacaccctgtcaggaacgacagacacatcaatgggcacgtcaagtctttgggacaggggattggggcctattttggggtcaggggtggaaatactatttgggaccctcacatctcagctgagctggccccgatccctgattcccagccccctgggcagggcaggatgaatccagtttcagctgtcagcgatggagatgagtaaacaaatgctcaatccttactgagctgctccgggagacctcgggcaagtcactgccctgatgagcctcaggtgacactggtgtgaccgggatgacacttctgcctagctgccccctcctggtcagccacagctgtcaaatgcaactgaagatgatgaagagctgccgccccagccgcttggctgccctgtgactgagagcatcctggttccgcccactgcctcggggacaggcttctccacgagcctgggcagagcctggggttggggcaggaaccttccttccctgtctttcagggagaaggaccccatatctgcctggcccagtgccctctggctaaagccgagttgggtgttgcagcagcccctggggcaagggcggcaggtgcctgggtggtgtgcctggccactttagtcagaggcgttgagacaaggagttaccacagccgctcctcccactcagatccaattacccttcacactctcctaataggcctaacagtgtctggcctgcttccctgccatggccctttcccttcctttggccacagcactctctcccctgctgcccctccacaaagctctgcctcactgccacttcctccagggagcattcctgattgccctgacagacctccaggtcctagaatcctcacagcagcataaagatctctcaagatgcttctcacaggcccagacttcagaatagtttgtctggaagttcccttggcatccatcccatagcctgggagaactgaggagggataaactcggttaatccctggagaggaaaccacctcaaaaatgtccctggtccccgctgcctcccaaagaagactgaggcacactgggccctttgcatccatctcgccttcccttccttcagtcctgtgtttactcggtcaggtgacactgaaggttcactgcatgccaggcaccatgcttggtgctggggatgcccacggcgcggggcaaggtagacacagccagtcctcgtgtgactggctcttagccttgcatttaggcagtgccccatgccggggtttcatgctgttgccctaatttatctctgcacattcccctctctgcacctttgcctaaacagtgccccctgtgcaatgtcctttcttccaatctcagtatgaatcttatctacaaaacctagccctaggccctacagccacctctttcaggcagccttccacgaattctggccagaggcagcatctccccagtctatgccccaaagccctttaatctcacctgcatgtccctatgaggggtcagggcctgttcccccgcccttacccactgtgaaaccccacaacagcagggtcgggcctctgtccgccctgcagccctgggcacagcccccagaggctcagctgcccctgccagccaggcagcctgcaccagccttgaactgaaccagaaccttcctagtccagaaccttccactgctgctttcatgatttgttccccagaacaaacaggggaatttgggtccttctgaagaaagctttgagtctgcaggaaagcgaagaggactcagaacccaccggggagtttccccagtggccgggactgcagctgcttcatcattaatcaggctgctcacttgttattaatcagctgtcccttgcagttgtgtagcacagaagagcaattggtggcctctgcggcaagtggagcccccacaagagggcaggcagaagccacagggcagagtgcatggagggcagctagggagggaggggtggtcggcggaggcgccccttcctgcctcttccgaggacccaggcctggtcctgcacctctgggctcaggctctgtctccaggtcagggctgccctgtgcctgcacaccttcccctgcccagcgcggcctcctttgcagggggactctgcggggagctactctgaggctgcccctccctttctctgggatgttggcaccaaagaggtgcccaggcaggaagagcagcctcccctccccctcctctgcacgtgcaaatggaagacagccctgggcacaggaggggtggctgggggcaaagaacccatctggactgtggcttgaggagggggcagggtcagggtctctggcagctgatgggacccccagagaagcagaggaatgttggtgcgaggcccaccaagggggaccccatcttcctgagatctaccgttttggcagagctctgtgggacagaccaaacttccctctacaggtgatgagattgaggtccagagagggtctgtgagccgccggaggtcatatagaggatgctgcccacagaaagattctgccatgggcagggaagccccactcccaggtgcggaagcagccacaggctcccaggcagcccttgctgaggggtggggagaggagcgcctgaggctcctccgaagtcgagggtctttgtctggtttcctctcataggatccctgcccttctacctaaggactgatgaggttagctctgagcgatgctccagtagtgtggggtttccacaggtatccccagaatctaaaaacaagaaacaaaaatctcatgacaaatagcggctgttgcagttatcatgacagttagtgaaaaacttagtaatgatttagtgattaacacagggtggactgtgagagggtggaagccacctgcgccatgttttggaggggcagtgctgtcattttgagttggccctggtcatgcaaggacaggatgaagccaggccaaggtcccccatgtcacaatcagagtccaggtgctgccctgcctggagctgcccttccctggtgctgcccacctgaaggccatgggactctcatcctactgtagggacgcccatgctgtggctcccgggagccccaacagggcgaccggcaatttcctcgggtggccaggggactgacccgcatgcagtgatgctgtggcctggggctgagacgctagagtcacagagaagccagttcaccaactttatcaacctcattattgcaattcttgttttattcctgcccccactggaaagtggacttacgttctgtcatctgccatgccatgagctggggtgcctggaaagtcagctcagggcctggctcaggctggaccctgaccaggcgtccagtactgactccgggacacagctctgctagaagtgagaagcagcatctcccactgaccccttcgttttgttctgtatcttagtgtaaggcatcccatttaggggaacgtggtttcctgagctatttggactgaatcgaagcaccgttgggctcttgcctcctgtggtcagggcctcacctgggatgggacaccaaccaaagctgctctgtgccctggctgggcctcagcctctcggaggcagataaagcatggatctccctgcagagtgatgcccatgtgcccatgcccggcagccagggtggccctggcagcaccctgaagctcactcatggtccaggagcccatgggcccatgcccggcagccagggtggccctggcagcaccctgaagctcactcatggtccaggagaagagctctgcttggtttctgcctggttgactccccgacacttccgtctgccccctgctcaagccaccatgcatgaaggatgctctccagctacagagagatgaacccagctgtgcgtggaggcttttcaattctaatagaggaaccaagaaatgtcccctttgaaaggagaagtgtgtcactgccatgggctctagacacatgtaccccacctctgtctccagttgagtgcccattctctggaaatccacaaacattccaagagctagacttctcctgaatcatctcaaattcttcgaacttcactggtctagggaaggatgtgaggaggtgacagaggggcggggcaagacccccaaagaggttaaataggtcactgccaccctcgactctcagcagggtgtctccctgagcagagggacctgcacacagagactccctcctgggctcctggcaccatggccccactgaagatgctggccctggtcaccctcctcctgggggcttctctgcagcacatccacgcaggtgagagcaggggacaggtggccaggggcaggcaccgggaggacaggggttgggggcatgaagaccaccacagcaatacacacgtttgtgtattatttacaccccacctactcccacaaaagacgtgagaagcccacagcactaggattttgagggaaacaagcagagaaaaatgttgatgatgacgatgccccagctcttgcgggtgggcttggtgaggaccaaggcgagcacatcttgggctgcaatggccgtgaggtgggggctgtggctgtagttgtgcaatggaaaatgaacaattctcaaaattatttattagcttctgttttattaacaggttttatgcacaatgagggaatcagcataaagataggagaattgtttccaagagcatgtaaaaaaggattcttttttttttttttttttttttttttgagatggagtcttgcgctgtcgcccaggctggagtgcaatggtgtgatcttggctcactgcaacctctgcctcccggattcaagcgattctcctgcctcagcctcccgagtagctgggaatataggtgcccggccaccacgccaccaatgggttttcaccatgttggtcaggctggtctcgaactcctgacctcaggccatccacccgccttggcctcccaaagtgctgggattacaggcatgagccacggcgcccagactgaaaaaagagattcttatattaggttgggaaaggaaaaatgaaataaggttgccaggtatagacatacagggacgcgcacagatgcacagagacacacacgtaggcactcacaggacacacagaatcccccacagacacacaaaacatgcacacccacaaacacacgggaccccacaacatacacagaagcctcacacacacctgtgtatggtaacacacagacacacacacatacacataggcagtgatacacatgcagtcatcacacacagatgcacacatggacacgcacatgcagatcttccacgaacaccccccagaggtccccgcaacacacacgcagacactcacagacacccctgccccgctcctctccctgcagctcgagggaccaatgtgggccgggagtgctgcctggagtacttcaagggagccattccccttagaaagctgaagacgtggtaccagacatctgaggactgctccagggatgccatcgtgtaagtccccctggctccacccctgctcctcagggccaagcatggggacaagtgcaccctggagctcccaggacggccaatggggagcagggaagagacagcggggccttcctccccaacccctgcaggctccccacactgtgggacccaaaagggccgcaggccatgaggtccaacctattccttgatttgtggtgaaattgaggccccgggagcaatgaacacccccaggtcacacagctggtcaggggcaatgtggtcacctcccccagcctgggcctgagccctgcccgcagtctccacgtcccaggctctagactgtctgggggcatgggcaggctgaggggtgggcacaagttcctgcagccctggctccctgggagggtcgagattactcgggacagagcctgaagtcccagatctgccaccaatgccctgtgtgacagcagcaacttcctgcccctcttggagccttggaatcctggtcagcacagggcgggccgtcccagggactctgggggcccttccccccctgccactcctggtaacgtcctccttctgtgtagttttgtaactgtgcagggcagggccatctgttcggaccccaacaacaagagagtgaagaatgcagttaaatacctgcaaagccttgagaggtcttgaagcctcctcaccccagactcctgactgtctcccgggactacctgggacctccaccgttggtgttcaccgcccccaccctgagcgcctgggtccaggggaggccttccagggacgaagaagagccacagtgagggagatcccatccccttgtctgaactggagccatgggcacaaagggcccagattaaagtctttatcctca

SEQ ID NO: 269 - DNA, 27796 bp, Homo sapiens
  source 1..27796: mol_type = genomic DNA; note = NC_000014.9:c105168776-105140981 JAG2 [organism=Homo sapiens] [GeneID=3714] [chromosome=14]
agtctcgttccgaacttgttggctgcggtgccgggagcgcgggcgcgcagagccgaggccgggacccgctgccttcaccgccgccgccgtcgccgccgggtgggagccgggccgggcagccggagcgcggccgccagcgagccggagctgccgccgcccctgcacgcccgccgcccaggcccgcgcgccgcggcgctgcgctcgaccccgcccgcgccgccgccgccgccgcctctgccgctgccgctgcctctgcgggcgctcggagggcgggcgggcgctgggaggccggcgcggcggctgggagccgggcgcgggcggcggcggcggggccgggcgggcgggtcgcgggggcaatgcgggcgcagggccgggggcgccttccccggcggctgctgctgctgctggcgctctgggtgcaggtgagcggggcggcgggggcggcgggggtcgcggacggggcacaccgggccgcccctaggggccgggcgggcactgcctggggccgccgtggttcggaagccctcgaggctgcgcgcggcggctggggctccgggcgggcgcggctgggtgggggcggggcggcggggcctgttcccccacccctggcgcccggcccgccgaccccggcccgcgcctccctccgctctcccgctgccttatttttaggcggcgcggcccatgggctatttcgagctgcagctgagcgcgctgcggaacgtgaacggggagctgctgagcggcgcctgctgtgacggcgacggccggacaacgcgcgcggggggctgcggccacgacgagtgcgacacgtacgtgcgcgtgtgccttaaggagtaccaggccaaggtgacgcccacggggccctgcagctacggccacggcgccacgcccgtgctgggcggcaactccttctacctgccgccggcgggcgctgcgggggaccgagcgcgggcgcgggcccgggccggcggcgaccaggacccgggcctcgtcgtcatccccttccagttcgcctggccggtacgtgcgctccatccctcgtgctccagcccttccctctctctccgcgccccggccccgcgcgcttcgcgacccccaacacctgcggccgggtctgcgtgcgagccgcgcgcgcccaggcggggcggggccggcagggggcgcgtgctctggggacttggtccgcgcctggccacgtgggcgcgccggggccccggggccaccgggagcggggtcgcggcgggggcggggcggcggcgtcccgcgtgcgcggcggtgtgcggcgtgtgcctgcgtcgccctgcgcgtgtctgtctgggtggggaggcgaggcgaggcgccccggtcccgggcaggccgcggtggcatgtgcgcagcgcgtgctggggctggtctagggcaggccctgactgagccgccccgggcccgtggccagcctgcgcctgccctgcagtttcctggatgcctggggggcacgggcgggcgccgtgggacctaggcccgggagagcctaacgcctaacgcttatgtcggcagaagcccccgatggtgacccaagatcgttcagagacagagatagtggatcctggtgcagtgaccttctgtggcactgccctgtttgtgggtttttttggttttgttattctggaggggcagaagctgagtcggggctgtctggtctcccctggcaggtggccagtcaggcaggagccctggcctgggcgtgctgggaggaggggtggtaggggtccagtgtcactgggaaacaggtactcatcccagtgggctggcaggtgggtagtggtaggtgggcaggcccaggcctcgggcgccttacctcattgcctggagcacggccttgccctggtgcccagaggtccttccctgcttggtcattgtgctgggggcctggaactgggtgagtgcgggaatgagagcaccatgcagacctgtgatcagggagtagatggatctgggagccaggaagtggctccagtcagcaggaggcaccggagtgtgcccacctggtatcctgggccctgaagtgattgtgagttgagggcaatccctgccgagctcacgccagttgggcctgccgtgtgtggctcccagtcctgtgctgtacctttgcagccctggctggcagccttgcctgctgcccccatcctcaccgcttcctgagctcccacccgtggaagctggccacagtctcctctggccatgtcctcaacccgtgagcaccccgccgagtatcccttgaccaggggggccccagagaggggaaagtgtcccccagatggaaaaggcaggggcgggcatgggagggcccaggcagttgtgagaagcccagcccctcgcccccacggcggtgcagcaggcaggtctgagcagggcccgcagcctgtcatctgcacctgggcctgagccagcgtggccccacatcgctacctgaggatgtgttttctgctcgagttggcagcagtgggtgtgggggcagggaggtcttggaggaatgtggcgggctatcgcgtgtccgccctggctcttcgccccgcgggccagccggtcaggtgtgggatgggaccgggtaggcccttgccttccttggagtccgggcactgggtttcggggccagctcacctccctgcctcttgcttccagccggttcctcgaatgccccaggagggggcaggcggcctgtctctgggttgggggccagggcagagtcatagctgcgtgtttgggggcagccctggtctcctgccatgtggcctggctgccgggcgggagctgtgccgtgatgccagcaccctggtatttgcactcgggcggcggcagtccctggccatgctgccctggcttgctgaggtccagctctgtgcggtgagctgaggtgtacttggctgtgatgggaaggcaaggaccgagttcaggctccctgggacctgaggaggggtttcagcctggaggctagggtggcatcctgcccaggcccgtggggcttttgggctccttggagtaaagggaatgagagggccttgtggaagaggagtgggggagtctgggctctgcattcgctccctccaccccctgccccctgagtgactctcccaccttgtggtctctgctgttgacccaggcctggctgggtggccctctgccccctggcctggcttcttgtggccggggtctgtgtgctattagtcatggatctgtgctggtctcgggctcagcttccctcagtgggtgggcccagggtcttgaatgtggagaggtggtggaccacatgccagcaggctgcctggctgcccctcctctcctggctccacccccagacgtccccaggaggccggtgtcagcctgggttggttctggtgcctggcttgtagctggcagggtgaggccacattctcccagctgcgtgtgtgcacgcaccccgggtgctctgtaggcatggcaggtggtgatggaggtttggggaggagtagtgtcatgctgggggcagcagggagctttgctctggggcctggtaggtggcaggcccaggggacacctgctggctgagggaggagcagggtggtggcagttggccgtgacctgggcagccagggccccaccctcagaggtgcagctggaagtcgtgcctgcctggctggcccatctctggagccaggagcccaggagcctgcctgccagcgagggtctttcttgttctgtcttggcatgtgtgtgctgggctccagggcagctgtgcggggtggtgtggctggagcatggtccccgtgacagatctgggcttatgaggagaacgggatgggtgaaggccctgtagatacaggaggtgggcctggggctgaccctgcgtctatcagctcaggaggcctgaggtcctgggccatcagaagggctgagcttttctcacctgtgaaaggggcacactgccgctttttcattgcaggtctcacgaagtcagatggggctgctggactcccagctcgggctctgcttgtgcccccagcccggctcccagacctgtccagttcctccccttcccagccttccctaccctctcctttgccccctagggaggaaggtttttacagagcccaccccctgcatccagccgccctagggctcaaggtgggccaggctgaggtctgtgcctggagctacctaagctgctcgtggcaggtgtgaggttcagcaccactctgcttcctgttttttctgagcttgggctggggatgacagggccctggcctccccaccctaccttcaggggatcctgtctgcacactggggaccacccccctccttcccacaccttcccagtagggaccaggagagctggctggtctggtatggaatgtgggcatctgggttcctgtgttgggtgggcatcggtctgttcctcctgccatggccctggggcccagagccctggggagaactcagggcatgtccgccttgtacattgggggtctggttcaaagctttggtatgggggcagggtggggcattcagtgcccaggcaacacggggaccattggagccagggaggactgcccttggccagggaggattggagagtgggctgggggtttgtcgctggtccctgagggtgggctgaagggtcaaagccgcagcacgataggaaggctgggaggtggaggggcgggttggggagcaggcggcaggcctgggtgggaggggactgctgctctcaggggccctcctgggctgctccatggtgtctttatgaggggagcaagctaggccagtgaaggggtgcttgtggagccaggcttcggcctgagctgctgctggtggtggagtgggggcaggaagacaaggatctgcaatcccaggccccagccacagtcgctatccccagaccccaggcctgagcggggtccctgtccccagaccctaggcctgattggagtccctgtccctagaccccaggcctgagtggggcccctatcctcaggccccaggcctgagctgggtccctgtccccaggtcccaggactgagcagggtccctgtctgcagacctgaggcctaagcagggtccctgtccccagaccccagatctgagtgaggtcactgtccccagaccacaggcctgagcggagtccctgtcctcaagaccacaggcctgagcggaggccctgtccccagaccacaggcctgagcggagtccctgtccccagaccacaggcctgagcgggattcctatccccacatcccaggcctgagcagggtgtggctggcatcagttgtaccctgggctttgtggcaggtgctagccggccctggctgccaccgtcttcacggtgggggacctgggacctagagggggtgtgctggggagtgggggtacacccaggcaaggccctggctggtctctggtgtggagcatgggtgtgtgtgttcctgcgtgggatgggctttggtctgctcctcctgctgcggccctggggcccagagccctggggatggtgtttgcccccaccccttcttccctgcctcgggtgacaatggtggcagaggcctgggcctctcagaagctcaggtttcaggaaatgtatctgtgcttggagctcctggcgcctgcaccaagcgctgtgctccgtagggggcgggaggctgatgcgggaggccgaggagaagaaaccaagtcggggcgttggtggggcagcaggtctaggaggctgtgttgtgttggcctggaccgtgcagggccctggacctgggggggccgttagcggggcagcagggaggctgtgttggccttgaccgtgcagggccctagacttgggttgcctgagttttgggatgctgtagattggggtacagtgggcagtggggtgccgtggacttagggtgcttggcatttggagtaccctgggccatgaggtgtgctgggccatgcagtgccctgggctgggggtgccctggacctggagtgccctgagctttggggtgccctggactgtgggtacactgggccatggggtgcacaaggctgtggggtgtactggatctagggtgccctgggcaggagggtactctgtactttgggtgccttggacctgaggtgtcctgggctttaaggtgccctggaccttggggtgtgctgggccatgcagtgctttggggctctggggtaccctgggctttggggtgccctggaactggggtgccctgggtcttggagtatgctgggccatgcagtgccctgggctgtgggatactctgggctttggggtgccctggacctggggtaccctgggctttgaggtgccctggcctggggtggaacatctattgtcttgtctgcctgtcctctggcttgtgccactgctgttgcccctgcctggggacaggaggaggggtttagacttagccttgagggttcgggctggggaggaggcaatcagatggtgggagatgaagttgggctgcgggtctgcttgtgcggtgggggtgggtcaggccgggcttgtagggagaggcttagctgggcctgcaggggtgaagcccttcccccttggcctccagagactgggcaggggcatagccctgctaggctggccttgagggagggcctgggttcctctccctgcttgccggggaacctgggcaggtgatgggtctctcacctgtccccagacccccagcccacacatcgcctattgcccctgccagcgccaggcccacatccccacatgtcccagccccgttcctagaagggcaacatgcccgccaacccccgcccaatccaggccctatagtccctcctgtgttctaggggtttggtgttgacaaaaccctgtcccagatcgtggcccgccaggcaggaaggacaggggtgagaggttgctattcgcagaggaggcaactgagtcctggaaggacaggggtgagaggttgctattcgcagaggaggcaactgagtcctggaaggacagggatgagaggttgctattcgcagaggaggcaactgagtcctggaaggacgggggtgagaggttgttattcacagaagaggcaaataagtcctggaggctggcccctagggaagaaggggagctgggagagctggcaggtggggtgaggcaggtaccgccccgtcagccagctcaggttcactctggatgacttcctgccatccaggtgtagggaccccagctggcgggcggtgaggccctctcggcgggcgggcaggcacacgtccctgcgggagcaggtaaccggagccctgggctcaggcgaaggtggcagtaatcttacctgagtggctggcatgaggtttcctgggagtcgagaggaactccctgctggccctgaagcccaggtgtggctgtgccgggagaccgggtggcctggcttttctctgcctgccccgtggccagagctgctctcagacccatgctggccccatcctctgacctcactattgctgcttcctggtcctgctggttcctgtccagcggctacagtgactgttaaagcctggtgggtcccagtcctcactcagacccccaacaacagacctcactcagacccccaacaacagacctcactcagacccccaacaacagacctcactcagacccccaacagacctcactcagacccccaacagacctcactcggacccccaacacccgaacagacctcactcagacccgcaacagtcacccacttcgcttagcctcaggaaggaagtccgtggtggggtctggatctgtggtatgaccccactgtccccgtgggctatgcgttctcagcccctgggccttcttgtgggctctgccatgcagctccttcacttcctcatgccctgcagcctcaatctcaatgccacctgttcaaagcctggcctggccttttttttttttttttgagatggagttttgccctcgttgcccaggctggagtgcaatggtgcgatctcggctcgctgcaacctcggcctcctgggttcaggtgattctcctgcctcagcctccagagtagctgggactacagacacctgccaccatggctggctaatttttatatttttagtagagatgaggattaaccgtgttgaccagactagtctcgaactcctgacctcaggtgatctgcctgcctcagcctcttaaagtgttgggattacaggcgtgagccactgtgacccgttggcctggccttattggaacaacagcccctgccccctgttgctttccccgagccccgctggctataggttgccgtccttggtggcagaggcatgcctgctgtacacttgatgtgaacgaaggaaggaaggaacgaaggaaggagccaaatgccagacgcctgggaagcggctgggtgctccaggtgttaccgggggtggggaagggcttggccaggtgcagctgcgagggtggtgctccaggcagatgggttgataggctggggtgggtgggtgggggtgggcaggagccttgggaaccccaagggtgctctgagctgagagggcgtggacagagtcctggtgggggtgtggatggagccctggggggtgtggatggagctgacgggggtggtttgtggacagagcccttggggggtgtggacacagtcctgggggtggtgtggacagagtcctggggggtgtggatggagccctgggggggtatggatggagcatgttggggggtgtggatggagctctgggggggtatggatggagccctgggggggtgtggatggagcatgttggggggggtggacagagctctggggggggtgtggacggagccctgttggggggtgtggatggagcatgttggggtgtgtggatggagcatgttggggggtgtggatggaactcggggggtgtggatggagctctggggggtatggatggagccctggggggtgtggatggagcatgttggggggtgtggacagagctctgggggggggtgtggacggagcatgttggggtgtgtggatggaactctgggggggtgtggatggagccctgggggggtgtggatggagctctgggggggtgtggatggagcatgttgcggggtgtggatggagccctggggaggtgatggagcctgttggggggtgtggatggaaccccgttgggggatgtggattgagttctttgggggtgtggatggagctctggggggtgtaaacagagctcggcggggggtgtggacggagccttgggaggcatgtggatggaactctggggattgtctggcgcctgtaggcagaggtttgcgggccctggtgacctcagggagccctggagatgggcggggactgggccccgtggcctggcggggccatggcggatgtgggaaaacgggtttaaggggagcttaagaggtgggattgagggtctgttgtcagctcgacgtggctagggagggttctaggagcgggttggggatggccccccacttccatcctgtgctcctacctgggtgagcctcctcgggccgtccccgggtgttctgcaggcaggggctcgggggcggggccggggttgcccagctgtgagtgaggcccagggtcagcagtcatgttgggccctagttgtctgtatttgagggacagtcggaggtgtggggcgggggactgggtgggggtcctggaggctgggctgggtgtggctggtagcacgttggttaggggaggggctggacgtgggagtgcagtcttctgagacatcttgggaggccaggcctgtccttagctggatgaggccgaggcactgggacgtgcgtggggtgggcggcgggtgaggaccagggaagggctggcaggcgtggggttgggccttgctggggaagtgtggttttccccagcttagccaggccttggggctggttggatggggtgtgctgagggatggagtgagcctggcctgcctggacactgcccaacgcagcatccccccggggtgggaagccagcaggccctgaggtgactcagccccagccccctcctctgggccccacctggaaggagccagggctgggctcaggggtcaagagcacaccaggggtagactggggggttcctgggcagtgagggctgagaggctgtggaatgtgggtacccagtgctgggtagtacagggcatgtcccgggggtcccacctgtctgagcatgtctgtgagtgacggtctccgtgggctgcactaggcggagcagggggccagccctgtggtctctttgcttggctgacagcatcgcctgtcgccatggctggggtacaagggccaggtggcccgggggcagagggggcatagtggccatggtctgaggctgtgctgggcagtcccaggacctcttggcctcagtttccccaactgtaccgcaagggcccctcctgccacctgttctgtgtgagggtggaggtaggtgtgggtttgcctgtgtgctgtatgcctgcaggacctgagctccggcctgttggggcctctggctgggcgccctgtacttggccaccccgtgcacttggtggaggccgccagcgtggtgatggggccccacgttctcccccgtggtcacccccagtgaggcaccaaggggcgttccacaggaaacgctcgggtcccggctgcccatggggcccctgtctgtggccactccagccaggctgccctttgcccacctctccccccggtcgctcttcctgtgctccgtgctgacttgagccagctcagggcaggctgggcctctggcaccccaacggtagggagcccaggcccctgagcccgcgtggcctggaggggcagtctccctcccttgagctgggtcatttttgggtctgcagaggatgtggcctgaggatgaggagggtggtgggtccctggctggggaggaagggccagagcctggcagacccaggggcagcgtctgagccctgggccttgtcccaccctgaacgaggcaggcaggtgtggcctcaggtacctgacccgcctccccatgtctgcagcgctcctttaccctcatcgtggaggcctgggactgggacaacgataccaccccgaatggtgagtgagccctgggccaggtggcagctcctctcagcttcagcgtgcctgtggcagggcccagctcctctgtctgcttgggacaaagccttgctttaccctgaggatcatgtgtgctgtttccctttttgctttggctgccaggaagctctgccacgtttgggacttgcagagctgtgcatgcactctcttccccagtcctggctttgcctatgttgttctcctcttgggtgtgctcttttggggcccatggcagtgacttagtggaggggacacccttgagtgtgtctctggctttgtggccccctctgcttgtctgtactggagcatggagccttggtggccctctccctgaggcaggggctctgcagggccctgcaggggtaacgggatgacttccatgggtgaatgcagaagcacccacaggccaagggagcagctcgtgtgaaggtctgggcaggagcgggctggctgtgcagggggagcagccggggctgggctcagatcatggaggctggcaagccactgagaggacacgggctccgcctggcaagctgtggctgccttatggagggtgggctgtggggccaggacacagaccgaggaggagctgccacgtgaatctgggcgtgtcagggtgacttggaccaggggcagtctgggggtgagaggggctctcagaagtggaggcatggggttggccaatgggttggaggagggagagcggggccagggcatcctggctgccagcagagtggaggggctgttttcagggcagggacggcggtgggggtgcccaggtggggagcagcagttgtggggaccccagcggctcagggcaggggtgtttcctgagggggtggcagagagacaggtgggctgagtcccaagcaaggtcgtcagggctcttgacaacgtgagcctggagaggctggggcggccgggacgccccttggggagtgggccagcacagtgtcctcccaggccttggcccgaggcgggagaggtggggtctggaggacccgttcaccttttattgtgcaaaacgtcgagcctgtgcctaagcgcagggaccggcatcacggactttgcataccagcgccagcagctgtggtgcccctggcccctggtctcctggtggcttacttaaagtgaggcttagacagcgggtcacgggacctatgcctgtcttgggggcctgaggggaggcttgtcttaaggtggggacggtagtggtgtttggcacttctgggagcaagtcacagcgcaggagaggggagggcaactgagcaccatgtccgtgctgtcgagggctggacacggcgcaggtgggtgcaggtgttggagcagggctgcaggtgggtgggcacaggtgtgggacgtgagactcacgccctggcagcagccgtgccttctctgtggagcctgtggtctcagcagccctccctgcagggcccctagcccctagccgggccccccgaccctctgcgtttagggtgggagcggggcgcaggcttggtggcgggagggagaggcctctcggggccctgagctttctgtagcagcctggccgggggccctgccctccgtgtgctgctgcctgctgtgccccggccttgcagcagccgcaggcttctgccccgtccccgttgttcctggaggacccctggccgggctggtttctctggcctgtgctgactctgccgcctccccaagaggagctgctgatcgagcgagtgtcgcatgccggcatgatcaacccggaggaccgctggaagagcctgcacttcagcggccacgtggcgcacctggagctgcagatccgcgtgcgctgcgacgagaactactacagcgccacttgcaacaagttctgccggccccgcaacgactttttcggccactacacctgcgaccagtacggcaacaaggcctgcatggacggctggatgggcaaggagtgcaaggaaggtgagggggccgctgggctgcgtggagggcagggagggcctcgggcagggccccgggcacaggccttgcggccaggctggctgcagctgtgcctctcgctcctctctgttcgcagctgtgtgtaaacaagggtgtaatttgctccacgggggatgcaccgtgcctggggagtgcaggtgagtgtgccgccggcccgtctttgccctcccaacctttgccctcacgtcctcactggcacacacagccttgctgtcaggagtcgcccggagctggctggaggttgggcacacagctgtgagagccgggccctgagctcgggaggctccttagtgcagtaggtgcgtgtctgagcatgggatgtgtctgatggcggcagccatgtgaggacagtgaggagagactggggaggctggctggacagtcacgtcaccgaggggcagagacccggaggctgcaagccacccagagatggggcatgggcagaggacacggtaaccctgcccatggggagggggtgggcggcgagcggccggcaagtgacaccagcaggcgaggggcggcagagcagaccagtggtgggagctgaggcctgcaggaccagggacagaggaaggggctgctggcaggtttgtagctgggcaaggtgggtggaagggctgtggtagctgttgagtggggaagcaccagacgggaggctgtgagggggaggccgctgtggggcatgtgggggtggtgggggaggggccagcgggatggggagggggtcagtggaagggggagaggcgcacgggtcctgcagacatcctggggtggagcccaggggtttgtggatggatttgatcaagcaggaagggtgtggagtcagggagaaccccaagctgctgagtagcagagccatggtggcaggaggaatgccacagaggagcaggcggggccggggttagctggatgtggagaggcgatgcctgccctgtccctggagacacccagaaagctcgtgggagaggcctggcctgcgccacgcggggcctgtggggggtggcattcaggcggtgacgggaaagtggggaaggcagagaggagggaggccaaggagcaagtcccggctgccacaggtcagggcggatggatgaggagtcagcaagggcctccacaagggagtgtccggggtcttacagccaagtccagatggtggaggcctctggacccagaccagagtgtgggggatccagccaggggggctggcagctttgccctagagtggagcagagaagtcagcagggcaaccagaggggctggggcccagggtctggggtgggcacgggcttcgagccgtggcgctcactgtgcgtgagcaagctggggagcccgagagaggggcgcgagcgggtggagagacagcaggtggaggtgagcaccgccctccagccagccttggattgcaggggtcccaggacctccctctgtggagtgggtttgcctccatgggacgaggacactggggcacagagagcctactgatttccccagggtcacacagcgtggcgttttggagaggagtcggggagtttgggaaccagctgagttgggagccaaggtggggaggtgggtgacccttccacaggccccacggttgagtggcctggagggtacagtgaggagctttcccggccagtcccagagcggggaggcaagcagggctggggccgcccacccggtcacttgcacacacagggattcccggcaggttgagcgagtcccaagtcagctcagaaagtgcaacaaggtggacctggtctgggcagatgtagatgtagatctacgggagtcggccccactcaccctcgcctggcccagtgtgcatcacacaacctggatggcagtgccaccctccctggatggctgctggctggcagcttgaatgtcacaccaaggctggaggaaggcagcagagaagttggccatccctgccctttacccgcaggaagatgagccggagtctggggggcctggtgggtgggggcagtaggtgagctccgcctgcccctcttgctggccctgtcggggaggcccagctgttgctgacagcctcggctcaggttccagtgcaggacgcccccccaccggatgctgcggagatggccatgccttcctgccgccgcctctccagggccctggggctgctggctggggaaaccaggaggtgggggcctggtgtgggctgccctgcccagggtcgagagcacgcccttgggacccacgaggtctgggctctgagcccggctgtggccgctctctggccgatgacccaaggtgtgtcacagccccgccctgagcctgggtctctgtgtctgtggaggagggattctaggcgggatgtgaggccacccacgcggaccactgtgcatgctgggctggatactggagacacgttcttcccggcctcagtttccccatttgtggcagctgaactgggctgataggccttcggtgctggctgtgtggcttgagggcggctcaggaagggccgtggttctttccttttacaaaaataaagtgtggcgggtgccggtgtggaagtgacgtggcctggatgacattcccgtcctgcaggaccggagagttctaggaagggccccccgggagtcccggcagggcctggatggcagcctgctgagccttggggtcgttgcaggctctctcccctgacggaggcaccctcaagtcaggccatgttctaccctggccacctgccctctcctgggggactcccaagacaggacgttggccgatagcctggggcagggcgagtcctggtggttgtgtcctggggggtgcagctgggggtgcagctggagctcctgcagaatcaggaactaccctgggcagggctggcccaggccagcctgtgggcctcagtagccccatctgtgagatgggtaccttgtgggactttactgggagcgagcgaaatgactgcctttgaggtgggggcgagggcacgtgctgtgcccagggccacatggccgaggcagagccaggagtgctcccctgctgcccgctggcctacccagcccctggtgcctcccggccctggcagcaccttgtgagtccgagccggcattctcatccccggggtcccggcagggccttcctttcctggtgcctgctctcggggcccagctcacgggtgaatcccaaaatagctcagggaggagtgacgggacagctggggctgaccgtcggcagccagcggccgggaatgcccgtgacagtggggctggccggcagggctgcaacccctgcctggctggggctgctccagttcaaaggcctgaggccgcccgccggccctgggtgtggcgtgggtgactgtgcctggctcccctgccaccctttcaggcaccacagctcactgggtcttgcgcccctcctccttcccccaggtgcagctacggctggcaagggaggttctgcgatgagtgtgtcccctaccccggctgcgtgcatggcagttgtgtggagccctggcagtgcaactgtgagaccaactggggcggcctgctctgtgacaaaggtagtggtagggggcggcaggcctaatgctctgccatcgaagtgtgggttgtgggggagcggggggccggcttttcccctgagcatcccacccctgcccccagacctgaactactgtggcagccaccacccctgcaccaacggaggcacgtgcatcaacgccgagcctgaccagtaccgctgcacctgccctgacggctactcgggcaggaactgtgagaagggtacgtggggggctggccacccaaattctggccaggcagggactggttccctggggagccggtcaggccccatccctctggcgtcctgtgtggtgggcccctgacccccagcttgggaacctgtgggcttggggaggagtgcttgtggaaagctgggggcctggctgccagctctgccccctccccgcggttctacagctgagcacgcctgcacctccaacccgtgtgccaacgggggctcttgccatgaggtgccgtccggcttcgaatgccactgcccatcgggctggagcgggcccacctgtgcccttggtgagtgtctgcacgtgagtaggggactcctgcctagtatcagtgggggtctgggagtggggcaactcgctggggatggggtgcagtggtcaagtccacacgtgtggctgcggctggcttggcgaggacaaatggcaggaagacccaggcttgcagcgccacctgcccatggggaccttattcccacggctcacactgccagggccccacctttctccaccctctgcagacatcgatgagtgtgcttcgaacccgtgtgcggccggtggcacctgtgtggaccaggtggacggctttgagtgcatctgccccgagcagtgggtgggggccacctgccagctgggtaagggctccgagcgagtgcatgggaacgtgggccgcgcatgcgggctgcgggggctgctggggctgcgggggctgctggggctgctggggctgctgggctgcgggtgccaggtgcccgtgctgcagggggcaggcagggcccgagccccacggctcccaccttgtctctttcacagacgccaatgagtgtgaagggaagccatgccttaacgctttttcttgcaaaaacctgattggcggctattactgtgattgcatcccgggctggaagggcatcaactgccatatcagtcagtatggggggtgggcgccggcgggtgggccgaggcacatgggaccccgcctctgaccctgctcctctgcccccagacgtcaacgactgtcgcgggcagtgtcagcatgggggcacctgcaaggtgaggcggggccaggagggtgtgtggcgtgggtgctgcggggccgtcagggtgcctgcgggacgctcacctggctggcccgcccaggacctggtgaacgggtaccagtgtgtgtgcccacggggcttcggaggccggcattgcgagctggaacgagacgagtgtgccagcagcccctgccacagcggcggcctctgcgaggacctggccgacggcttccactgccactgcccccagggcttctccgggcctctctgtgaggtgaggtctgcctggtcaccctgccccacctgctgctctgggagctgtagggcaggcctcgtcccctgaccatggggcctgagtgacccaggggtgctgcaggggaagttgtccccaaggcgtcccaggctcagctctccactgggtgccaggtgggcaggcggggctgtcacaggtcaccaggcttggccccctgtggccattgcttgttgtgatgggtttcctggtggcctgggctaggagcccccgggctgctggctgcccaggcctatctgtccatctgtgcactccctcgggactggagggcagggggctctggtgggcagagcacatggggtagggtgggtgcctgatggtggagaggtatacacctgtcataggtgagtcctgggtcggagtgggcatctctctcagggctgatgctctcgcctccctctgaccatctgttggtactggaccccctcccccaacctccccttcccccctgcctccaaagtaacctgccttcccccttccccaccacccctaccacccccttccccacctcccccttccccacctcccccaaccctgcctccccccacccacctcactatcacccctcccctacctcccccaaccctgcctccccccacccacctccctaccacccccttccccacctcccccaaccctgcctccccccacccacctccctaccacccccttccccacctcccccaaccctgcctccccattacctgcctccctaccaccccctccccttacttcccctttttccctgcctccccccacccacctccctaccaccctcggccgcccacgatcctgccctggccttggtgcagaggatgggcctcctgtccagagggcttcttggggcccagggcaggggtctgacctcaggacctgcaagcatggcagtggctggccctggaaaagacccacagtcttggctctgagggtggccaggcagtgtgtgaggggctcaggagctgtccttcctgccagcagcaggggccaaggccacactcctcccgagggacagtgaggaagctgggctgcagtggaggtgggggtgggggcccacaggtatctgcgttcagctaaggcctgggcagtctcaggtgggcaggggtcttgggctctggctggcactgttaggcccagggcggaggggcctgggggtccccagggatctaccttcgtatggacagaggcctggcctgtgttcccggcctgggcctgggcctaggctctcacaggcaccccccaccctgcaggtggatgtcgacctttgtgagccaagcccctgccggaacggcgctcgctgctataacctggagggtgactattactgcgcctgccctgatgactttggtggcaagaactgctccgtgccccgcgagccgtgccctggcggggcctgcagaggtgctgggtgcggcatggggtggtgggggaggtggtggggcaggggcgggcctgactcctgactgtactgcctgccatagtgatcgatggctgcgggtcagacgcggggcctgggatgcctggcacagcagcctccggcgtgtgtggcccccatggacgctgcgtcagccagccagggggcaacttttcctgcatctgtgacagtggctttactggcacctactgccatgagagtgagtggccacgaacggcgggctggtggtggggctgggctggcctgaggccctggctcaccccgctcgcctctgcagacattgacgactgcctgggccagccctgccgcaatgggggcacatgcatcgatgaggtggacgccttccgctgcttctgccccagcggctgggagggcgagctctgcgacaccagtgagtgttccagcacccgcccacacggcctgtgcctccacccctgtgggccccttatcaccctgagatggaccgctgtctgggtgcggcaggccccgtacccagaaaggcctggccagggggtgctgccaccatggggtggagtcccaggctgcccccatgcccgaggccagctcccccggcccgacgctcctcccccgcccctctctgtcctcacctggcccagctccagtgcttcctcccccgggaagccctccctgagcgccggtgaccccccgcccgctgaccggcgtcctcgcccccagatcccaacgactgccttcccgatccctgccacagccgcggccgctgctacgacctggtcaatgacttctactgtgcgtgcgacgacggctggaagggcaagacctgccactcacgtgagtgtccgcaggccctggccgcctggggctgcccccaggaccctggccctggcggtctggggcctgcctgctgagcggcccatgtgccaacaggcgagttccagtgcgatgcctacacctgcagcaacggtggcacctgctacgacagcggcgacaccttccgctgcgcctgcccccccggctggaagggcagcacctgcgccgtcggtgaggagcccccgctgcctctgcgaccgccgggcatatgccctcccaggcaccgctccctcgggcgcgatgggccgaggggtcttttttgagggccacacctgccacctgccccctgccccctgcccccgggtctgtctgccctgtctgggttgggggcgcggtatggagacccagggccagcccagggccaggtgagacgctccctcctcctcctctccttacagccaagaacagcagctgcctgcccaacccctgtgtgaatggtggcacctgcgtgggcagcggggcctccttctcctgcatctgccgggacggctgggagggtcgtacttgcactcacagtgagtgtgggaggggtgtgggcgggggccgctttcctccacccagatgacatccctgcccccgactcgccccccagtcccttctgccagcccctccccctgctgcccctgcccccagcaaaaggcaccctccttgatgaccctccccagccccacagcctgatcacgccaagccagcctggacagtgcctggcacgcttggggggtgggtactgatcccctgcgttctcttctcccaaaccagataccaacgactgcaaccctctgccttggtgagtggcaccctgggggccacagcaggggtgggtgggacttggcataccacggggggccacctgatgcccaccctctgctctgcagctacaatggtggcatctgtgttgacggcgtcaactggttccgctgcgagtgtgcacctggcttcgcggggcctgactgccgcatcagtgagtggccagacagccccagccctgggagcccctcagcccagccgcggtgtcaggagtctggggacatcaacgtccacgtcccttgaagggcagtgtggccacaactacttcctgcctctcttctgagcctcagtttccccacatgtctgtgccctgtggggttcctgctgtataccctgccaagtgattaagtggggagccccagcctgggggaccagtccggggcccagggagctgtgggggttggagcgtgcagcctgacgtgggctcctctgtggccgcagggctgttgtccctgggtgttggcccagctgtctgtccagcaccccttggctggtccgacgcagcagctggggctaatccaggatgggacaggcccactgcagaagcagacggaggagggtgctgttgggccagggtcaggctgggctcaggaaggcctcaggcaggcagcagcttgggctcgggggcaggggctgctcctcattgtcctggggcttgcgcctgtgtgccactggctccccgctgccctaggccatgccggtcctgcggtgggcgttggcctcactgcactgagcagcggtggctctccctgcagacatcgacgagtgccagtcctcgccctgtgcctacggggccacgtgtgtggatgagatcaacgggtatcgctgtagctgcccacccggccgagccggcccccggtgccaggaaggtaggccccgtgtgattgccctgggttggggcgggttggggggcatgggtgacacccagccccgagggccagatgcccactgctgaccctcgagccccttctccccacagtgatcgggttcgggagatcctgctggtcccggggcactccgttcccacacggaagctcctgggtggaagactgcaacagctgccgctgcctggatggccgccgtgactgcagcaaggtgagggcagcccgtgagccgccctgccctacccgaggctggtgcacgctgaccctggccactctgtgagatcaggaggcgggtgctggggtccggatggactgagagccgtctgccctcagggacacccagggaggcgagagctcagccaggccccatgcttcgatgtgcagttgggaaaacaggcctggtctgggtcctgccttgctccgcctgccctttctgatgtcgagcttggcctgcctccctgggagccctgggtagggggtgggctgggccctggggctcacagacttgggcggtgtccctccttggcatggggcccgtgcctgcctgtgggttctcatctgtgtgcctgcatctgaccctcctgtgcgcctgcgcctgaccctcctgtgcgtgcctgcccaggtgtggtgcggatggaagccttgtctgctggccggccagcccgaggccctgagcgcccagtgcccactggggcaaaggtgcctggagaaggccccaggccagtgtctgcgaccaccctgtgaggcctggggggagtgcggcgcagaagagccaccgagcaccccctgcctgccacgctccggccacctggacaataactgtgcccgcctcaccttgcatttcaaccgtgaccacgtgccccaggtgaggggcctggtggcatctgagcttgcagaggccacacgccggcatctgctcgtggcatggcgaaagcctagccccgcagggcagggaggccctggttggctgagcagagtcactcttggtcacagagagtggccctgtggggtcagatgagaggggcattgggcctggtgctgggtggaggtggcagaggaggctgggagagcagccagctgggggtgcctgtttgtccagctgccctgagggcctggactgacggcgccatggctgcctggccccagctcttgggctgtagctccgtgggcagttttgccctggcctaggagccacctttgcctgctgtgtgcttggagctgggcccctgtctcccaggaggggctcagaactggaggagacccactgtaccccgccctgcctctccttcccccactggcctgcaggtggagctgggtccgccctgaggatgggcgggtgggcaccgtcactcctgcctcctggtatagggcacagccgggtgggaagctgcccccccaggcccttggcatccttgctgtgctctcctgggcgggctgtagggtgtgtcccacgtgtacccacagcgccagtccagggatgtaggtgtcaggttcacggccctgccctgcccacgcactgcctgtctctgcccagggcaccacggtgggcgccatttgctccgggatccgctccctgccagccacaagggctgtggcacgggaccgcctgctggtgttgctttgcgaccgggcgtcctcgggggccagtgctgtggaggtggccgtggtgagtgcccagtggggagcagcacctgggtgggccctgggtcccgtactatgcaggtcctggctatgctggacagaggctctggcgaggctagtcctggtgcggaaggactgcgggcaggcctgtctccctgcggcccctcgctgtccatgccgcagacccgtggaactgctccctgggcctggccagcatgagggagatgcagggctgtggtgtggagcccgcttcccctgcagctgcatcctcgcccggtcccctgctctgtttttgtctctgtgtccctacgtcacaggcagcaggagagtccgtgggcttagtctgccctgggaggcctgctttgggactggcacctgccctggacctggggggtgtcagatgtgaatggataccaagggggtcgggtgagactggggtggagacatgcccggagaggggagggaatgttctggaacatggtgggtgggtgtgcagagcagtgggtgtggccatggcacagtgtggctggtggaggccatggccaggcacaggaaggacgtgcagtgttttggtgccctgaggccgcagagggggtgggggacatggatgggtgctgctgggtgatggaagggcagtaggggcaggggaagatgtaagaagtgtgccagcacaggtcagggcgccatcagggatgtggtggaggcaggggcacagccccgggttgctgtggcctcgtgaaggcactaggtttgtggtgcccctggggtgtggcccataggtgggggtgggggctgggaactgacaagaagggatggccatcacggagcaggtgtcagcgaatggggccacacacctccccaactcactgcctggtggcgaggtccccaccgcaggaccccgggctctcctgtgtgcccggacggggacaccctccacccctccacttccccccacccctcactgcctgctggtgaggtccccaccgcaggaccctgggctgtcccgtgcgcccggatggggacatcctccacccctccccttccccccactgctcgctgcctggtggtgaggtccccacacctcaggaccctgggctctcctgtgtgcccggatggggacagcctccacccctccactcctccccccgctactccccactcactgcctggtggtgaagtcgccactgcaggaccccgggctctcgtctcccgtgcgcccaccttgctccagtgtggccagggcctcagtgttgggggcaggctgctgggagcctggagccctcgagccatccccacaatgccgttctttgccgcagtccttcagccctgccagggacctgcctgacagcagcctgatccagggcgcggcccacgccatcgtggccgccatcacccagcgggggaacagctcactgctcctggctgtcaccgaggtcaaggtggagacggttgttacgggcggctcttccacaggtaagcgcgggaggtgggcccctgggaaggcaccaggcaggcaactcaggcattgggcacagagccggccgatcctgccgatcctgccagccaccaggaacacagaagtccctggcacctgctgccccagccgcccagccccacaacctgaccttcccagcccccgtcctgggaccctccccacgagccagcaaccggagggtggggcccggccgcctggcccgcagggccctcccaggcctgggtgtgtggctagtgccccgcaggtgcccaggcctcattgcccaccggctcttctccccggtccccaggtctgctggtgcctgtgctgtgtggtgccttcagcgtgctgtggctggcgtgcgtggtcctgtgcgtgtggtggacacgcaagcgcaggaaagagcgggagaggagccggctgccgcgggaggagagcgccaacaaccagtgggccccgctcaaccccatccgcaaccccattgagcggccggggggccacaaggacgtgctctaccagtgcaagaacttcacgccgccgccgcgcagggcggacgaggcgctgcccgggccggccggccacgcggccgtcagggaggatgaggaggacgaggatctgggccgcggtgaggaggactccctggaggcggagaagttcctctcacacaaattcaccaaagatcctggccgctcgccggggaggccggcccactgggcctcaggccccaaagtggacaaccgcgcggtcaggagcatcaatgaggcccgctacgccggcaaggagtaggggcggctgccagctgggccgggacccagggccctcggtgggagccatgccgtctgccggacccggaggccgaggccatgtgcatagtttctttattttgtgtaaaaaaaccaccaaaaacaaaaaccaaatgtttattttctacgtttctttaaccttgtataaattattcagtaactgtcaggctgaaaacaatggagtattctcggatagttgctatttttgtaaagtttccgtgcgtggcactcgctgtatgaaaggagagagcaaagggtgtctgcgtcgtcaccaaatcgtagcgtttgttaccagaggttgtgcactgtttacagaatcttccttttattcctcactcgggtttctctgtggctccaggccaaagtgccggtgagacccatggctgtgttggtgtggcccatggctgttggtgggacccgtggctgatggtgtggcctgtggctgtcggtgggactcgtggctgtcaatgggacctgtggctgtcggtgggacctacggtggtcggtgggaccctggttattgatgtggccctggctgccggcacggcccgtggctgttgacgcacctgtggttgttagtggggcctgaggtcatcggcgtggcccaaggctggcaggtcaacctcgcgcttgctggccagtccaccctgcctgccgtctgtgcttcctcctgcccagaacgcccgctccagcgatctctccactgtgctttcagaagtgcccttcctgctgcgcagttctcccatcctgggacggcggcagtattgaagctcgtgacaagtgccttcacacagacccctcgcaactgtccacgcgtgccgtggcaccaggcgctgcccacctgccggccccggccgcccctcctcgtgaaagtgcatttttgtaaatgtgtacatattaaaggaagcactctgtatatttgattgaataatgccaccattccggcctcccttgttctttcggtgctgtcccttttgtattgagagtgaggttgggggagagccacgccggcagagaggcttggggcagtggggcgcgtgctgggtattggcccacgtggctgtggtggctgtagagggcgagacggttctgttgagtcggggcctgccagggcctcgaatgcgttggcatgccaaggtggtggatgcaggtttggccaaaaccttcctgggaatggggaggggggtgtctaggtgcctggcacccgaccctgactaaaacagctgaaaacagttttataaaatagtataaaattgcttacccacgaatacgtatcaaggtcttaaggaattaacaggtcaaaatttttattcattcatttattcctttgttttgcttggtcattcagaggcaaggtcagcatttgatggaggcaggagagaagcagcccttccacctggccctggagctggttttgcccctcactgcttgagccaactggaacgtggcatggtggcctcagggctgggcatggaaggccgactccaaggctgactccgagccgcctgtcagtgatgtgcaagtctttaccctgctgtgaggggtaggaggtcaactgagtcaaggagcaaagccaagaaccagatctgtacaaaagagaaaaaaaaagtcctgctgacagcctgggagtgaggctgccttgcacaggcagaacaaatgaataaatgaatgaacgaataaaaattttgacctggtaa

SEQ ID NO: 270 - DNA, 90338 bp, Homo sapiens
  source 1..90338: mol_type = genomic DNA; note = NC_000006.12:c13711835-13621498 RANBP9 [organism=Homo sapiens] [GeneID=10048] [chromosome=6]
aaacagccgcgagagcagcggccgcggcggccgccagcgcgccttcccctcccgcgctcccgcgtcgcccccgccctcggcgcctcgtccccgggccgcgcgcccgcgctccggccaacgttctctcccggcctcccgggcccgccgcctactcccgcgtctccgagctcctcaaccgccgcggtctccctgggcgcgcggcccgccgcctgcttccggggcgggcggactgggcgcctggtgccggcggccgcagcgacagcgcccccgggaagcagaggaggaaggagagaagaggtggaggtggccgcaggctgagtcgcggccgggatgtccgggcagccgccgccgccgccgccgcagcagcagcaacagcagcagcagctgtcgccgccaccgccggcggccttggccccagtctccggagtcgtcctgccggcgcccccggccgtcagcgccggctcttctccggccggctcgcccggcggcggtgcgggcggcgaaggcttaggggccgcggcggccgccctgctcctccaccctccgccgccgccgcccccggccaccgcggccccgccgcccccgccgccgcccccgcctccccctgcctcagcggctgcccccgccagcgggccgcccgctcccccgggccttgcagcgggccccggcccggctggaggagccccgaccccagctctggtggcgggcagcagcgccgcggcccccttccctcacggggactcggccctgaacgagcaggagaaggagttgcagcggcggctgaagcgtctctacccggccgtggacgaacaagagacgccgctgcctcggtcctggagcccgaaggacaagttcagctacatcggcctctctcagaacaacctgcgggtgcactacaaaggtactgggcgtgtgtcctgcggtgggagtggggcactgacccgacgtggccggccgccgctgcgccgctctcgacccgcccccgacccccgccctcgcgggctctgccctcggaggccactcgccgcctgttgtgctgctccgggtgggcgcgggggtcgcggtgaagggtccgagggtgaggggcgagattcttggaaaaggaaggtgagtagaatgccccagggtagaaaggagctggtaatcctagaccaggagcaggacaccttgagggaatccgggatgacaggacagaactggctttctgatttccctgggagataaatcttggggcttgggtagaggaatccatggactcggagttgggttacattgttctccaggtggtgggtcaggcgttctcctcttacaaggggggaagagaggcacgattctgaggtatgatttctaattaagagagagcagggatacacagggggaggagtaatcaaaattaggccagagattgtctagggggacaaaaggacaaggggcccaagtttgccatcaatatattttagtaaaagcaaccgggagggtaagagaagggaaccccaggaacaccctttttcttaggggagcagaaacctacccctcccgattggaagtgccctatacaggtccttaggtgttgatatcacatgaagtcttgttgaaaacgaagatggaacaaaatgcagcttagtattttgaagaaaattggcttatgttttgcacttgcagttaaaaacaacaaccttaggcttgtgcttgcccctttcctccctcacctacctctcctaggttaaaacaaagctggaagcaaatcagttgtatataaaattatgaattgctatgggaactattgaaatgtagcccaatttaatagcatgtatcaagtttacttgtgtggaagaaaaaaaaatcaacctaacgtatcagtcttgtctggaaacaaatccagggttttaggccccaaacctaaagcagaagcttttacattcacggcagcctcactttgattggctgtaaaggggtctactcagatcctagtgacatgtatgtagaggagataaacaaccttgtggttaaattcttaacttatacgggactgaaatttgagaagaagcttgataagtaagttactatttaatcagaaaggcgaatggcaatagaaatctaccaaatgatttggctgcaaagaatcacgcacaaaaataggccttgttgaacattctttttattctcgccatacatccaaagaagtacttccaagtgttatcctccttaatctaaacgtctgaacgtttcattcacaatatcaaatctttgttttttctcaagttaggaccttttgttaatttccttgtgaagtatttctacttttatgttttaatttgtgtgaacggtgctatgttatgaggtgtttacttctgatctggctgccagaaagctattgttagatgtgacagaattttataattttaaatttatggttgacagtaaataatttgctcataaagtcagagccagtgtagatgaacaaagaattctagatttcctgagttctgcagttgtttgtggttgtagatattttacaagactgagcctcagtttcttcctctgagtggtgtgtaagttgagctggacgattggtaaggaaatttccagctctgaatttccgtgatgtctaagattcgtgattactgtttatttagtactgtaaggtgtcttgattagttttagtcttttacataaaattgatgattaggtcagagaaaaatacacgtttatatgaaattagttggagtttggaatatttctgacactgctgtctcagttgtttttattcttggcctctttattactttctgttgtgtaatactaaggttcactttctgggaacataactgttttataaacataaatcattatttctggaagaacagattttgttgttatccttttatttttcctctcttctatctttcctttgtctctctcttaccccttgtcagaaagtctttttccctttctactgcctcttcctcttgtcttgttactgtagactgtgtgtgtgtgtgtgtgtgtgtgtgtgagttttccgttgttactgttgattttctgcgtgttttgtgagaggaccacgccgattgtggtgggcaactgtgtcccagtagcagtagcagtagcaaaggagaagtatcatagagagtagataatactttaaaatcacagaataagaagagtgaatttttatttaacctatcattgtgctgcattggttttacctaagtatcatgagacacttttaacagtaaaaactactattcatatattcacgtattacagaatttcaaaagaatgattttaattattttccagagtgacgagaattttccttatctttgaaatagaagtattttgctttcttttgctccaaaggtattctggttttttgttgttgttctggtgtttttgtgtatgtgtgtgtgataggatttcaactttgttgccttgatggagtgcagtggtgcgatcatggctcactgcagtctagacctcctaggctcaagggatccccctgcctccatctcccaagtagctgggaccacaggctcctgtcactatgctgggctaagttgtaatttttttttttgtggagatggggtcttactgtgttgcctaggctagtgttgaatgtttgggctccagtgatcctcccaccttggcatcccaaagtactggaattacaagcctgagccactgtgtccagcctgtattctgtttttaagatgttcttctaaattgaaattactgcttttggaagcagtattgttcctgaaatgatttgaagagattaatgttagataatactagacatgcagataaggttgattggattgcagaggaacaacagggtatgtatagtatatgtgaaatttttttaaaggccttttgcttagcagtcacacaacaactattgaaaaacccagggatagcccctcttatttttgaaattgttgtcagtattgaataagtacaaatgtgacaagtttagacttagttataatgataacgggaaaataattttaataaatatgacaatggacttagtttaaatgtttcaacaacagattgcatttttatatttttctagttattaccactatttggatattttatagagtgctttatatatacacacactagtggatctggacaagatcctggaattttcattttaaattttagagagtggtagaacctggaggttagatcttcccagtcatgagtaaatcaggattgaaaattttcactaactccagatttagtgttcttttcacaatcccatagtattgcctctttaagttcatatgagacttaattatctcaagtagataaaatcctgtgatcacatttagaacttttaaagaatagttgagattgaaaatacttactctgggggaaaaaggtaactggaacacagtgcttcagaaaagtccagacaccttgattttactaatttagaacagtttagaagaaatccaaggtaagtcaaagttgggaattataggaagcaatgaaatagtcaatttcagtgggtgtggtggcttacgcctgtaatcccagcactttgggaggccaaagtagaaggatcgcttgagcccaagagttctagaccagcctgggcaacatagtgggaccccgtctctacccctaaaaattaaccgggctaagtggcacacacttgaaatcccagccacttaggaggctgagggaggaggattggttgagcccaggaggttgaggcttcagtgagctatgatggcctgggtgacagagtgagaccctatcttaaaaaaaaaataagtaaataaatagtgaattgcattttttttttttttttttgagacagagtcttgctctatcgtccaggctggagtgcggtggtacaatctctactcattgcagcctctcctgggttcatgcagttcttctgcctcagcctcctgagtagctgagtagctgggattacaggcgcttagcaccacgtccggctaattcttgtatttctagtagagacggggtttcaccatgttggccaggctggtcttgaactcctgacctcagatgatctgcccgcctcggcctcccaaaatgccgggattacaggcatgagccactgcgcctggcctgaattgtcctttttttttttttttaagatggagtctcgctctgctgttgtcaggctggagtacagtggcgccatcttggctcactgcaacctccgcctcccgggttcaagcaattcttctgcctcagcctcctgaatagctgagaatacaggcatgcgccaccacgcctggctaatttttgtatttttagtagaggggaggtttcaacatgttggccaggatggtctcgatctcttgacctcgtgatctgcccgcctcgccctcccaaagtgctgggattacaggcgtgagccacagtgcccagccagaatttcactttttaattgaaatgttatgaacaataaccaaataggttgaacttttttgttgttttttgagaccgagtcttgctctgttgcccaggctggagtgcagtggcgccatctcggctcactgcaagctccgcctcccgcgttcacgccattttcctgcctcagccttccaagtagctgggactacaggtgcccgccgcgacgcccggctaattttttgtatttttagtagagatagggtttcaccgtgttagccaaggtggtctcttatctgctgacctagtgatccactcgcctcggcctcccaaagtgctgggattacaggagtgataggttgaacttttgttatacttactctgtctttcccacctgtacccccagtcattagcgcttgaacacttcctaaatataattgcttatctaatttcttgcactttttaagtttgaacagatatttcagcatgcttgcttacaagtgcaaatgtctgttaagcattacgggggtgatataaaaatgtttcttttttttttttttttttgagacggagtcttgctctgtcgcccaggcccaggctgcagggcagtggcgcgatctccgctcactgcaagctccgcctcctgggttcagaccattctcctgcttcagcctccccagtagctgggactacatgcgcctgccaccacgcctggctaatttcttttgtatttttaatagagagggggtttcaccgagttagtcaggatggtcttgatctcctgaccttgtgatctgcgcgcctcgtcctcccaaagtgctgggattacaggcgtgagccaccgcgcccggcctaaaaatgttccttaaaatgaaggaattgaagaattacttgccaagattttgggaaattaggtttaaaaatgccagttggtaactgcaagaatcaagtaaatctaataatcatgcagaacagtagacaataataatgtatattctttttttttttttttttttttttttttttgagacagaatcttgctctgtcgcccaggccgaagtgcagtggtggcactttgtcagctcactgcaacctccatctcctggattcaagtgactttccagcctcagcctcccaagtagccgggattacaagcgcctgccaccacgcctggctaatttttgtatatttagtagcgatggggttttgccatgttggccaggctggtctggaactcctgacctcaagtgatccgcctgccttggcttctcaaagtgctgggattataggcgtgaaccactgcacccagcctaatgatatatattctgctagactagacaatttatatgtgtttttcactgttcatttcttcatttatttaatgagcttttagtgaatgtttactttgtgctaggttctggacactcagaggtggagaagatactgtcattgaattcagagagctcagaggacataaaatagagtagtaagggaaatattatagagagtactgtggaaaataggaggagcgtataacccaggctgacattggaaagaatgaaggaagtgtaggtatcagggatagcttcttggaggagtcgaggctagtggtcagtcttaaaagatgagtaggatataggagaaagggaggggctaggtgttgcaaatgaaggaaaagcaaaaacatagagaattactttatgtgtctggttttacaagcaattttgggttggcatttagagtatgtgacaaggagcatctgggaaaagatcaattaggaggcttttttttttttctcttttgaggcagggtctgactccattgtccaggctagaatgcagtggtgcgatctaggctcactgcaacctctgcctcctgggctcaagtgatcctcccacctcagcatcctgaatagctgcaactacaggcacgtgccaccattcccagctaattttttgtatttttttgtagagaagggggttttgccatgttgcccaggctggtctcgaattcctgagctcaagccatctgcctgccttagcctcccaaagtgctaggattacaggcaggagccactgtacctggcccagttaggagccctatggaatattttgttgagtttagatcttattctgtaggagatggagaatcatcaaaggattttaaatgggaagtgactggctcatatcttcatttttgtcagattacgcagctgattggaagatagattcaagaggttacaagagtgggaatagtaaattcatttagaagactattgcagtagaccatgttagaattgacctcagctgggtcagtggtaaggccagagaaaggcagatatatttgtgagatatttaaaagtaatactgagaggatatgaggaatgatagtgagagaaatcaaagaaaatgtttgggtttccaactctgttaggatgatgtttgggtctttagctgttaggctcttgcagtgaaccatgaataaaataatgattgtgaaggagactgtattacagtatagttggagataagtaaaaatgggaatctcagccctgtgatctgacttcatggaaaccagaagaagccaaagaaacaagccttacagaaagaacaggaacaggtcttttggagttaaggggactctaactggtcttaatagtcatgacttaattctattctattaaaatgactcagctccaatcactagtttctggttgttttatttctttttccctactgactggcttatcctttccttcctatgtcaaattcctgagagacttaacagattggcctggctaattgctatgattcttagttgggcagagcttttcaatacagactatgttgtgaattggtggccttcaagtcaggtgctaacctgtgttgaatcagctgtaggaatggtggtaattataaaatacaaaataccctgctggtacaaggatagtctgggtctcacttctttcggtaggggcaatgtgtgaggcagtttctcctaggaagggttggcagttaaccataattgatctgaagcttgggagagaggtctaggtcgtgactgatttaggagtcacttgtaggtggtagttgaaactcagagtatttgaaagagagagggagaatagagtgagaaaaagcagtgggccaaagatggggaccctgaagaacaccaacattgaaagactagagggagcacaaaagaaatggtaggtccccagacatcaaggagattggtgtcacagaagctgagcacgggagggtgcagtggctcacacctgtaatcccaaaacttggggaagtcgaggtgggaggactgcttgaacccaggaagttgaggctgtagccagcggtgatcatgccactgcattttagcctgggcaacagaatgagacactgtctcaaacagcctccccaccttccctagaaatgaggaagtgatatttagtgtctgttgcaacagataggtttagtaggataggcacagatagttttccactacgtttggaaattagatcattgtgactttagggagagcagtttgaattgagtgatggggcaaaaaccagatttcagtgggttgaaagagtaaatgaaaggaccaagtagagaggatagtgaatagagattatccttgagaaatatagatgaaggaagagatgaggcatttcctagaggaggatggaggttaaggtaggattttttttttcttctaatttttaacggctgatagtggagttacgttttacctggtgtttagcttctaatgtcagcatagaagatgaaaatcctacataaccaaaattatccttaaaaattcctttggaaagtattgtgttagagaccactgtgtcatttcttagtcaatcttgttttaatttggttgtataggtaaaactgaagcgacataaattaaatgaaaatactatattatattagtccaaggtatggtgttccaggaaatgtatacaaaatttaacattttaacaaataaaattgattagcctacctggttattattactattttttcttgaacagagtctcgctttgtcaggccggatcccaggtttaagcaattctcctccctcagcctcccgaatagctgagattacacacacccgccaccatgcctggctaagttttatgtttttagtagagatgggatttcaccatgttggccaggctggtctcgaactcctgacctcaagtgatccacccaccttggcctcccaaagtgctgggattacaggcatgagccactgcgcccagccttgttattacttttaaggtaaaaaattatataccaccaactctggtacattactgacaatgatttatatgtagcacggaggcatagaatttgtgaaaagtgtacattttggggacattgtccctttacagattgaggggaaggagagattagagaggaagataatgaaatacaagcttgagaggctgacagagaggcttctagagaggaaactggttccagagtccagaatggttggtcttggagaggagagtacagactgttctttgataatagtggaagaggtgaagactgccgtggacatagatcactttgtaataaaagagtggagagttgaatatgaccatagctaatggcctctcgttttttgtttttttggttttttttttttgagatggagccttgctcttgtcgcccaggctggagtgcagtggtacaacgtcgggtcactgcaatctctgcctccagggttcaagccattcttccgcctcagcctcccaagtagctgggaatacagttgcgcaccaccatgcctggccactttttgtatttttagtggagatggggttttatgttggccaggctggtctcgaactccagacctcaggcaatccgcctgccttggcctcccaaagtgctgggattacaggtgtgagccaccgcacccagctggcctcctgttttcttgataagaggtgaggtactttgctcatgaatttgagtagaggatgtaaagtttaaagtaaatgatgaaaatgtggactaagccattgagagggatagggaataagctgacaacatttctaaaaatattgttggtagcattgagagtgctcagttgacatcattagttcatagcagtggctgttcataagattttggactttattcattggaagtcaactgtccagtgtgggagtatggaaggtagattatgatactgagagtgtcattttgctggttggatatgatagaatgatgggcatatgagggaaatcaaggatatttgagagctttaagtgattaccatgtagcctgtcctggaagaggaaaaagggagaaaaaacacaaagagtttgaggaattagagttcccatgatgttgaagtatagacgtgaaggctttagaaaggggatagaacaggatggtgtgttctggaggaagataccggtgtttctgcaataatgtcctgaatgcgtggctggaaaaccatgttttccacaaaatcaatgcgctaaaagtaacaggacttatgcaaactataaagctggagcaaccccttaaaaccttgggaactttgtaggcattaatcagaacactacaaaaattacagtcctagtaaaataaaagcccagttaaattttcactgtgcccgatattacaggtggcttggtctgttgcagctttagactctgggtcttgagcttttgcttcttcaagaaggaatgattgaagttagagtggaagttagcgggaataaagaggttcaggaattaaaacgcagggaaaaaataattaaacgtgagtgttaagtgtgtaaatgtgcaggagagatacatgttgctatgagggcttgtaaaaaggagcttcaaccaagttggagagattagagaaagaatatttgaggaagtaaagcttgagctaagatttaaagtgtgagtaggacctacctactcaggctaagaaggaaaggtggagggaatagcatgtttacagactggcctgatcaatgtgaagaattgaaatagtgctgatgcggctggagcagaaaggaggtggaaagtgcaggtggagagcaagaccagacaaggtgctcaggaagcgtgtctttttcctaggccaaagaggaggctttggaaggaatcttagttgtattgagggctactgatagaaggacggctgatttatatttccagaaaggcactggctggctgcatgttggcgactggaagggagtgggaatagggtagaatggtttattcaaactctttccatcagattgtttgaataaaaagagctaaacttgctagccttagaattaggaagtattacatatgttttcttctaaagccacatagaaaacacttaatactgaagactttgtagttttaaaagtttaaactttggtagtatgaggttgttttttggttaccacagaatttgaggtaataataaactttcaggtgatgagcattgttagaaataggccctttgctgctgatattacaagtttgagcatcccaaatctgaaattcaaaatgctttcagaattcaaaacttgattttttatttttttatttttgggacagagtctcactctattgctcaggctggagtgtagtggcgctgtcaggcccttgcaacttctgcctcccaagttcaagcgattcttgtgcctcagcctcctgagtagctgggattacaggcgcacactaccatgccaggctaatttttgtatttttagtacagacagggtttcaccatgttggccaagctggtcttgaactcctgacctcaagtgatcgcccgcctcagcctcccaaagtgctggaattacaggcatgagccaccacgcccggctcaaaggaaatgcccaatgaaacattttagattttggatttttggatttaggatgctcaactggtaagtatgcacaaatattgtaaaatctgaaaaaaatctaaaacacttctggtcccaagcatgtcagataagggatactcaacttggactggtctcatttaagaaataatatgaaaccttataatcttgcatttaaacttttccttataccttttacatctaatttaaattttaatttaaacatgaaacaaatctttttagttttaatatttacagaatttatctgcaattagtgaatcctaacaaatataatggatccttgaagatttataactggtactttatagtaatttttgcataatggaaaaatgtatgggattttaattcatgcatggatctaatatatgtttctaccaatttggggctgggtatataatgtgtaaacattttatttttttttctgtaggcccatgacagattacagatttcttcatttcaaaaagtgaggttaaataatacctatttcgtaaatgttgaaagagaaaaatccatacaaaagcacccaactctttgagagactgtttactttcaaatattggtttctttctcttttcccgtagaagtagtcagaataggacatggggatatgtgaagtgatccccgaatgttcattgtaactaaatccttcatgtgggttcagagctcacactagatcaggtttcttgaatttaaatcccagcacaaatcctggtttggaattcgcttttagcagtatgactttgggcgagtttcattatcttcccttggattcctcaactgtgaaatgataatagatagtacctacctcatggggttgttttggatattaaatgagttaataaacttaatgctcttagagcagtgcctttcacacggtattaaatatatgtaactattatttgttattaagaatactttgggattactttatcactaaaagtttgggtcactccccttaaaaaatcagtggatttagaactgcagttagattttgtttagatagttttctatagatttatttgtaacaatctaatttttaaatatgtagtttccatggccttttctcaggtaacttaattatttgaacatattttgactgaaaaatgtgttttactgccaccataattaaattttattaaaaagtgactagtgcacagacttgtgcaattgtttcttttctgctgcttagctcagtgtaaatctattacctgcatcatatgttgaagtagttttgatgcatgtaaatactgttgcttccatttttgtcttgcctagccaagcttgttgactccttatggtcaccaggctaaaagaacttctgcccataacccaagttttcatggtaatggaaggagtggcagaattcattccatttttttgtggggggagtggggggtgtgaacatgtactaatttgcattgcaagtgtaaacttaagtgtttaatagtaataaggcatgtgttggaaatttgataaatttggtcaagtgtgtggtaagggaggatatgatctcattcatgtgtgatgattgtatatcttaagatacaatttttgacttacaagaaggtatttagttttaaaacaatcataaatttaaggagaattctgctacccatgaagataattttatagtatgactgaaagattaatgcgaagtttgtattgcgtggagcatatttaactagaacaccccaataatgatttagagtattgtttctcatgcagtccttttggggatatggagacttgtctcactcatactctatgagtactttctgacatgctacttcaacttctttctttattcttccatggttttgtggacatattttctcttaatattgtctacatgctagctttcaaggtaatttgtgtcttgggcgagaggtaggggaagtgattgtgagtttagcaaaccctgtgggattagaattgaggaatagctggtttaaaaagtttgaaagccattatctaaaagattttctaaagtgtcagcagtggcatggtgttacttctgttgtttaaaaagaaaaaaatacgtttagaaattagatgtatttctcaataagctattattggcccaagagattttatgaatcagctttaattaataagactataccaaagaacaaaactgtaaattcttaagaaagctgttttgccaattcaatctaattgtgtaagatttcacttagaaatatacaatacagatgcttctggtttaaagagccaggactttggcaagagtgtacagaaattatataagttatatgcaaatttagacctgataaaattgagatctttctctcatgttcttcatacagcctttttcctcttaaaaatatagtgtactctataatgtcttttatttaatttgcataaaaggctgctaggttcaatttccatatttggattctgcaatcttaataaaactagtaatagtgtgaagagttctgtggttaacttgggctattttgcatattgggttcatggtgatgataaacgttttattgagtatttgaactgataggagcagaaataatacatcattccaaaaacctatatgttcctgaattgtttaaggttttcatctttcagtgaatatctcatgtgacttcttttttccttcctgtttctatgcaggtcatggcaaaaccccaaaagatgccgcgtcagttcgagccacgcatccaataccagcagcctgtgggatttattattttgaagtaaaaattgtcagtaagggaagagatgggtaagtaaattttggtgagaaaaatcgtttgctagtttttttgttttggttcataatgtttatgatgtaattggaaagttggaatcctggaaattttgctaattggaaaagtggaatctgaatatttcagtataacagattggatctggttatgcttaaatactagctgaagttaaagcttgagttggtgatattaactaagcttttctggtaggtttattattaaaatggagaatttggaattaaggaatgaagggatggtgactcattttccatgacttttcttacactgctttttcgtgaattctgctaagaagttaaatcctctcaaactagtaatcatagtcagttggtgattcataggtattttacagatgttggacttagaattttaggtttcagctgggaaatgtgtatttgtatgctctcaactagaggagattttcaaggtttaggatgtggtttagaaatttccaaatgagaattccatggtagggcctggaaccaaattttatatcattgcttttcagcttgggattggtgtgtggtttgtatgggtatcagaattcacttatgagactattaaaaatatagtaatttttgggccttaccccaaaagttcctaaattaggattttcagaagtagagctttgggcaagataggcattttgagaaagctccacactgaattttggtgcctatccctggttaagcactaattacctagaatcattggatctatcctatagtatttcctgataactttattgcatatcagaggtctcttaaagcagtcatagggtctttagttgagttaccaagacaaagcttattgagctgtgtggataagttgccctgtgaggtcagtcagatggacctcaaatcaaacccctcttagtggtcctcctgtgtttaattaaccaaataagtgtattcagtagattactcctttatcggctgaatattctcgatgtcaacagtatgagcaacagaaaataaaaacttggaattcagtgacagctttttatgtaactgcctcagttttcttagggtaatcaagccaaagagaaaatcagagatgccaaggatagagtggttgagagaggcccatattgaaataggcacacgattgtcaccatttctcactttacaagctgtataatcagtaagctgattctttttatacttcaaattatatgaacttgacctcatatttggctgcaaataccctgatgattctcaaatctaatgctacatcttagcttattccctcgagctccagacaatgtgtctaaccaaatgtttgcatttgaatgtcccacaggcatttaaatttagcttgtttaaaatctttttctgaaaaaaaaaaaaaaaaaaaaaaaacatttggttggtggtttcactattgctagaaacttgagaatttcctgcttttaacttttctgttcatctctactgcctctccctttgtcagatctcaattatttatctgctgaattactctcagatagttggttgatgggtctccagttgctgcctgttttgctcttattctagtctataactgttgtcagggttcttagtaataaaaaactgagttgcctctacccgttttttgagatatctgttgcttcaaggataaaatgtagagcttcttaacaggacccctcagatctgactagctcttgggtcatttttcagtctctttgtagccaggataccttaccctttttcttttgtttttaaaattaggtatattttacacatagtaaactttattctttttagtgtactgttctgtgagttttgacaaacatgtatagtcatataaccagcatcgcagttgatatgggagactccccttatctgtgggggatacattgcaagaccctttgtggatgcttgaaactgcagatagtactgaactctatatatactatgttttttttcagtctgataattgagagggctactcagtgactaaagggcatgtggtaaatacagcgttgatatgctagacaaaggaatgattcccaggtggggacagggcgggactgaatccaatggcatgagattttatcatgttattcagaatggcatgcagtttaaaacttacaaattgcttatttctggaattttccaattaatatttttggacctcagttgactgtgggtaactgaaacactgaggaaagcaaaaccacagataaatgcggactgctttatatagaacagctctatcatcccccaaaattctgccatactcttttgtagacaacccttccccatatctagctcctggtaactgttgactggttttctgtctctatagtttgtccatttcaagaatggcatataaatggaatcatatagtttgtagccttttaagtctggtatctttcacttagcataacacattcgagattcctccctgttgtatatattcatagaacagtccttttaaatctaattttgtagataagtgaaccaaagtttgcttacccactccccagttgaagaacttctcagtttccagttttttggctggaactgtaaacatgtatatacaggtttttgtgtaaacataagttttcttttcacgagtaagtatctaggagtgggattgctggattgtagttaagtgtatttttaactttgtaagaaactgccaaattgtttcacaaagtggctatactagtttgcattttgttctttttgtttgtttgtttttgtttttttcctgagccagagtctcgctctgtcacccaggctggagtacagtggtgcagtcttggctcactgcaacctctgcctcccgggttcaagcaattctcctgcctcagcctcccaagtagctgggattacaggcgcccaccaccacacctggctaatttttgtatttttagtagagacagggtttcacaatgttggccaggctggtctcgagcgcctgacctcaaatgatccgcctgcctcagcctcccaaagtgctgggattgcaggcatgtgccacaacacccggcctctagcttttacatatatacgtttttcatatatacatttttttctcctgagccagacagtaagttccttacagacatagttcttgtgtttcatgtgcttgttgagtgacagaaaccagccatgctgtggagggatatgatatctgctgccacccccggctaatcttttgtatttttagtagagtcggggtttcaccatgttgcccaggctggtgttgaactcctgagctcaggtgatctgtccgcctcggcctccaaaagttctgggattgcaggtgtgagccactgtgcctggcccactggtttgcatttctaccagcagtgtatgagagttcctgttgatcttagcactaggtattgtcatttttttttaaatttttagccattataataggtttctagtgatttcttgctgtggttttaatttatatttccctaatgactaattatgttgaagaatccctaattctcacctgctcttcacctataaggtaccatttggagttctctgactacgcatgctggcttatatttctagttccttatgcatgcccttccttcaccttctcttatccctttctctatttgcctagctaattaattggtcttcaagtcctagtttaggagtacctttcttatggcattttctccttaaagtaggaatatgccttttctatgcctcctttacattttggccagactgtaattatgatatttgtattgtttcaattgtctgcttactgccaacatgaccctacagatttaagagtaagggactattttaatttctataactccagtacttaacttatagctggcttttaaaggtatgaataaatgaatggattagaagaagtactatttcttgtatgttcttggagaaaactatttttttgtttgttttgttttgagacagagtcttgctctgttgcccaggctggagtgcagtggcacgatcttggctcactgtaacttccacctcctgggttcaagcaattctgcctgtctcagccttccaagtagctgggattacagacatgtaccaccacacctggctaatttttgtatttttggtagagatggggtttcaccctgttgcccaggctggtgtcaaactcctgacctcaggtgatccgcctgcctctgccacccaaagtgctgggattacaggtgtgagccactgtgccctgcctttttgttttttgtgtttttttttttttttttttttttttttgagacggagtttcgctcttgttgcccaggctggagtgcgatggtgtgatttcagctcactgtaacctctgcctcccaggttcaagtgattctcctgcctcagccttccgagtagctggattacaggcatgcgccaccacggccagcttattttgtgcttttagtgtgttttgccatgttggccaagctggtttcgaacccctgacctcaggtgatccacccgcctcggcctcccaaagtgctgggattataggtgtgagccaccgcgcctggccaaactattgtacttctttggtcacattcatttatctctctggtaaacgtgtcgaacaaagttctaggcccagcccattgtttttggaagcaaagaacaattcatttatgaaaaaaaagcaactcatattgctaattttggccaactaatgtttttctggagaaaagattatttcctaaaaatctcaacatctttgtaaagtatggaccagaaagagtagctgttaggaaccttttgtttgcagtgatgtgtgcccatctgagagtttattctgcttaatttaaaactgaattttcgctgggcacagtggctctagcctttagcactttgagaggctgatgccggtggatcatgaggtcaggagttcaagaccagccttggccaacatagtgaaaccccgtctctactaaaaatacaaaaaattagccaggcgtggtggcaggcacctgtaatcccagctacttggggggctggggcaggagaatcgcttgaacacaggaggcagaggttgcagtgagccgacatcacgccactgcactccgtcccaggtgactgtgcgagactcagtctcaaaaacaaacaaacatacaaacaaacaaaaaaaaaacactgagttttcttttaaacagtgtttatcccagatctcagtttttaaaataaattgtccttggcaacaaattttctcatgaaatggcaagagttggatgtgaattgcctctttcaatagggtagaaagaactggtgttaatgtattatgtgcttgtaaagacttttaattcctatggtgtacgttatttctaggtttaccctggaaaattaggaatatgactgtcatgattgttacttgtatttctttattgcctagaaaatgagacctgaagaaagttccttttattgagtgaaagaatatatttcattttctgccatgagttttcatttaaactgaacctaagttttgtatatgtgcagctaaataaatttattaggactaaatagtctttaaatattattaatttaaaaataaaatctaatgcatttcacaagaaaaattaaatcactttatctacatgactttttttttttttttttttgagacggagtctctgtcacccaggttggagttcagtggcacaatcttggctcactgcaacctctgtctcctgggttcaaggaattctcttgtcttagtctgtcctagtagctgggattacaggtatgccccaccgcacccagctaatttttgtattttcaggagagatggggtttcaccatgttggccaggccggtcttgaactcctgacctcaaaatgatccacccacctcggcctcccaaagtgttgggattacagacgtgagccaccatgcctggccctgcataacttctttagggcatatatttaacgggtgtgtgtttactttcccttctttttagtgatcattgaccgttgagatgaatttctttaaggagtctgtatcttaggtactttcagttcagggatttcattcaaattttaaattatgcatattaatagaggcagtggacatactgttaattctaaatgtgagagagaacaaaatttttatttgaaagtttttagaattataatttattatgaatggtatttttagctcttcaaacaaaatattgatgccactctttgacagtgtttcagtaagaactggcaagtaattcagtctctctgttctgttcctaaattcttctgctgataataaagtgcactctttcagaatgttccttttatgcttgctgactttctagtttatttcttggcgggggaggagaacaaaggtctttcttcctgtctagctttgaaaactagaaggatctttccttctaggtttgattcgttgtaagcagcaaatggaagcacagggtaaatgtgaacaaagagtaaacaatacatttattataagtaagcaatatatttatttaacaaatatatgttgaacacctatgatatagcacatcgtcagcagctgagtggggataagaaattattttattgatttgtcttattcatagttcttactagaggacctgacatttagtagaaactcaattaatacagtgagtgaactgaatgtggtccctgcccttgaggaagatcaaatttagtgtagtcatatgtcacttaactacggaacatgttctaagacatgagtcattgggcgatgtttttttatgaacatcgtaaagggtacttatgtaaacctagatggtatagcctactacatacctgggctgtacctactacatacctggtctgtccaacagaggactacatacatagtcctttgttgaccaaactgttggtatatggtgtttggaagatatggtgggacaaggcaggaagcagaaatatgcaactcttaagacataatatactaagtacttagaaatgagaccatgtatgggaaaactgaggagagagtaattaattttggctcaaggaaatatttatacaggaagtagtagttggtagaccttacaaaatgagtaagaatttgagaggcctttttggggaagaacattccagactatggtaaatggccagaatagtctcacaggaagagtgcaactttgtggtctttggcagagatacatggttcagtattgttggggacttggattataaggaagagttataaaagtaagaacaggctgagtgtggtggctcatgcctgtaatcccaacacttagagagcccgaagcgggtggatcacctgagataaagagttcgagactagcctgaccaacatatagtgaaaccccatctctactaaaaagtacaaaaattagctgggtgtggtggcacatgcctgtagtcacatctacttggggagccaaggcagaagaatcgcttgaacccaggatacaaaggttgcagtgagccgagatcacaccactgcactccagcctagcgacagagtgagacttcatctctcaaaaaaaaaaaaaaggaaaaaaagtgagaatggaatcagatgttatagagccttgatgatagttctagggtgaaatatactctataggtagaagggagctttcagttttttgttttgttttgtttttgtttgcagcagagtcttgctctgtcacccaggctgtagtacagtggcacaatcaaggctctctgtagccttgacctcccttacttaagtgatcctcctgcttcagcttagcctcccaggtagctgggactatgggtgtgcgtcaccatgcccagcattttttttttttttttttttttgtggagatgggtctcggtatgttgcacaggctggtcttgaactcctggcctcaagctatcctcctgcctccctaagtgttgggattacaggcatgagtcactgcacccagactgccttcaatctttttgagtagggaagatatatgatacctgctttagaaagataatacaaagtggggagaggatgaagtgtgtgatggcggtctgcaagactgctacagagtttacgggctagggctaggagttaggttgtgaggcggttgcctgaggatagagtgtgatagagatttaaaaaaaaaaataacaggaggaaaataacagacgaggagatttagtttgtcgagtacctgttatgtgccagatactgtgctaagaacctaggattgacagagatggagacagggctgtaaacatggctgagaaagggtacctactttccagaagtttgcaggtaagaagggaaatgaacatgtaagtaactaataaaatccagtatgagatacacagtagtagacatataaacaaattagagaagtatgttggaggaggtaaccaacactgttggaagacagggtggtgatcagggaagtctatctaggaagcttacataaaattacagaagaggaatacagttaaacataagcttctctgtccttcagttgctcaggtatccttcacaagataggatatgaacagagatgttaaagattagtagctgttttagaagctgactagttacttttgttgagaaatatagtggagatgtaaatcttggctctgctacttaactggttctgtggttttgtattttttgacagactctctcagtctgtgaaaaggaaataatagtgccaacctcataagactaaattacataactcacttaaagcacttattagagtacctggtgtgaagcaaactcaaggtagcttgatgctgctctgaaaaaagatgcctggtgcacagcaaactcgtgtcttcttgctgctgctgttgctgctggctgctgccactgctgctgctggaggaagctcagcataaagttttgtgggaggaatgtgtctggagatgatcatgaagggacttctaatgctaatgggtgttaccttttatctttcaggtgctagttttaagcaagggaattatatggttggatttgctttttaggtgggttatctgagggtaatatggaaaatagatctgagactgacttctagagatcagttgggttattgtaataataaattgagggtttaatctgtgtggtggggttgtagaggaaagtagacagatttgttaactaattaggacttaattttttacatgaaatctgtctttatttccttgattaggaagtaggagtagtaagcacgtaaaggtagttgttgagagaatgttaagaatgactccctagcttttgtcttagaagattaaatggatagtgatgtgactaaatacatcagaaaataccagaagaggatttttttttttttaagagatagggcctcactttgttgcccaggctggagtgcagttgtgtgatcatagctcactgcagcctcaaattcctgggctcaagggatcctcctgcctcagcctcccaaagtactgggattacagttgtgagccatcacacctggccaggaagtggatctttaaagaagatgatgatgagaacagtgtttgagctgctaggggaatcccagaaaattaatagcaaaggctttgactaaaaataaatgggatttaggagagtagggctgaaggtagattttggagtggtcagaaggttaagttgttaaagccatgggaattgataggatcacccaagtatgtaatgtaacaaaaacaaagagggcctagggtggacacctgaaacaccatatttaaaggacatatagaaggagggaattcgtctgagattcttttcatgtacttatgaattttttaaaacaatttcttcttgttacataatcatctaagattctataaaagaatggtcagagaattagaaggcagatcctaggtgttttcagaagccaaggaagtcagttcaaaggaggactgctaagtctccactggtttgtcatttggggggttaattagtccttgtgatagcagtttccttaaaattggggtgatagcaggtgcagtgtgtcaaagagaggtaaggaatggagataatgtgccagtggacttagtagctgtgttgctgttgtgagaaacaataattcacaacccatttagaaaagtaatacactgccaatttgataattcaaggccaggcgtggtggctcatgcctgtaatcccagcacttttggcagctgaggtgggaggattgcctgagcccagtagttcgagaccagcttgggcaacaaagcgagaccctgtttattaggctgggcatggtggctcatgcctgtaatcccggcactttgggaggctgaggtgggtggatcacctgaggtcaggagttcgagaccagcctggccaacatggtaaaaccctgtctctacccaaaatacaaaaaaatagctgggcgtggtggcgcattcctgtacccagttacttgggaggctgaggcaggagaatcccttgaacctgggaggcagaggctgtagtgagccaagatcgcgccgctgcactccagcttgggcaacagagccagactccatctcaaaaaataaataaataaataaaaataataaaattagccgggtgtagtggcatgcacctgtggtcccagctatatgagaggctgagccaggaagatcgcttgagcccaggaggtcaaggctgcagtgaactgtgtttctgtcactacactccagcctaggctacagagtgagactctatttcggggggcgggggggggggggggaagaaattttggaaattcaggaaagaaaaaaaagtacagaaaaaatgtaagggagaaaactaaaccatgatttttgtataattaattgctatcaatacttctgctcgtttctttcggattttatatatacacttatattttaagcttagttatactcttttttttttttttgagacagagtctcgctctgttgccaggctggagtgcagtggtgcaatttcggcttactgcaatctctgcttcccaggttcaagcaattctcccacctcagcctccctcccattagctgggactacaggcgcacaccaccacgcccagctactttttgtattttcagtagagacagggtttcaccatgttggccaggatggtctcgatctcttgacctcgtgatcctcccacctaggcctcccaaagtgttgggattacaggtgtgagccaccgcgcccggcctggtatcctctttatacaggtttttacatcctgtgtttatcattgatttatttagtatttttggggagacagggtatttctctgttgcccaggctgtagtgcagtggcgcattcatagctcactgtaaccatagctcactgtaaactgttgggttcaagtgatcctcctgcctcagccactcgagtagctaggactacagagatgtatcctatgcctggcttatttttgaatttttttgtagaggattattattgatttatttctatgtagcagttatagtatgtttcttacataattataagcattcttctatgagattaaaagctctgaatatctttttatttttggctgtggcatagtctaagtttattaaggcacatccatagctgttctcctgttgccagttatttagattgttttaattctttcactattctaaatactcttttttgcatgaaatttgtctttatttccgtaggaaagatttcttgaagtggaattatggatcacaagaaggggtatgcacatttttaaggcttatgatgcacatggccaaattactctccggaaaaattattgcaatttatgtttgggtgggagagaccttgttgtatgtatatgctgaggagaaggaatcactagtgagtccaggagaaggctgaggaggcgaatgaggcaagtttctttgcccagtaggtgggatatggggttttaagtataaattaggaaggtgggatgctgtgcggaatttatttattggcacttatcactacttctggaagcctgtcttgacagccttttcacctccaaacaagatgaggctcctctgttaacaccctttcacagcatcttgtacttccccttcatagcatttaatcaccttcataattatttatttaagatctgtcctacccgttagagtatccctttagggagggcacagacttttgtctttgccacagctttatctgtgtcatcctacacatagatatttagtaaatgttcattgatcagagaagtgaaggtattgaggaactgtgagatttaaaaccacaaatttgtgacagcggtttacatacttacaattttttactatatacccagctggttagagaggaaagttgaattgtatgattgatgcaaaatgggaaactataggttaggtaagttggaagaacaattgtagtaattgaggttacgggtgagggaatatctaaatggaccattttagttcaggctgggtagggaaaaaatgaaatcagcacggagctgatatactcagacaaaatgagagatttatatattgctgtttttagtgagttttaaggagatgcagagggatttctgaggtggatttgctgcatttggctaagtgtagggcataacaatgaaagacaagagaagaaaatctttatcagagaggcttttttggtctgttttgtttactgctatatccatgttgtgtagaacaatgccagacacaaaataggtgctgcataaatatgttaactaagtagaggtgggtagggataataacatcttttcttttgtaatcccctagcacttgctgtgcatagtacagagtatagatagtcaatatttatggaatgaacagaatgtgagtcttggattttggatatgttctaaaaaccattaagaatggtaggagccacatttttggtggagagaaaaattggttatttaagaaggtatgaaatatgggaaaagtgacctaaagatatataaccatcatgtttctcaaattattcttgaagtggttatctttagtgcagtttaaatcccaaatcacccttacctcttactctgtcagttattttatacttaacaagtataggtgttttttttttcccaagaaatttttttttccaattacaaggtaatgcattcttaatgcaaaagggaaaatcaaataaacaaatcctgtgaaatagaaaaaaaataacatatttttaaaagcatatacaatcctaccacctggattaatggcagttgacattttggagtatattctctccagctttttttctctattaaaactgctttcaacattagtctaagaaagaaaaataggtttaagatgtatttgagtcacatgagagattaaaaaaaattattctcatgggtaccagttcttatactttcactttaatataaatttaattgaaaattcaggaagaaaatttcattttaatgtcttaaagacacccatgtcatataactttaagattgtatatagttttgtcctgatgaatatattacttgaaatcatatttcagtttttcagaaccaggaaaacagtttataaccattctatttatgtttatctcagatatattgaattcttgctctttgcctattgctggaatcacttaggttgattaacattccaagataaggagaaatgatctgttggtcctagacctttttggctttgtggatgatttagtagtatggatagttttttggaggagtggttgaaatgttttaaaatggttgatgagaagtaattgttgtcagatggaaaaacagactggttaagagttgagattcatcccagtgattctttgtgatttgtatagtacagaatctaaggagttttcctccccaacatttacaaacatacagaagacagagttaatacagtgaatacccttgtacacaccacctagattttagaattaagattttgctatatttactttattatagatctgtacatccacaccccatctttttaaaatgcatttcaaagtgagttcatgagttgcagagtttccaaatcagttttaaagtctctcattttatacttcttttttcttattctgagaatctttgattctagtgatatttacatatttatttgctttagcctagaatatcttgatacattgccaaattaaaatatcagtaatttgggaggcagaggtaggtgggtcacctgaggtcaggagttttgagaccagcctggccaacatggcgaaaccctgtctctactagtaacaaaaattagctgggcctggtggtgggcgcctgtaatcccagtgactcgggaggctgaggctggagaatcgcttgaacccaggaggcggaggttgcatggagccaagatcgtgccattgcactgcaggctgggcaacaagagcaaaactccatcaattaaaaaaaaaaattatgtattaagaacattgaatactgtatgtttttttgcagtcttttttttttttttttttaattttgcttcagtctttagaatatatcccattagggatggatattcaaaatactgtgttttaaagtcacttgaagtaattcttttttctgtatttctgccaccaacttgatatatactagtttcacttacttaaaattatcttccattcttagggactgatttttaaatttttgttttaattatataaaacatttacattgtttcaaagtaagactgttgaagaaggcacttggcccaggtgcggtggctcacgcctgtaatcccagcactttaagaggccgaggtgggaggaacacctgaggtcaggagttcgagaccagcctggccaatgtggcgaaaccccatctctactaaaaatacaaaaattaaccaggtgtggtggcacgtgcctgtaatcccagctactactcaggaggctgaggcaggagaatcgcttgagcctgggaggtggaggttgcagtgagccaagattgcttcactgcactctggcctgggtgacagcacgactctctctcaaaaaaaaaaggaaagaaggcacttcacagaaggttcacgtcatcctttttttcttcccccttcaggtaaccattttcattagttcttgatttattcttttgttatttccttttgaaaatggaagcaaatatgccatcgaaaactttgaagaggtatcacaaatagctgatgacactagttggctgtaagtagaggaagtggttaaatggggatgggagtgaaaggaaacttgaaacatttttgttgcttttgaatttttttattttatctattttgtttgctcttttttttttgagaggtttagtatatttttacattgagagaggtacatttatactaatacctatagtcccctccttttaaggtactcttgtattgtgagcaataatgaaattagctagtaacctcttcagcaccttttcttccctttccccagtgtctgtgggttttttgcacttaaaatgtattattgattaatgtgcagtaaaatacatttttttcagtgtatagttgtgagttttgacaaatagaattacataacaaccacaactaaaattacataacaaccacgccaaactctctcttgttgcccctttatctcaaaccctcctcccacccccaactcctcacaaccactgatctgtcttctgtccctatagttttgccttttgaagccagaatgttatataaatgtaaccttttgaaaatggctattttgtaatcacttagcatgatgcatgtgatactcatccaggtagttgagtgtatcagtaggtcattgctttttctgtaaattctcttttttgttaattgttttatatctatattttatgagcatataacatttgcatacactatactgttatctttattctgatcacttagtgttaattttaaattatattcaatactcatcatcagaccttatcccaaagatacttcgaggattttttggttatctgaagctcacattctacaagtgagctcatgggaacaatattcttttaagtccttttggttcaaactatttgcttgtgaccattatactcattatatttgaagctttgattgtatgtaaaatccctggctcatgttttctttctttcttttttttttttttccgagacagactctcacttagttgcccaggttggagggctgtggcacaatcatggctcactgcagcctcaacctcctggggccaagcgatcctcccgcctcagcctcctgagtagctgggagtacaggtgcgcaccactatgctcagctaactttattttttatttttatttttatttttgttgggacagggtcccattgtgttgctcaggcttgtcttgaactcctgggctcaagtgatgatcttcccacctcagcttcccaaagtgctgggattacacgcatgaaccactgtacccagccatgtttttttatgagctccatggacattttcaaagtcttcagacatttttttcttacaagaaatttggtcatttgcctgttacctgaaagatttttctttttctttaaagaaccattacttgactatgtcttggtgttgatcttggtatggtcttaagagtaggttcaagtgttttatttcagaaaagttttttcgtatgatggttttcagtatttgttctgttccattacatgggtttgttttttagggactctaattatgaatgtatgttgggtcttctttgactaacttcttctattattttgtttttttgaagagttttttggtaaaaactggaaaacctgccagagaaattctaaaggatctgtaacacttgactaacttcgttattttaaaaatttcctccattctctttcctcttttcttgtggggtcttttactttgtgttccaattagcttgtctttatttctgaaataattttcctttttttccttgtaattcttaagtaaataagaacactattttttgaccgatttatattaaaaattggagacttcctgtgaacaagtcttgaacatccagtgtaatttttaagttatagcacttgtgaagagaaatattattgaaaaacaaaacagtaaaacgcatctcagtctccatagttttataggtacatctcatttggtacaagtagaacctgtaatgtttatagaattgaaatgtaaatcagtttcttctgaacttatttgtgtgatttaaagttgctactttttatttattaatcttatagggatatgttgaaaaacaagattttaaatatggattaaaatataaataattttattaaccaaaaatgtcagtttattggaaacataaacaattttgtgtctgttgggtgaaaagtagaatatgttgttttatgcatatgatagattattttccttaacatttaacagtttaacaagttattttgtgttttgttgttgttgtagtagttaactacagatggaattattcgacaaagaatcgtcagaggaactctcaaactaataggcttttcttgtttttagagccttattgtcttaattattaaaaggcaggataaatgaataggtactttgaaggccatcttagtaaatatagccaggccttaattttaggtattgtatatttatatttttatagctcttcgagaggtaatgggagaaagatgcagctgaagaaagatgcagcttggtgtatattattgtgaactttccgaaggcaagaaagaatttctgtttttcatgattctttatgctttgggaagaatgtggtagagaaggtgcagtgtagagagagataagtagctgctttactgtcagcatagaattagaattggaacaaattttttttttaatcacagcagaatgttctaggtttgaaaaaaggatttctgttttctgttactttagttttaagtttcttacctcagttccattggtgcagataatcatctggtgattaatatttcactttgcaatattttgagcatgcatatacttaaatttattttgtatattaatagtggctattctaagaatgtaggtgttggatacggtgtggtaaagtctgggtagctgcagggggatatgagaataaggcttagaaggaagaattttattatactcacaggtctcagggagggtcactgcatgctacacaggggaagcaccaggttttagtcaggaagcagaagacaggagccacggaaaagtccaggccagagtattgggatttcctgggaaaggcaagggagggcagagtaaacagttgaggattgaagagtttggatgattcctccaggctttgagctgtagaggtggtctctaattgcctggtacctgactctggaatgatttagggcaggaaatactggcttcgtatgtgagcgttagataaggaggtggatttggctgtagactcaggattggttggtttgtatatggaagacatgctcctgtgagccctcttatctctaagaaagcactagccctggccagcaagcttttaaaaagccaaaacataataaaatatagtaaataagaaacatgttttaaatgcagtggccagctgaagttctgtttaccttgtcaaataatttctgtgttaataatctttgagaaccatagctttctcaacaattgctttccttttggttctttattattttttataagttctcatttcttttagatagtgattgccttttctaaacactgaaatacgtctcaagtatgtaacctgattgaaatattttcacaggagcatctgtaattgttttttgtttgttttttgagataagatctcactctgttgcccaggctggagtacagtgacgtgatcactgttcactgcagccttgaactcctggacttagtgatcctcccacctcagcttcttgagtagctggcactgcaggcacataccactatgcctggctaattttttatattttatgtagagacggggttttgccttgttgcccagaccagtttcaaactgttgggttcaagtgatccacccacctcagcctcctaaagtgctgggattataggcttgagccaccacacctggcctgcagttgttgctggaatgtttttggtttgattttataacactactatgtgaatcaccagttggtatatatcacttttaatattatttcacttatgatggttgaaagatgttaaagtttgttcttttacatgagaaaaaaatgggtatatgttcataagcttaaatgtttaagattggtaacttgtgaattatagacaagtgccctgagtttcttaatataaatagatatacgtatactagtgtatcttgctgtagtaactaacttttggtgctcttaagtcttattatattcataatgccatttggcagaaataaaacattttatttcaaaggtattaagtaatttttaggtcttgtaagataaaaaaaagatccctcttactgtgtcagtaacttatatacatgaataaactattcagaattcgaaattttaaaatttgagtcttcctgtccatgaacataggctatttttctatttatttagcttttctttgagtatttcagcagttttatagtttttatggtatcaattttgtcaatatttgttagatttatgcctaattatttcctttttgttggtgctaatataagtggtattgtgtgtttaaaattccagttcattgctggtgcgtaggaaattgacttctgcatattaaccttgtatcctgccaccttgctatgattgcttattttttccaagaggtttttttctgtcaattctttgatgttgtctgcataaacaatcttttcagctacaaaagtaggtttattttttctttctcaatctatataccttttatttccttttcttgtctcattgcattagctaggacttcccctatgatgttgaataagagccgtaaaaggaaatacctctgcctttttcctggtcttaaagagaaagtgtctagttttagccattaagtatgatactaattgtaggttttttgtagatgttctttattaagttgaggaagctccccctctattcctagtttactgagagtttttatcaagaatggtgttggattttgtcagatgcgttttctgcatctattggtctgatcacgtgatttttcttctttagtttcttgatgtgattgattacattgttttttttgaatgttgagccagccttgcatacctgggataaatcccacttagtcttggtgtatagttctttttttaaaattttaatttaatttatttattttaatatccagacttcaaggaggtatagttcttgtataccttgttggatttgatttgctaatactttattgaggatatttgcatctgtgttcataagagatatttgtctgcagttttcccttcttgtaatgtctttatttggttttggcattagggtaatgctagactcagaatgacttagaaagtgtaccctctgagtgtattttctggaaaagattggagacagttgtgttatttcttccttacatgtttggttggaattaccctgaagccatctgggcccagtgtttgttttttttggaaggttattaattgttactattatttttttctgagtatatgtttttatttagcttttacaaacaataaccacaataaaaaaaaataatgaatgcagataacttttgaacacaatatatcgtacacccttattggatatattctgaggacaaacattatgcaacaaatattcttgaattttatttaatagatttattatgggtgtgctttctactcttgggtatcattgcttctaggctctttcaatggatggagtttattttgacactacaattcgatctagttaccagagttcttcctcttctttctcatttctgtaaaggttattaattattgatttaattttttaatctatagaggcatattcagattttcattttctccttgtgtgttttgataaattatatctttcagggaattgccttgaaatccatttcatctaaataatcaaatttgtgggcataaagttagttataaatgtttctttaatacttttttaatgtctgggatcagtattgatattattactgataataatagtttcttatgtctttgattttggtattaataatttgtgttttttttttgttggttatcctggctagaggtttatcaattttactgatcttttcaaagaactggcttttaattttgttgatttttattttattttattttattttttaaaatttcattgctatctctatttctcatttcttcttctttctctaggtttgtatttattgctccagtttcctaaggcggaaagttaaatcattgatttttagatcaccattacattcagtgctataaatttctctgtaggcactgctttcactgcatcccacaaattttgataagttgttttcatttagttgaaaatagttttaaatttctctttagacttctttgatgtgttattttaaaatgtgttgtttaatctccagatatttggggattttccagctatctttcttttgttgatttctagtttaattctattaaagtctgagagcatagtttgtatgactttagttaaggcatgtctttcttatgtcccagaatgtgttctgttttggtgaatgtttttgtgagcttaagaagaatatgtattatgcggttattggataaagtatactataaatgtcaatgaaatccagttgatggatgatacttttcagtttgactatatgtttactggttttctgcctgctgtgtctgccagttgttgatataggggtgttgatgtcttcagttatagctgtggagttaactgctgcttctcgtagctctatcagtttttgtctcacatcttttgacactttgttgttaggctcagacacattaagtgtggctgactgccacagttactacttgagactgtcactgagacagttattactgttactacttgagaccatcattatgagactgaatcaagggggacagacatagaaatgaaaacttaagacaaaggtaactactttaaagtaagggtaacatggggaaggagaagagaagaagaaaagggctccctgcttttagtgagcaaaggcagctgcctaagactctacagcccttaatatgtattgggtagaaagagcagcaggaggaggtaatgattggtcagctgctggattgatcacaggttcacattattgctaacaggtttcagttatgcctaatcagaagaaacacttgtgcctgggtggtggctgccctcagcattccttctgggcaacagacacagtttgtcagtttgccgacatcctgcttttatgagaaacagtttgctgtttgcacatatagcctccagtactatactgagttgatcacgacccttgacaattaaggattgttatatcttgtttgataattgatccttgatcattatgtactattcctgtttttctccgataattttccttgttctgaattctgctttgttagaaattaatataactagtccagctgccttttgatcagtgttggcattgtatgtatttctccatccctttaacctatctgtgtctttatatttagagtgagtttcttgtagacaacatatatttgggtctttttgttcactcttgtcagttctgtcttttaattggtatatttagatgattcacattgaaagtattgttaaagttgggttttagtgtctaccatatttgtttcttactcattatacttgttccttgttgcttattttaaaatgtactttttttttttttttgagacaaggtctccctctgtcacccaggctggagtgcagtggcgggatctcagctcactgcagccttgacttcctggactcaagtgattctcccacttcaggttcccaagtggctagaactacaagggcacaccaccacacctggctaattttttgtattctttatagagatgggattttgccatgtaggccaggctggtcttgaactcctgggctcaagtgatcctcctgcctcggccttctgaagggattacaggcatgagctacgtgcctagcccattgtctgattttaattgagcattgtatattattccatttttcttttctgtataaaatactaattgtacttctttaaaaaagattttttggtagtttcccttagagctcatctaagttcatttttaaataccatttacactgcttcacacatagtgcaggtaccttataacagaatataaccaactcctccctcctgtcccttatagcattgctgttattcatttcacttatccatagtcagcagttacccaagatattgttactattttgaatacttatctatgtgatcaattaagattaagaaaaataaaagagtgtatcttcatttattccttcttggactctccctttcttcataaggattctattttctcacctatatcattttccttttctctgaagaacgtgtaacatttcttgcaaggcaagtttgtgggccacaagttccctctatttttgtttgtctgagaaagtctttatttttctttcacttctgagggataatttctctggatgctaaatcctagcttggtggggttttttcccaacacttaaatatttcactccactctcttcttgcttacatgatttctgaagagaaatctgatataattcttgcccttcttttatatagagtgagtgttttgttttgttttttcctgatttctttcaagacctactctttgtctttgacctaggtttgaagatgaggtgttgatgttttgatgtttatcctgtttagtgttttctgagctttctggatttggggtttgggggatctgtcattaattttggaaaatcatcaaccatcattacttcaaatacttcattttctttgtttcttctccttctagcattactattatgaatatttttcaccttttatagttgtcctccattctcaaataccatgttccagttttttttcaagctcactgattgttgttttttttagtctgctgattgctcgtcaaaggcattctttatttgtgttaatgctttttatttctagcattttgttttgattctttcttatagcccttagcattttaatgagttatttaaaatgtccagtttgatcattcaaaatctaccttatctgagtttggtttcgatgcttgctttgtctcttcagaccttttccttgcctgttacatgccttgcaattttttgttgaaatctggacatggcttattgagtagtagaaactcaggtaaacaggtgtttaatgtgagattttaggtttatctggctgggagttaggctgtgtttaatgttcactaggtatttatattgtttgtaggtataagacatttcattttcctctactttcctggtttttgtcttgttttgagtttccttagaaacttttattaattaaaaaaagtctatttcttgtaattttctcagttgtaatctgttatattggagccctgtttagtagagaggagaagtgttctataatcatatgatgaaatctgttgggttttttagtggaccagagttcctgaacggaccttcaaaagaatttcttaagcttttttcttccctcctctcaggcaggttagagggggctggaattattgctcttactctaggtcagatttcaaaatggttacttttcccttttccctactcaaaatggagggattttactctaataaaaaccaggtggagctccttttctcacctatattcttccttaagactgagccctcacaagttaaagctcaagttagttcactctcagtctccagcagtttgctacttacttttaaagtgttccttccagttattggctttagagtaaatatagctccatatgtctatattcacatgtttcttcagtttttctggaggtgttgtgacctgtgaactcagttttccagtgcttctaagagtagttgattttcagttgttctgctttttttcttgtgaggatgggagtgatgatttccaagctgtttacgtaatagagtggaacaaagttgtcatctttatttttttaatgagagttgtattgagatgtataattcatgtacatattcaccctttaaaaatgcacaatttggtaatttttactatattcacagagttatgcaacccttactatttaatttttaaacatttttgtcacctgaaaaaggaaccccaaaacactcactcctcccagttccaggcagcaactaactattttgtttttatggatttacttattctggacatttcatataaatggaattatacaaaatgtgacctctcgtttctgacttctttatcttaacatgttttaaaggttaatgttttaaaggttgatttatgctgtatcatatatcaatactccattcctttttgttgccaaattaatattccattgtattaatatatcacattttgtttatccattggttggtggaaacactttttgactgttaagaatattgctgttatgaagaattgtgtaacatagtatggctatgtgttttcatttttattgcagaaaatgggagtgtaatttctgggtcatagataccctatgattaactttttgaggagctgccagacggttttccaaagtggctgtaccattttacttactaccagctatgatagttgcagtttctccacattcttgtcaacacatatcttcttgattctagccatcctagtgtatgtaaaatgagagctcatagtgtcttttgatttgcatctctaattactaatgattaacatagttttacttgcttattggacatttatacatctttgaagaaatgtctattcagatcctttgcccattgttttagtagggttttccttttattgagctgtaagagttctttatatatactgtaaaaagttaccctatcagatatatgatttgcatatattgtctgccattctgtgaattgtcttttagtttccttgacagtatcctttaaatcacaaaaattttaaattttatggagtctagtttgtctacttttttttttttttttttttctaagatggaattttgctctgtctcccaggctggagtgcagtggtatgatcttggctaactgcaagctccacctcccgggttcacaccattctcctgcctcagcctcccaagtagctgggactacaggcgcccaccaccacgcccgtctaattttgtttttgtatttttggtagagacggggtttcaccgtgttagccaggatggtctcgatctcctgacctcgtgatctgcctgcctcagcctcccaaagtgctgggattacaggcatgagccaccacacctggcctagtttgtctattttttcttgtgtttcttctgcttctgatgtcatatctaagagaccattgtcttaagccactatcagaaagacttacatctgtgttttcatctaagagtttcatagttttagctcttcagttagctctctaatccattttgtgttaatttttatatatggtgtgagatagggatccagctacattctttttgaaaatatttttttatttttgagacagaatcttaatctgtcacccaggccagagtgcagtggcacaatctgagttcactgcaacctccgcctcccaggctcaagcaattctaatgcctcagcctcccgagaagctgggactacaggcatgtgccactgcacctggctaatttttgtatttttagtacagatgggcttttgctatgtcggctaggctggtcttgaactcctgacttgaagtgatccacccaccaccttggcctttcaaagcgcggggattatagacttgagccactgtgcccgacctcagctgcattcatttgcatttgtatgttttcccagtaccatttgttgaaaaaaaaaaaaccagttctttccccactggattgttttttcctgcttgtcaaaaatcaattcatctaccagatgctgtggctcacacctgtaatcccaacactttgggaggccaaggtggacagtattgcttgagcccaggagtttgagactagcctgggcaacatggagaaaccctgtctgtacaaaaaatgcgaaaaaaagttagccaggcatggtggcatgcaactgtagtcccagctactcgggggctgaggtgtgaggatcacctaatcgggagaaaaaaggctgcagtaagctgtggtcatgccactgcactgcagcctggttaaagtgagaccttacttgtcgcaaaacaacaacaataacaaaattaattgatcgtgaatacaagagtttctgaaatctcaattctatggcattgatctctatgtctgtttttaagccagcaacacattctcttggttactgtagctttttattgagttttaaaattggaatgtgtgagtcttccaacttttttgttctttttcaagattattttggctctactgggcccttgcatttgtgtatgatttcaggatcagtttgtcaatttctgcagcaaagcaagttaggattttgatagggtttgtgttgaatctctagattaatttggggagtattgctattttaacagcatttagtcttcaaatccatgaatatggcatggggagtctttccatttacttagcagttctttcattttttcaacaatgtcgtttttagtgttcagatttcacacttcttttgttatatttattcctaagtattctttttttttattctgttccaaatgaaagtattttcttaaattcattttcaaattatttctagtgtgtagaaatacaactgatttttgcatattaatcttgtatcttgtagtcttgttgaacttgattacttttaataattttgggggaggagattctttaggattttctatatacaaaattgtgccatctgtcaatagaggatgcttatttcttgctttctgatctgatggcttttatgtctttttcttgccctcttgcccagggtagaagtttcagtactatgttgaatagaagtggtgagagaagacatccttttttttgtccctaatcttaaggtcaaagtattcagtcttttaccactaagtatgctgttagctggggatttttcatagatgttctttatcagtgtgaggaagtttccttctgtttcaagcttgctgagtcatgatttttcatgattttttttaaatcgtgaaagggtgatgagttttgtgaaattctttttctatgcctgttgagatgattatatggattttgttctttattttcttaatatattacattgattgatttttgtttgttaaacgaacttcatgtttttgggatataaatcccatttggtcatgatttataatcttttttatgtgttgctggatttgatttcctagtaatttgttgaggatttttgcatttgtattaatgaaggatattttttctgtagtttttttgtgatgcctttatctagttttggtaacaagatagtactggctttgtagaatgagttaggaagtatttctagcttttttggaagagtctgggaaagattaatgttaatttttatgtttggtagatttccccagtgaagccatctgagcacgggcttgtctttgtgttttaaaattactatgcagtttcagtagtttgtgtctttctaggaatttgtccatttaaaggaggttatgtaattcattgttcatagtatttaataattgttttcttatgatcctttttagtttagtagtaatactcttgtaattcctgatgtttagtaatttgagtcttcttttatttttcttgcttagtagaacctacttttgaatttgttgattctattgtttttctagtctctcctcttatttctcccctaatctttataattccttttctgctacctgctttgggtttagttcattcttaatggtagaaattggattactaattagagatctttcttttttatttaattttaatttttgacaacagtaacaaaaaatgtgttgcgtaagaatggggatacgttctgaagaatgtgtggttaggtgattttgtcattgtaggaatatcatagaatgtacttacacaaacctaaatggtatagaccataccacatggcttattaaacacctaggccatgttgtgtggtctattgctctgctcctaggctacaaaactgaatagcttgttattgtgttacaatagggaattgtaacacaatggttttgtgtatctaaatacatcacataggaaagatacagtaaaaatgtgtggtataaaagatttaaaatggcacacttgtatagaacagctccattataatcttataggactattgttgtacatgcggtctgttgttgaccgaaacatttgttatgtggaacatcactgtaaataggtttttaaaagtgtttcttgcattgccagcatgtgatacatatactaacttaatcaagaatgtaatagatcaaagatgcattaaaatcttaataaggtagtcattaatatactgccaaaaggtatagcagaaaactaataatggccataaaacaaaaataagaattaaaaagaacacagaaaaagatggagagaacagatggacagatagcaagatagtaggcttaagcctatcaataataggaattaaactagaatgctgttagtctccattgtatgttaggcacaaacattacttacataactgttaataaatgcataatttgtgatgatctacgttgacatattgatctgaaaaatcttcatgttcattgctcttggtaaacacatagtaccacaataataaatttcttgttcacataaattttgcctgtccctcactgttggattgagtttgtttttatatgtcagatagcctttatatatctaccagctattcagtttactgtgtgtcatgagccacacccagccacaactggtattacaaatttccctttgtcagataaccctcctttcatcacttcacagtaactcacaagtggtaactcttatgacacccatttcccaggcataaacttaggtgtttttcaaggtaaaatactcactttcttgtagtatttattccataacaattttttgttgttgttgttgttttgagacaaggcctctgtcacccagactggagtgcagtagtaccatcatgtcttactgcagcctcgacctctcaggctcaagtgatcctcccgagtagctgggactacaggcaatgcaccaccctgccaatcttttttttttttttttttttttttttttggagagacggggtcccaggctggtcttgaactcctggactcaagcgcttctctcaccatggcctcccagttttgttttcctttgggattacaggcatgagccactgtgcctggcctattccttaataatttaattggtgtaaaattgtttttattgggttcttatcttttcaaaaatgtgttactgacatttttgcatgctgtgcttccaatcccatttccttcgtaaaccttgtagcttttattgcatgattttgtataatgtggtttttttgaaactcgtatgtcatgatatagcggacctgactataattattttataaggtatctctttattcctcttttcatcagttgatccgtcttagtctttgatacatttcagtgtaggtatacttccctcctaatcactacagcatgtatatatcattaactagagtttgatgtcagcttacttctctttttgtgtgtgtgtgtgtggtacagtttacatttggtgaaatgcacacatcttaagtgtactctttgataagttttgcagatgtgtatgcccatgaaatacaaacctctatcaaagtatagaacatcatcattctcagaaatgttccctcatgctccttcctagttaggcccttgagccaccctttcagaggcagccactgttttgacttgtttactaccttagattgatttttcttgttgcaaaatttcatataaaaggaattatatgacatatgctcttcttgtatgtaaagcttccttgagtcagcatgacattttgagattgatccatttgtgtttatcagtaattgtatttttgtttttgttgctgagtagaatataccacaatttgtatatctgttcgcttgttgatggatagccaggctgtttcaagtttttcactgttgtgaagaaatctgccatgaacctatttgtacaaatttttttggtagacacatcttcatttttcttatgagtggtattgctgggtcgtagggtaggcaggtgttcagtcctatgagcaactgccagcctttgtttcagaggttttattgttttaaattcccaccaaaaacatatgaaagttcctgttgtgccatatgcttggcaacactgatcttgttggttttataaattttaattattctggcaggtatgcagttgtatctcagtgtggttttaatttgcattttcctgatgactgacaatttggagcactttttcatgtactccttggctgtttgcagtatcttattttgtgaaatatctattcagaccttttgttcatttttgaaaattggatcatctatgtcttttgttaagttttaaattttgctaaagttttatttatgagtttactcttttatgggtcttcctttttgtgtcctaataaatctttgctttatcctcaagtcattaagatagttttacatgttttcttatagaacctttatagtttttaacatttatatttaggactgtgattcatcttcatttgatttttgtgtattgtgtgagatagagattaaggcttacttttttccacatggatgtcagttatctttttactatttgttcaaaagactttccatcctcttttggactgtctaggcacttttgtaaaatattaaatgactataaatgtgggtctctttgttagactccttaatctgttgcattgatctatttgttgatccttaagccagtaccatactgtttagattactcagcccatgctatgttttgaagtcagattgtgtaacttctacagctttccaagcttttttgggatgttttagatccttcacatttccatatacattttacttatttaatttaaattttttatagctgcataataggtgtccatgttttgggggtacagtgataatacattcatataattgtaaagatcaaatcagtgtattgggggtatctgttaccttaaatatttgtctttatgctggaaacatttgaattactctcttctagctattttgaaatgtgcaatagaatattgtgaactatagtcatcttactgatctaacactaggtcttatttcttctattaagctgtgtatgtacattcattaatcagcttctatatacactttagaatcagcttttcagattaaaaaaaaagaaaagcctattgtggttatgctttggattgtgttgactctgtgatcagtttgaagagaattgcagttgaggtgcccaattcgtagacatgatatgttttgccatttatttacgtcttttaagatttcccaaagtgatgtttggtaatttttagtagagagggctgcatggcttttgttcgatgttttatgttttctgatgctgttgtagatagaattggttttttaaattttgtttttctagtatttgctgccaaatacagtggactttgtatattaactttgtatcctgcaaccttcctaaattcacttattgcagttattttgtagattccttaggattttctttataaacagtcatatcatctgtacatagagccagctttatttctttttgatttttatgcattttatttctcttttttgccttgttgaaatggctaggatttgtagtatggtgttgaatacgagtggtgagcactggccttcttgcttttttgttggtccttggagaatagtgttcagtatttcactattaagcatgtaagttgtagagtttttgtaggtacaggttgaggaagttcccttgttagtttgccaagtgtatttattttgaatggtgttaaattgtatcaggtgttttcactgcagctatttcatgataggaattttcccctagtatagaaaaatacattgattggttttgaatgttaaaccaatcttttgttcttgggttaaacactatctagtaatcatatgttatcgttttgatacattattagaatttctttttatttactgacctttatgtctctgctatttttagccattctagattttgtgtatcttttttcataacctgttgagaattaatattgaaccattttatgtaaaatatagaaacttgcatttctacatttatcacttcctcctgtccttgctgtaattgtcatatgtattacatctatggtatgttataaactacacaatacatgttaccatttttgctttaaagagtcgtgttttaggaaaattaagagcatttttttaagtgtaggtttgctagcaacacattatgtttttcttttatctgaaaatgtgtttgtttcacttttattcttaagaatatttctcttgaaaataacattttgtgttggcaggcttttgggttttttttctttttagcacttttaaagatttcattccactgtcttctggccttatattttctaataagtcagtggaaattcaactcagtgttcctgtgaaagtaatatgtcgtttttctctagctgttttctgcactttttttcttttttgttagttttcagcagttcagctgtgatttgtgcctaggtgtggttttctttttatttaattaatgtttgctgagcttcttgaatctatacgtttttgtcttttaccaaatttggggaattattttcaatttcttttctgtcctattctctttttccttgggattggttatatgtattttgatactgttccaaggactctttccccccatacccctacctttttttctctgtccttcagataaggtctgttttcatgttactatttgttttgccatcttcagtctgccattaagtacatcagtaaagatttatttcatacagttttcagctccagaatttctgtttggttcttgtttttgtttgggctgcagtaacaaaacaccttaggccgggtaatttattgtataaacagcatacatttattgctcacagttctggaggcttgaaagcccaagtttaaaaggttccagcagattcagtttctggtgagaactctctgcttcatagaaaacacctatgtgtccttacatggcagaaggggcaaacaagccttctcacgcctcttttattagggcaaaaatcccattcctgagggtggagccttcatgacctcccagaggccccatctcataataccaccatattagggaccgggtttcaacataagaattttgggggacacacgcattcagaccatagtagtccctttttattgattctttttcttttctggaatttcttttcattcaaagcaagagtatttctccctacatcttgtgcattgtaacagtacctggtttaaatttttttgtctgctaattctcacatctggattgtctcagggccattccctgtttgtgctttcttttgagcatggatattttttgttcctttgtatgtcgggtaattgtgttctagcacattatgtatggatgatagattttaaaactctgaatagtattttttaaattgataatgacttttagtgatatattttgtcattttctgtgctgattgtttccttgtccatgcttttcttctattttcacttgtctccctgctgctaaagtatgtcgtcagatagttcttttgtgacagtctgtgtatagtaaaccattagcttttatgtgtcttaaaatatcttattttttccctcattcttgctgcattacctgggacctaagttctaggtagacagttactttactttcaatactttgaacatattgtgccattgtttttcgtcatcagttgttgctggggagaagtctgaagtcagtctaattgccatttcttgctaggtaatctgcttttctttctggtagcttttaagattatgcccgtgattgatattctacagtgtgtcttatgtgtgacttaatttttatcttcctcagtatgtagtgtgtattttcagttcaacaacatgtttttcaattctggaaaattactatctaaattatctcagcaaatattggtacaccactgtccttatatcttagtgattatgtttttttcttttagtatattcctaaatatacttatttttatgtttttttaaaatcatactatccattgggtgatatcatctagaatgaattcatgttccagccatttattttattggtctttctctttttttctcattttttttcccacatgcctgttgtgtcacatttgttgatattatattttagaattttgtccttgcagccttattttgattgggaagtttaacatttttcttcattttgcccatctgtctttttctatgcttattttctttcttacagtttttacttgattttcaattcattcctcccaatccaaaactaggtttgtattagagtttccgggttcttgcttcagcatgatattgagagtattgcaggttctgtcatggatccattcaataactaactggtttagatcctggttaagaggtttctcctctctctttccccttaactacaccacaatgtcaaataagctctagcttaggcaacaggggatatcagtatattcttagcttcctttcaagaggagaaggctattccagcctttggctttaagcagtaagcatagctaatactcctcttatggaacatttttagtccttgtttacccagaggagggggaactttgagccactattgagtgctcatagactcagagctttgcaggtccacagcttatatccccattcacagccttgtgtttcttctcatcttcttgtgacttagcctttctaaataaaaagtaatacttaacattttatattgtacttctagcaaaggggctgaatcaaaatacaaacttaatgagccttcttgactagacatctatgtgttgtttcttaatgttttgtcactcttgtctcacttggcatatgctcatagtagtaatattgctcttgtgaatctgagttttaatttctagtagggaaaactctgagttttcttttttaaaattttgtcttgatcaaaattatatatttttacatatgaactttgaaataattttgctcagttttaaaacttctgttggaatatgtcttgaaatgtataaatgtgtgtctacatcattttagaaaggttgtcctcctttttttgtttttgccctccagcctgagtgacaagagtcctggtctatcactcagggtggagtgcagtggtgtgatcattcatgtctcactgcagcctcaacctcctggggtcaagcagtcctcccacctcagtcccccacatagctaggaccacaggtgtgcaccaccgcacacaactgatggttttgtttttttttgagacaaggtttcccaatgttgcccaggctggtcttgaattcttgggctcaaaagatcctcctgcttcagtctctgaaagtgctgggattccaggtgtgagcctctgtgcctatctgaaagattgccatttttatgctctccagttatccagaagttaactatatccatttatatacagcttttaatatgtaattttgagccttccttgagaaccttattcctgttttatgttttctgtagttattgtggctgtccagctggctatactagaagaaatattaaaatgttcctcttacatgtagtcactttgccagaatgcctaaataattataaaaggttttggtagattctgtggttttctatgtatataatcataccaactacaaataaaggtacttttatatcttttaacatttatgctagtcatttagttttcttattttattaagctttctaaagcccctaaaacagtatttaacaattataggcatctctttgttcttgattttagtggaaatgccttcagtgtgttttactgttgaatatcttgcttgctgtatttgggggaaaagtctcatagttaaataatttccttttattcttattttattggagttcttattaggaatggtggccgaattttatcaaatgccatttaaaaccttgataacaataatgggcaattagccttttaacaaactggattcagtttgctttttattttgtttttccttttgtgttaatacttacaagtgtattgtgttatgttttcttcctttgaactatatttatcaggttttgttgttaatgttttataagcacttgaaaaataattgaataccttaataatcttcccttgtgtattgtgtggagactgttttgttctaactttataaattgataataaagaaccctctgtttaggtagattttgtcagtttgctcagttttagaaagctagtatagaaaatacataccttggggtaattttattaagatatttttatgtgagtttgaaattttttccaaatatgaatccatatttccgtgtgtgtgtgtgtgtgtgtgtgtgtgtgtgtgtgtgtatgtgtgtgtgtgtggggtctaaatttgtactgtgtcccttgggaaacacatttgtttccttaacattttttttccttctgcaatccctctgtgctttttttgtgagaaatcttaatcccaaacatttatctgtaaataagttggcgagattttttataggtgtcagtagagtgcatagctgtatattaatgctttgtgtgtatttatgaattattaccatatgagtttgctgtgaagtctgagtattactggtacttaatattgcccgttgttgttacataataaattgtaataaaatttttgttgctaccttaggagttccaacttgggcttggttctgatattgtttgagactgtttggtaatttatacatatatgactgtaataatgtccttttcttctctcccccaacctccgccaacagttacatgggaattggtctttctgctcaaggtgtgaacatgaatagactaccaggtacacttgtaattgaattacagtattatgtcttatgagtagctctttctggttaaatttttcaagtaagaaattgtaatatttaaagatactgattttctgtgtttttaatcatcattatgaattttaagtgaaagctgagtggggtttttttgttttgttttgtttttgagacagagtctcactgtgtcacccaggttggagggcagtggcgcagttttggcccactgcaacctctgcctcctgggatcaagcggttttcctgccctcagcctcccaagtagctgggatcacaggcatgcgccaccaggcccggctaatttttgtatttttagtagagatggggttttgccattttggccaggctggtctcgagcccctgacctcaggtgatccacctgcctcggcctcccaaactgttaggattacaggcgtgagccaccatgcccagcctgctgagcggtttttaataaatttaaatttcacactatttagtaaaacatatagtatatatatcatgcttttttttgtatttttatatttttaagttttagtacatagtaatatcagctactttaaatattttaatgtggctagttatattggctacccatcacatttttgacttttaacccatcttaatattcagggaatatcgactaatacttaaagtaaactaaggaagagatgaattgagatccagacctgtttcccagtaccacttatgagaaggaagtgattcttggattatgtcttctaatactctctttgctaaaattaaaaattaattttggcgagactttttgaagtacaaggcaaaactgtcaatgtcaaactacatgaagtaccttaaagaaacaaaccaagacaatgtagttgcatctgattgtaatcacatatgttaccttgacatgctttgttttgtacccttttgcttaaaattatacttgaaagagggtttaattgaggtttttattatttgaaaactccttatagaagtaactgataaggtaaaaatctcttaatgatgatataaacatatctgtagtgtggtaagaccacaccctgtttggcttttatatttggatcacagtcttgagaaacttgcagtgattgaataggatgtaatctcttatgttatataaaacgtgtatgtgtttctttaaatcaaaacaaaattattttggtgtattagcaaacggaatatgcacagaaaatgtgtcctcctgtggttgttgcatttatgtttgttttttctggtagggggttctctctgtttaatatttgttttagtgttctgtgtagctatttttcttaaatttgtaaactgtattttaatatagaataaattatgtagtgtaattgttgagaatttaaatgtacattgggaatttcatctttatattatcttgtactgttctgatttatcataatcttagtgaataaacctagtacagaggaaccttacttttcattgtaaatatgccggaactttctccttaggttgggataagcattcatatggttaccatggggatgatggacattcgttttgttcttctggaactggacaaccttatggaccaactttcactactggtgatgtcattggctgttgtgttaatcttatcaacaatacctgcttttacaccaagaatggacatagtttaggtactgagataatatattgcatgcaaaataaccaaatatggagattattatacttccaggatggtagttgtatttattatgtgattctcctttatagatggatgcctctggaaatggtttctttctttttcccagacagaagctgaggaaatggtgaatatttatattcaccctatttatattctgtgaaggccatctatataatacatatatgtataggagttactgtagaaataatccccacactgagatacttattctagaaatagaaatgccaagagttttctactttaaataaaacgctacacagtataatctaattctctgggtaacaggtgctaagaaaaaggggcagtcagttgttaggatagtgtggggaatagtaacaaaggaagggaaagcttgatgccacaagcatatgaagggcatcaacacactcaaaggtcagatctgctaacaaagatggctaagttggtaactacaagtttgttctatggaaggaagcagaattaaacaagcaaacagtgacaaaactgagaataaaaaacttctgaaaataaaataggttatggaaaacttgaaacccatacattgtaagactaatagtaagttaagattttcagtggactattcatgtactcatagcacttcaaatttaaagttatatgtggtcattatattccattttcttagaagtttttttttttaaactatagaaaatataaaggataataacactgatgctttttgttttataaaaaaagatttcaccttttactgctggaaaaatctttgactcaaagcaaattatttttaatgaggtaaaatgaaaggaagcataaactgagtaaccctagaaggcagaaactatttacaaatagtatttagaaattagacttaaagtagtatgcttagacatataatagatgttctttaacacaaaagctgttttttctgttatttcatagtataaaagaaaattctgaatttctggctgcattggcaatactcttttaagagtgtttcaataaagttaacttttttcatattcagcttagcatttctatttctgattactgatttttaattctgaagtccttctgtattatctgacttaaaagtttttctcaagtccacaagagatccttttctcactagtacaataatgttaaggaccccatgcaaattatgtatatttgtgtgtggtttcattgttgtggccacctggtttccaagaacaatacaggcctcttgaatttatttgttgttactattctgactgttcatataatcttagttggcttgactgcttaagatgttggaagttttgaatccggagaaatctgcttttaggtgtgacctttggctcaaaaaccaaaaaatacattttgaaaaaaccacaatctctttaacataaactttttaaactttccagagaagaaatttcattttgggagataagacaatcacaggtgataatgattttattttttccctattttcacaaatatttaaattaaatttttctcttggctaagaaagctatttttaaaatgtaagatgtgtctttaaaaaggtgcacctaataatggagtcacattataaatttttattttttgtttattttatttatttaatttttgagacggaatgtccttctgtcgccaaggcaggagtacagtgatgtgatctcggctcagaacctctgcctcctagtttcaagcaattctccttccccagcctcctgaatagctgggattataggcacgccatcacccccagctaatttttgtatttttagtagagatggggtttcaccatgttgtctaggctggtcttgaacctctgacctcaagtgatacacccgcctcagccttccaaagtgctggcattacaggcgtgagccactgtgcccagcctacattttaattttaagtaaacctgaatgtttggcattattcattcttaaatttaatgagtattaagcacatagagagatggtataacagtggttagtaagagttctttagtcagacttgcctgggattgactcccggcctatgccaggtaaccatatgtaaattacttaacatttctgtgcctcagttttcttagtttgtcaagtaggatcactgtaatacctatctcactaaggtggttagactaaactgcaatagtatgtgcacagttctggcatctagtgaataaccattaaatgttatttagtatcattgtttgtcagcccctgagctaggttcctgggatccactggtaaaccattgatgagcagaaattacttctctagaacaggagtctacaagctatggccaagttagcctcctgtttattttaaaataaaatttcattagcaaccagccacacctacttaaatattgtttatggttgctttcctgttacagtggcagagttggatatttgtgataaagaccatatggcctggaaagcagaacatattagtagtccttcataggaaagctttgcctacctctggtctaggttctggcatcttccaagataaaatactgttaaatatttagttactattcccttatacttcctaagtggataatctgtgcccaaaacttgatacatctttagtttctgtctcatggaagattttcagaatgtatatttgtttactatataaggaaaaatagaaaggttttatttgagaaaataagagaaactttgcagtatataggttaatgtaatttgataattttttactttgttttattgaatatcgttcaccaattgaagatcacttttcaaaaagcctgacaaatcaggaaattatgaatatagaaaattgctttctgtgtaaaattcaaatagttatgccatcttgttaaagtggcatcttttcgtggtctgattgagcaaaaacatgttgtggtaactatatttggctgtgttaaaaaatgttaacctttggaattaattttgaatttttcgttagagtttttggtaaagtgaagatttcagtaattacagacaaaggatttttgctaaagatagaatatacagtgttgattataactagacatctttgagaaaaattattttatgaaaaatattagaaatatgtatagtttatagtatattaaaatattctcttgctttctgtattctttttacttttgtgaaatttttgggaaagttttttatttgggctgatagtacttgctttctgtgttattaatgaagttaaatgtaatgataatgttttacgtggggaaaacaggaaccctaactttgctttccttttaacaagccaccatgaatttactagtttttaaaaatcataaaaacagggctttactaactacaaaagcattaattttacacattattttaaaagtataaaatttattttcagtttgtcttttaactttattaataaatagagttagatgttttctgttattacagcacagtcatagaggaataaaatgtcaagtaggaagagaccttaaaaacaatttaatggaaattccctcagttttaagatagtgatcaagactgtagaagcagtggtgctggcttggttttaatgtttgttttagactggaagaattgagatcagctgactgactcaccaatactgctctcccattattctagagctaaatctttaaaaatatatctacagaaatactttattattttcagctaagttgtatattggaatatttaaaggaggtcgttaaattgtcacgttgagttgacagtagacttattccaatgatattgccattgctcaagttgtatctagaacatgactgttgtaattactgtcaaaaggtattcaagagaaattctaaactgtgcaaaatcgttcatcctttgaaggaggaattgatttttcccacgagtaaatcataagttaaagaatttactttcataagaaacattttttaaagaagcaaaaatatactgtattttcccttgtttgccttttataacagaaaaactcttttctttccagctaaaattatttaaaagctaaatctagatgatgattattaaacggtgagggtacaaattgcaacttggggttaaaaaataaactgactattttgcaaccaactttcttaatgtgttttctaatgtagctttgaagatatatctaaaagtatttcaaaaatcctggagacaatggcagcatctcagaaataaaatttgtgtatgactagcaaggctgattatcttgaaaggggacagcgtttgttcactcagacatatgttagtattattgattaaaaattagtcttgttattttttatttaggctttaatgtttttttcttttgccatttgtttcctccttttagttagaaattcagcttgtcagtatagtctgctttgaaaaacagcttctaatgccacttttttttttctttttaggtattgctttcactgacctaccggtaagactttttttaaaagcagttttccatttttaattacaggaagtataaagaaactgatactgggcatatttagaaagtttaaaatacagtcttattgatatttattaggtttatatgacatgcaaagaaagagatcttttctctaaccaccttgggtgtagaccctcagaaattaagctccaacttgcactggattcattgtataaaggaaaataaatcagaattgattctcaagtgtctttttaaatgtcaccattcattcatttgaaatgtatttccttggacttttcagcagaaggctgtatagcagttataatcgtttattcatccaagctatatagaggcctactatgtggcaggtaaagtgcttggaatatattattcaacaggtagtaaaggtctctgccctcttggactttatagtattcaagctgtgaaagagaatgagcagtacatgaaaaacaagtaaagtagaacatattttaagggtgttaagtatactttggaaagaaagggaaaaaacagagaatgggaataccaacggtaggacacaaggttgtacaagttgctcccctttgctcaaggtgagacttgagctgaagcttttggaggagtgagggagtctgccaagtggatatgtagagcaagagttttcaggcagagggaggttagagaaaaggtgctcaggcaggagcacagatggcttgtttgaagaagagtgtgaagtgtggtagagaggagtgaggagggcagagcatatgtagtagcagatgatcagagataataatggggttgggggtaagctattaatagatcatctagacctgggcaagccattgggagggcttggaaatttactctgagtgaaatacaaagacattgtggacttttatttgtcatgataggacttcagtttttatgggatcactgtgattgcttagttgaaaagtagactaggccgggcatggtggctcacacctgtaatcccagcacttagggaggccgaggtgggcggatcacgaggtcaggagatcgagaccatcctggccaacacggtgaacccccgtctctactaaaaaaaaaaatacaaaaaattagctgggcgtggtggtgggcgcctgtagtcccagctactcaggaggctgaggcaggagaatggcgtgaacccaggaggcggagcttgcagtgagccaagattgtgccactgcactccagcctgggtgacagagcaagcctctgtctcaaaaaaaaaacaaaaaaacaaaacaacaacaacaacaaaaaactatatgggagtaagggtagaagcaaggggacctgtgagaagactattgcagaaattcaagcaaggggttacagtaactctcttcggtagaggtttgattccacgtatcttatttaccaaacccaaggcactgtcagttgtaatctgcatcatctgtgacaccaagggggaaaaaaactaacaaactgtgacataatgcctcccttatcacttagcatttttattttatactcactgaatgatctcttagggttatttaaacttagattttaatatgtgtctctttttaggtgttgcacacctaaaaaggatgagataagcaatataaattgattaaggtattcctaaaatttcatgttcagagtctaaccttttaaatcagttttttaaagactggatgccatgattttctttgatctcactctgtcacccaggttggagtgcagtggtgtgatcttggctcactgcaacctctgcttcccaggctcaagggatcctcctacctcagactcccaagtagctgggaccacaggtgcacgccagcatgcccgactgattttttgtatttttggtagagacggggtttcgccaggttgccgaggctgatgcccatgattttctatgtgatactgtcttctccgtcatcaagaacattttttaagattactcttattatgtctctgggattaatctccaagctgctgattacatcgtgcacgtttgatactgtcactttcatgatgttaaccaatatcacgaaaatgaaaatttcatcaggaaaagcaactcagtcccaagagtttttcagtgagctcattctttaacaaatcgctcctgtgcaggcattgacagctgtgtcatgacagctgcctgaccatagtaaggtgtcatcaattataaaatgcattccagttttcagagatgttttgaaagagatgatggaagattcagaggtagagaatagataccaaatctatagactatttatatcccttaataaaatgctaggaaaaaacagaaatcaaaattataatagaaaataattttaagccaaggaatatttgaaccctaccgatcaaaagtactcttcaagaagcattatttggctctgggtgtctgaggtgggaggactgcttgaggccaggagttcaacaccactttgggcaatataatgagatctcacctctactaaaaaaaaaaaaaacaaaaaaacacaacaacaacaaaaaaccctgccgcattatttagtaaatagtgatggaatgagtctttattatttatttttttaaaatacatattgttaggacaaagtgtaaagtaagttctagatggattaaagagttaaatttttaaaaatcccaaaataatagtaacaaaaatatgattcttttaaaaatccaactgaaaaccaagagaattggctaatggattggatctgaaaattacataaggtctgagaattgacaattgtacttagcagagtagaggtcgttggtgacctggacaagaaagtttcagctgtgggatggagacatcctgattggaatggattttaggaataggtgagttataggcagtggataactctggaggactttggccatggtgaggagtaaagaaatggagtagtagccagtggtggaagtgggggcagtagaaaaaaaaattaagttaggagattgagtatgctgatgaaaatgtcggtgtcgcatagaaagaggtagacagatgtgtaattgaggggatgggcttttgagaagagcattgtggggacaggcagagtgtgtaggtgcagattctggttagtgggttgatttggtctttaacagttaagagactggtgagaatgctgtaagtttcatttggagttggttaaagagtttagtgacttttttttttttttttttttctgttgtggcactaagcaactagtcagcgtgagcttttgttgttgttagctttcgttttcttgttcatagatagcggagatcatttggaaaaagcttggttgcttgtagacatgttgtttattttctctcccacttttgaatcaccagttatgttttttccctcaggtagccaatgatcatgtgcaactttgttgtaacaatgggtacagtggtggttttaggtttccttttagtgtagtatttttcatttttaatactgtaaatcttctgggacttccataggcttcatatcaattcttccttttaaaggaagcatcaaggaagtgtttatatcttctatacctgtgatctctcacaagctacccataccattgaatcctgagagaaagtatatttgcagaaaaaccagtttacctagattgttctgcacctgttatggaatataagtgtttatacagctttgaaaaccttagatttttttcaaaatagtcttttttcctcagcttacctcaccagtttgagaaatgacattaagtataactaattcagtttgggatttaattatacaattaaattatgatagttgcacagttctgtgaacatactaaaaaacattgaaggctgttgctttttaaaggcttttgttacagtagctgttctcattttaaatgatgctgttttcgaattctgggcactgacttgaaatctactttttgtggatacattatttgtatagtcatttttattaaaagagatcgaatgtagaccaaagctgtgctattgagaatataaatttatattgtgtacatttagcttttaagcaatttctagattgaaagtatgttttgcaagttaatagaaatgttttcctattcttttcataaagaacctattctgtctatatactattctacatgggcaggagtatttttctagaagacattattacatataaatctacagtgacaatgcacctgctgcatggatgaaccttgaaaacatgctaaataaaagaagccagccatctgggtgcggtggctcacgcctgtaattctagcactttgggaggccaaggcgggcggatcaagagatcaagactatcctggccaacatggtgaaaccccgtctctactaaaaatacaaaaattagccaggagtggtggcatgtggctgtagtcccatactcgggaggctgaggcaggagaattgcttgaacttgggagttagaggttgcagtgaaccgagattatgccactgcacttcagcctgggcggcagagtgagactccgtctcaaaaaaaaaaaaaaaaaaaaaaaaaaccagtcatataagatcacatattttgttgttccatttatgcaaaatgtccagaatgggcagatccatagagttagaaagtagattagtggttgccagggggaacggggaaatgggaagtggctgctgatgggtactgagtttctctctggggtgatgggattgttacacaattaaattacagtagttgcacagttctgtgaacatactaaaaaacattgaaggccgttgttttttaaaatctgtaatatagcaagttaaggactatgtccttaatcctcttctcccaattctccagttttaaggttgagtaaatggtataacaattatacttacttttcagtgagccaaaactgacttaatattactaaaagtttttttaatcaatatcagattacagaagtaatgtatagtattaaatacttaaatgagaaatgtttatatatacagaaatgtacaaaagagaagttcttcataatcccagtctctttggctataatgtttgttttaacttgaatatatatccttttagacttctttctaaacacatataagccagtatgttcattttttgaatgtttatgtgaaagatagggtcataccatatacaatatgttataccttgctttagtgtgtataggacatctttctgtgtccatatatacatttttcattctgttctttttgcctgctttatgttatcttattaacttactaccacaattgatcaattataaaatgtacatttttttcatattttagtatttctgaaatgagaatgcactgtagaatcaatgactggtcagagtttaatttgcattatgttttcctagacacaaaatagtgatgtttgttactattagattttgagacttgatgaatatggtataatatcacatatctgtgaatattttaaaattttgtttgtgttacaaataatgctacaagacatatctttgcacatacttatttttgtaggaatacactcttccaagtgaaattacttggtcaattttaatagatttttccagatttctttgttaaaagattatgtcagtttacatttctgtgtacagtagatgaaagggttatttccccaacccttatcagcattgggtattctcagcctttcaagtcttaatctgatgtgcaaaagtttttaaatcttgaacttttaattgattttatttttaagtgcgcattaaaaatgttcatctaaaaagttgagtgtgattaagcttctctttatgtgttgtcatttttatttcttctacaaattgcctacatattcattgccttttttaagaatttgaactggtagtctttgtcctcctgaattttttctgtatttgtaaaacacattttgccatatgtgtggcagatttttttttctagagagtcatttgtctttgccatttgtggcatgttttgtcatagggaagttttaaatttttatgaaatagttttatcagagaattcatgaatgttgattgtctttgatagtgttgatagaattattttttctgaatttgtaagaaaatttagatgagcagtcattttaaaaatgtctttatttagacaatactgaatatcatcattataaactgcttaatgaacagaattgtctttcactcaattgtgtttggcttatatgcttttgtgttaaagtatctcataactctgtagtgttttttctgtttttttgttttgttttgtttctgtttttgtgtttttaagacagagtttcactcttgttgcccaggctggaatgcagtggcacaatctcggctcaccagaacctccccatccccggttcaagcgattatccttcctcagcctcccgagtagctgggattacaggcatgcgccaccacacccagctaattttgtatttttagtagaggcggggtttcaccatgttggtcaggctggtcttgtactcctgacctgaggtgatctacctgccccagcctcccaaagtgctgggattacaggcgtgagccaccatgcctggcctgtttctataaagtctttaggtctcagttttctcattggtgaaatgggaaggctgtactatctcacctgtttttggcttaaaagtttataaacttgttagctctgttgattattaagaatcaatacatttgcatactttgctttaaccatttatttccataatccagtagtactttatatttttgatattttgatgtaatattttgtttctgatttgttctgcttgattgaacggttgtttttaaacacaccctctttgcattttactgtgaaatctatttaacatattcacacagaaattatccgctcttgatctttaccttgttttgtactgaaaaatacttgttataactattaaagatataagacataaatacagaaaatgaaaatatggtaggatttggagttgcaagaggaaaaatcagttttggatgtggtatcagacaaacttgtgttccaattccatctctgccatttgttagcagaacgaccatgagcaagttatttaaccttgaatcctcattttctctgtctttgaagtagaaataataatagtggcctcacagaattatgattaaaccctggcatttagtagccactcagaaactcattctgcctttagatgtaacaaccaattagtgacatagccaaaagaatgacccctgtattttttgtttacttgaagttatcaccttttcatcttgattaaccttgaaaccatggagtgtacctgaatgcatttctgagtttgggtatattcagattcatccttttcctcccttgaaatacatatatttgaggttttgtgttttttttttaatatagagaatctccactcttcctggcactgtgttttgcttatagttatggtcttatccccttccctttgtaaagttaggcatcccaaatatacagaatgaaaacagtaaatttaagctattaaatgccagactagctgagatcatacttttatgataactagctttaacatgcagtttatagaaatgtatcatatataaaatgtgggataaacctgagttatgtgtttatagttgaatttctgtaactactatatgacataatcttagaacaagaattacatgcacatatattagtagcataataccacgtggtataatacaacgtagtccctgaataaataaaacagagatcttgggtctctttgttttttcttgatgattacattgcaggaagtgatattttttcatctaacatataatgtattttagatcatttgttttagccttctaatattttgattgggattttaaaatatgaagtaaatttatagttctattcttttaaatgtaacattaaaagaattattaaatctaacataaaatggatagatgtttaatgaaatatgctatcttacagccaaatttgtatcctactgtggggcttcaaacaccaggagaagtggtcgatgccaattttgggcaacatcctttcgtgtttgatatagaagactatatgcgggagtggagaaccaaaatccaggcacagatagatcgatttcctatcggagatcgagaaggagaatggcagaccatgatacaaaagtaagagtgaagaaatttcaattgatgctattcagaatctgttttttataagacatttattctgttggtatccacagaagctttttaatccactaatttatatactgacatatctattatattattgattttaatctctcaacgaaaagtaatttactccactatttaaacaaattaaaaacaattgtttgacacacgtacagaattgtatttcagtctgaattaatttgatgaaggaaataaaatgatgttaggtcacctaggctaggttaattcatttgctattcttagtaataggatttaatgatttctgtaggttatacaatttaacttttaataatgttaatggaaaagataaagttgagagataatctagatcttataatcaggatctgtggtttttggtcatgaacttggctatgtccaagctcttaatatctgaactatcagcagtagttaagtatggacttaaaatttaaataaataccattaaatttaaaaagtcctcttcactattataatccaggtcaagaaaatagcagactttcagatacagttggtccaacacatttcatctttaatgtccttataattgctttgaatattcttaactttaaaattgtaataaaatgttgggggtattttttagaaaaggaagtgattgggagacatgatgatgactctgaaatcacacttcgtccctggagctattatcatctgtattacagagattggacactagtttttttgtccagcccagttgagaatagacaaccctgatgcagaatcctatagtcaccacgaagtgaagctagaatgggttgttctggggccacactgttttaatgctctgaaaatggttaccactgagtatcatggcaagatagtagaaaacatttatcttaaccttataaccaggatccttccacccacttcttcactgacttgatgttcaccatgaactcttgagaagtccattctaaaaggtcccctcccccttaaattaatttgaacaattgggtaaaataagatgcagatctgtttcttagacattttcctcccttttctccctccgctctttgcctcagtctcctcctgtggtgaaccactgcttcccacgattttctaactggcccttagtagtgtcaggtggaggcaagtttaaaaattgactgtttggagataacagatatttgggttaatattgttgcatcaccagtttttctaaccacatcttgtgggtagatgtaagtatatgttttgactacctggtacgtttttaaaagattattgtcttggaaatgtgtcacttacatgtaaaccatatttgataaatctcttgggtaaaaccatagtaattgatttagattagaaggctgattcctcctttaattagtagtacacttatagacatgttctggaagattgtctctctggattcaccttagtattctgtacatactttgtgatcccacttcatttaaccggtgtgtaaagaagatggttgaactctggaacattaagagttaatcttttattttaaagttggttattttacagaatgccagcaatactggaataagtcatatgataaagtcaaaatagaaattatggttagtagggctgaataataagataggaagggacctgggggtaatgagagtccaagaatcaaagaaaaggtcatttaatgtccttgattctcaagtaatatttattttagggagagtagtctcaacatagcatttgcagttatcttttcgaaaatagtacatgaatagaacaaaatgatgtttttcaaaagcttactttaaaggtgaggttcttaacgccttgtttcaaggaaataggttcgtttttataacaccagaatagattttgtttatataaattgtagtatgaagcatgtattctcttcactaaaagatgtatgtttcttctttttattttaagaatggtttcatcttatttagtccaccatgggtactgtgccacagcagaggcctttgccagatctacagaccagaccgttctagaagaattagcttccattaagaatagacaaagtaaggacactgtggtgcatggctaacatttgttttcagattatagatttggttactttaatttttagaaattttgtttttttaattaaaaaaatttcaaatatattaatttaaaatggatgcctctgaattttattttcactgacatttttgaagatcagtttaaaaattcacataggactatgtcagaattctaattctagagagattttacagaagttttttgaaggaatgtctttaccatttttttcttaaatgttttcttaagctttcaggaaataaacatttaataaaaagatttaaaaataataataaagtagtcctgattagttggaggagatagtatgtgaaagaaatgtaaatatctttgaatttaaatggctaatacagtattgatccataagtatttattatttagatcctagtgctggcctctgtggccagagataaaacaggtcctgtataacaatggcaagtcagcataactggtccatagttagccatcctaaaattggtgctgtttgtccatcagggtgggtatgacttgacaagagtatagagatgaaaacaaaatagatgggtgaaattaatgggtgaaaacaactatttcataggtcaaattgctgtaatagcactgattacattgggttgtagttaattgtgtgctgtccttttctactattttaataagctctgttgaacagagatcacttactcattttgtatccttatcatctaatttaacatataacagatcaagtgaatgctcaacgagtctctgttaaattggaatcttagtcaaaagctagcatttttcagtcctttgttcagaagattatgtttgataaggcattttagtatccctttaaaacagtctttttaatctcagtgtttgaaacttcaatattgcataataggtattttaactatattactcgtatgttcgtgattttaaaaaaaaaatttgtgaccgtacttgtttttctaattttctagtatgtctgaaatgtttcctggattgcctaatggaaactatgatgttagagaaagaaattgaaattaatcataatttatttaaagatttcttactaactttcttttctgaggtcactaagtttatgttttatctacttttgtaaaagttaatcgtttgctttcttttactgaataggaattcagaaattggtattagcaggaagaatgggagaagccattgaaacaacacaacagttatacccaagtttacttgaaagaaatcctaatctccttttcacattaaagtgagtttgcataataaaatgctatatttgttatatattataaatatttgtcaagttatgtaataaaagacattttcgtgcttttgtaattttagtttttttcgtttttcaagtatatacaattttgtaatgtcatttaagcaacatgttatgaaaaatacttttgtgttaaggaccataagcagaaggtgtcttttgctatgtatttgcttttattattctatttatgtgtttaaaaatgtgaaaatcttatttagaagatgggtgtctatttttccttctcagaagtaccttacatttaatctctctggcattttaaaaaattgtggtaaaatatacataaaatttaccattttttacattcacatcattgtgcaaccatcaccaccatccgactccagaacttctccatcttcccaaactgaaactctctattaaacactaaccatccattcatccccctagcccctggaaaccaccattctacattttgcctctatgaatttgactacccatataagtagaatcagagtatttattcttcattactggcttattttagtgtaatagccttaaggttcatctttattgtagtatgtatcagaattttcttccttttaaaggctgaattttactccattgtttggataatactgcattttgtttatccattcatccactgatggacacttaaagtttgcttctacctcttggctgttatgaataattctgctgtgaacataggtgtacaaatatctgagtccctgcattagatttttttggttatatacccagaagtgaactttctggatcatatggtaattctatgtttaactatttttttttaataatagccatcctgatttgacaattttaattggttttatgaatctttgttacttaaaaaatgagatgttactgagcttcagatttcaacttgttaagcaacagatatcctttgtaagtcaaatgacagaattgttttgctttagaataagaattttaaatgaggcccattttggttaagaggttgggaatgggacgggtggggagaaaggctacgctttatatgtatctcatatacataaaatcatgtccttaggcacaatttgatttgctaccaagcgcaaatgttattttgattaaattacttgtagccaaaaaaatggggttcatatcttcttataggtaaatttccatttggtaaatcctgattaaagggggtaatattattatagtgtctattacattgtactctcatttttctggaaattctaaaattctaagcattaaagcataggacaccatatttaatatttttagcttactaaagaccaatcctactgataaatcaaagttttaaaaatatttttagaaatctgttgctattaaataaaaggccatttgaagattgtgtctaagtaaatttttcttttctcctttagagtgcgtcagtttatagaaatggtgaatggtacagatagtgaagtacgatgtttgggaggccgaagtccaaagtctcaagacagttatcctgttagtcctcgaccttttagtagtccaagtatgagccccagccatggaatgaatatccacaatttagcatcaggcaaaggaagcaccgcacatttttcaggtgagatttaacttatgacattatttttagatttttcctctttataatcttaaacctttttccttttgaaaatctgtatatttccagctgggcacggtggctcacgcttgtaatcccagcactttgggaggccagggtgggcggatcacgaggtcaggagttcgagaccagcctggccaacatggtgataaccccatctctactaaaaatacaaaaatcagctgggcatggtggcaggtgcctgtagtcccagctactcgggaggctgaggcaggagaattgcttgaatcctggaggcagaggttgcagtgagctgagatcacgtcactgcactccagcctgggtgacagagggacactccatttgtctcagaaaatctgtatatttcctttgtagctgttttcaaatgtgtatacttaagatttttctgggtgaaaaattgtaggttcagattgacatgttctcagtaccaggaagtcacttgaagaacagctgtctgagaataggttattagcagaccttcctaaatgaaagtcagcattcacaatgagtagtcaccagaattaaattattgatttttaatagtgaaaaggtaattgtgtgttttaataaaatataaatttaaaggtgatgtggctgtgataccttatgccactggttaccacatctagctgggctgccgctgcctccctcctctccccccacccccaacctttcccaaccaagcctcttgcaaaagtcagctctgcctagttcgttttctcccatccgtttgttggctcaccagtcttactctctgtgactttgggctttctcttaattaaaattctctcctttcttggcttttgtgacatcacttctacaggtttttttggttttgtttttgtttctttttaaagagttggagtctcgcaatgtttctgatgctggtctcaaactcctggcctcaagcactgctcctgcctcagcctcccaaagtgctgggcttacaggtgtgagctaccgtgcccagccacagatttatttctgatgcttctcagtcttctgtttgcccatctctttaattctgcatttcccaagatgttatctttgtacatttaacattcttaaacaagtcagatagtgtctcctttcctttcatgaagtaacaccattgctttttcttatttcaatttattctcttttctgcattacttcctctcagtttatttacatcaccactctgtacaacaagtgtgattcccatgtctgttcttagccactactcctcttgaatatcatacagtcacttcaggcttggataaattctgagcctcagtgtattcatatgtaaaatggggatgatcataatattgccattttagggggattttgaggattaaatgagatgtgtaattaagccttcaataaatgttagatgaggtaataattaagatctcacaattaagtattcttagtatcctttcaaagaagttacctgtttacatcatccattgactctcctacgttctagaagtcttagtacaaaatcaacatggagacttgtttacaaccgtattaataaattagtgtttgtttctgtttctacgtggtatctttttcttcaggttttgaaagttgtagtaatggtgtaatatcaaataaagcacatcaatcatattgccatagtaataaacaccagtcatccaacttgaatgtaccagaactaaacagtataaatatgtcaagatcacagcaagttaataacttcaccaggtaagtaatttcactgacttttgcactaatataagcaacctagttataggtgtaatcgttgtaataattttgaaagaacttgaattatgtgacccacagaggggctctgggagttcttaagcccccagagaataaaagcgtagggagtcagttccccaaagctttttagtctcctattatgcacatgagctctttccttagtttcttcctcttctctactaccttcttccctctagtaaagttataaggacaaattcagggcttcatgcattgtcttcctgccagccacagagctatacaaatgatcacataaatgccatttgttatgttttcacagtggttaagacacagtagcatatttaaccttgaacggtgacataagataaatttacaactgattttttctctgtgtgtgagttttttttggtgtaaatgtgtagaatgttttccaagttcaaaactaactttacaaataatcttttttgaaagcctgcctttaagtagcttgcatatagcagatggttaagtcatttagtaaacattggtgtgaggatggttttgaggatttgttgggcaccaaacattctgctaggtagggtgtctcactttgaagaggtttgaaagatgatatctcagtcagtgtactatgacccttgatatactcaggtttaatatttatgaaacctaaaagttcatgaagtgacattatttgaattaaatactactgtgcagtagcaaattattgtgaattcaccctgcccaaatcatccaggactgggtcaatttaatattggtttggtctataacaaaccagttggttacattgcattttcaggaaatggtcatcagtgccacattttcttattaaaggagagagagcctaacttttagcatggaatcttaatggaaatatgattttgcagaaaggattgtatgtaaaaaaaaatctgtatttgaaaattgggagattaatctcaatttctgggttgtctgtcacacgtgacaaaaatttactgaagtaatagtgtgtgtgattgatataagttgtaatggagaaccacaaaagtgtatgagaagagcagaaaaatcgtctttcacagcagaggtgatatattggaaaatataaaatcaaaatattatagtttaaaaatagatggaaatgtaaaaagttaagtacttcatcatgctttatactaaatgcattggtactttatcattgatcaaggctcttgccaatgtttgagggtaagattgcagtcagtttgtgagtttttctcttgaatactatccctacagcaggaagttgctaaacagatctattattacctgagttcagggaagcaagcttaacggaagggtctgatgacacaacatcctcctttgtctgcagtataaaagggaaagaaagtcaactttgaactgccttaagctataagttattttgtagttggtaatggctttcctaactgtgaagtaggcaaagatggtattaactatttaaaccattttacagatgtagagcgggatatcagaaaagtaaatgacttttttttcttaaggtcaattattagtagctagtaagttgcagagctgaggctgcgtttcaggatttgacttgcaaacttgtgctttttccctgataccgcccaccatctgaaatgctcttcttcctaccctccctcacctccagtataacttctgtccaggctgagaaaattcaagttcagatgtcagttcttccaggatgttttccttgatttacatcccatcaaatatgtcatgttttgtgattaacttccatcatagtactgatcataattactctgtaatataataacttaattagctttttataggttgtttgctacaggaaggcagaggctgtttcataatatccttagcacctaacagggatcatacctcagaggctcttaaatgtgtgttaaatgaacgagttccttccaaatactaaactgagttatcaaaaaaaaaaaaaaagtttagtattttttaaaaagccactgaaagctgtgatggtaaggattttcttattcttaaagtttggtttttcttaccaattttcgaagtttgttaagattataaacaagctttcctggttgagtaagtctgctctggagtcgtagggccatatcccccttttccctagatctcttgttttttttttttttaccttaacaattttactaacaggagtgtatgcatgcacacacacacccccaaggtgttagaatttgttacctctggtggtattacgcatagtggtttttgctcatctgtgtttttttttctacaattgaatatatattgcttttgtaatgagaaatgtcatttttatctaagcattacctaaaatttcatcgagtgtttacttctagattgtataattattacctaggcttccataggataaatcctaaagattagatatttattgttgcttataagagtgcggatggttctgaaggacatacattgacagcttaaatatgtgcaaatatagttattggcagatagatattcattgagtggaatgagtgaaaactggaaactatccaggacatcagtttaaaagttaagattcagcaatactttagccaataagatagcctgtgagttcactctctgtcgtgtggtgaaaagggatgagagaatgaagctcaatcattttttaagttatcagttacccttgaaagaatgtatatttttaagtagtgaggacaaatgccagaatgctatttaaaaacagcctaggagtggattgagtatgaggtccggaacgaggtgaagcgggttccaggagtgagatgtatttgttttgagagtgaggttttccccttacatactagaaatcagtgctgggggtagggggagagggctggctggggagttggtggggcagcagttgattaacgaagacgtacagatctgaatttgaaaaataataggattgtgtggaagtatgatttctccatattgatgtaaagtcataaaaccactacattttagcatatgtactttttttcctcccttacctccgggggtacaaatttgttaaaagtcagcgacatgtttggctttgaatacgttcaagatttaactaaataccttttttgcagatttctgttgccttatgaaattagtttattcgtaggctatgtagttcagtagtgatttattttaaactaagctgcaagtatgatatttctaaaattaggtttgttttttcgttttcagtaatgatgtagacatggaaacagatcactactccaatggagttggagaaacttcatccaatggtttcctaaatggtagctctaaacatgaccacgaaatggaagattgtgacaccgaaatgggtctgcagtgatatttcttacatttttaataaaaaatgatggctacaaggttatgtttttacttgtactgattcacagctgatgagcataaaccagatttaaagatgtatgtgctgtaggacttgacagtaatgcatagcacttaaactcttgtttgagtgggctgctagagaaagtagagttacctttcagctacaggcagtgtttcttgctgaactgcttaggctcaggtttagcgctgtcactaatgcagcagtactgacttactggtgttgagcctctaggctattttaggttggagatgatagaacttcttatatttatgtcagtatagtcagtaaggccaaatggttagatgattttacaaatttctaatcagtatttcttaaatgagtttaacgtaaacgtgtgtgactttgcatagtactatccctggtatatagtaggtgcttaagtatgacctccctcaccaaaaaaaaaaaccccaccaccaacaaaaaaattatgtggctccaagacacattagcatgcataattttattttgtagacaacttaagtagtaaattgcctgtcccatcagcaaactatcccatcaaatggagagtgaaaatttatttgttggattacattttttcatttatttgttggaattccatggcaatgttagatttcttattattttgagattgagtggtattactaaaattgttttttaaaaagaaatgcagctttgttttactcttcaatatcagccacctcagtttctgaagagtaatttaagtacagtgataaagagcaggagttctagagccagattacatagatttgatttctgcaaaactgccatttactagctgtgtgaccttggaaaaattacttaactgctctgtgtctcagtttcttcatctgtaaaatgggtataataacgacctcataagttattgtgaaagtaaatgaataatccaaaaagctaatagcacaaagtgcttgggaaatattaaccatcatcatcgtcattaccttatttttaatgacttataagtaatttatacagttaaattattttatcaatcaagatatataaaactattttcttagctgggcatggtggctcacgcctgtaatcccagcactttgggaggccgaggtgggcggatcacaaggtcaggagtttgagaccagcctgaccaatatggtgaaaccccatttctactaaaaaatacaaaaattagccaggcatgatggcgcgtgcctgtaatcccagctactcaggaggctgaggcaggagaattgcttgaacctgggaggcagaggttccagtgagctgggatcacaccactgcactccagcttgggtgacagagtgtgagactccatccaaaaaaaaaaaaaattattttttcaaagtggtatttttctaaaagtagtgcatttaatcttttcagttagtataatatgctgtcttctgtatttttattgtagtcatttagcttttcttagctttcaggagcattttattacatctctactacgtcagttaaggcagcctgagtggcattattaacagttttcctttttttttttttttttttaaatgttgcttaatgtagttttagggaattatactttttctaaaatttttttctgacataagtaccctctaacactgaaaggttgtcccctctcaactgcatgctgaatactggatcctagactcttgagagctaaataaagtatatcttttagctgcagtttcatattaaaaatgaatttttaacaatctgcatatttagatgaaatattagggaatagttactaaatgtacaaaatggtataagaaatgtatgttcgtgtcctcattatactccattccataaggtagtaaaatacttgtctgtttttcttacagaagttgattcaagtcagttgagacgccagttgtgtggaggaagtcaggccgccatagaaagaatgatccactttggacgagagctgcaagcaatgagtgaacagctaaggagagactgtggcaagaacactgcaaacaaaaaaatgttgaaggtgaatatattttttcttgaaaaattatgaatatgtcagaggaactaaaatgtagttttgtgaaacactgagcagtgtaccagaaattcttgttagggaactgggacctgaccttccccctggctccttgcccatctgagagtggaaatatttgatgaagttaggcagttctgatctactggaaagagcattggactaaagcaaaaaaaaaaaaaaaaaaaaaaaaaaaaaaaaaaaaaaaaaaaaaaaaaggattaaatcccagtgctagtgcttatcaacattgtgtgtcctcgttaacttagtttcttagttttattttctcagctgtaaaatcagcagttactaggagcaatgtgggcgtgcagataaaactataggtctgagatctcattttagtaaatgttgttcaggtttatagcattttggatgtataacacatggttctcattttgatgggaattagtgaagaattgggtcacttttcatggccagaatagttaaaatacattttaaagtctcttctggattgttgtccatgagctgataggatggatacaatctaattcagtaaagtagccacagttttgtgtaccagttgaaggtggaggggctttctcctaacttaagtcagcattgcagttgtagagatgtacagctctttaacagttggttcattgtaaacattttcttctgaatattttggaagaagactgaaattaaaggggagatgaatgcagtggccttgagactaatgtttgggtatggtaggaaagggcaagcaaaagattcctgccgctgtttcttcctgacctggactgaaagttagtacaggttgagtatccctagtccgaaaatctgaagtgctccaaaatctgatacttaagagtgccgacatgatacacaaggatatgctcattggaacattttggactttaagatgagagatgctcaattagtaatgttttaacatttgaaaaaatctgaaatctgaaacatagcacaagtgtaggacataacatgcttgcctggcctaggatgtgttatagagcacctcaagttaaaggcatgcaatcttgtattttccctagctgagatgggaagtcaggtgtatttatcatactttgaacttcatctactccatagtataaaaactgctgtttctagtggttaccctgagctatcaaaaaagttaaattatttttatgttagataaaaaataattgataattgaaacaagtttaatttaaaaagtcaaatcaggccgggcgcggtggctcacacctgtattcccagcactttgggaggctgaggcgggcggatcatgagttcaagagattgagaccatcctgctaacacggtgaaaccccgtctctactaaaaatacaaaaaagtagctgggcctggtggcgggcgccggtagtcccagctactcaggaggctgaggcaggagaatcacttgaacccaggagttcaggttcagcctgtgcaacatagtgagaccttgcctcttaaaaaaaaaaaaatagaaaaatgagaagagtggcattgctttatatttttttgtaagtctctttaatgcttggtttaataggtgagctgtattcgcatacagaccagactgcctttagtctgttgtggtatcacatgtcttgtgcctctggaaaattccactatatagtcagaggaaatgaaagagaaaagggcaaggaacatcttagtactattatacaaataattttgacttcacagatcccctgaaaggtttttggacccaggtgtccctgaatcatactttgagtactgttgttttagggcatatttggaaataaagaatttttttttttttttaagaattcttaagactttttttacactaggtcatctgacttggttttctttttaaaactttatgctaattgagcaggatgaaatacctttgaaaatttaagattatactccattagcttactttgtgtttgattcttatttacatgaagctcagaagatggcattatatggccaattctcaaagatattccttggttatatactgaattgtgtgaagatgtatcatctttatttaaagagtatagatgtctttgattttgcacctctaacttctaagcaaatgccagctactttcagagactttcttaatactctgagctgcttccatctcatttcccaaacttatcttgatctagatagggataaggtgagcaactgacccaccttatatataagtagccaaagaacaaggccggatgatttgagggcaacatgaagagaaaacaggtttagaaatcattccacttctttttgtcacttcagttcacttgtaattgtagcattttttaaaattgtagcatcgtttttaggtttgcataaactttgagtcatgtgactcagaagttcatgcaaatacacacacacacacacacacacgagagagagagagagagagagagagacagagacatgagagagagagattgagagatttgattaatgttgaaggtcaggtggcacactgtttctcttgacctttttccttttagttttttcaaagtcttctttcctcttttcctgttgtctttgttccttatctgcctacgtcttccagtggctcccaaaagaactcttgaattgtttgttgagcagctgtttattgaatttttgcagtgtggagaggcattgttgtagggactgtggaaagtccagtatgaatgaacagccccagcctgcaaggaccctttagtaactgaagtagcaagagaaccatttagagtcaccctatttagaaactgctccagattctaaaccaaatatgagtacaatttgaaaatcctacctaaatgatgtcacatttccctcagaagttattccactgaggtaatgttttttgctttaaaataacccataatgctacatatttcaggtattttcagttttgtgccttaactcccatgtgcatgtatcttaactagctaataactgtagtgacactattttgtattctgttttgtcataagaatttatttcctcccagtttctatgcattatttccaattatttttaaataactacacgaggctgggtgtggtggcccacatctgtaatcccaacactttgggaggctgaggcaggaggattgcttgagcccagaagctcgaggctgcagtgagctgtgattgcaccactgcactgcagcctgggtgacatagcaagaccctgtctcaaaaaaacaaaaaggctcaatgatattttattgttgctgtataggtttatttcaacattgctctgttgttggatttttccatttgcttttatgtcagatgctttagtgaaatctttatacatgtatctttgtttcttaaattattccactgagataaatttctagaagtagaattgagtcaaagaatatgaacattattgtggctctcactgcatgttgctatactggttttcagaaaccctttaccaacttttaccagcagtaatgaaggaatgtaccaatggcactactacattaatgctactttagcgggtttaacatatgttagtatcttaaaattgcttatttgcatttctttggttatcatcaccagttaacttttacagcaggctttaaaccattagtattgttttgccagtttcattcattttcctttgtgaagaaagaatcaagtcctagatgtttacgactgggagtttgatggtataaaccattttttatttttaaggctctgttagttttgttgcttacagcttcactctacttccaagccatgttttatagtgtttttgtgtgatccttctaaaattaagtctaatccatattggtttccttcatttaaaaccttatttccttattggaaaaacttgaagctttttagtatgttttttggggtattttagctcctaacccctacccatgtttccaaccatgcttttttctcctttctctcagcctgagtttgcatgtattaagtcaatagtaatgtactgtgtgttatttatttacatgtaagccttttcttgaagcagtgactaggtcctggtcatcactgtatcctcaatatctgacagctgtatgttgaactgtactgaaaatgaaataccagagaaaaattttagatgttttttcttcttaacatttagattggtaactaaaagaatctgcatcttactattcactgcctcagtttgcttctctagatgatagacatgataacaactttagatgattattgtaaggattaaatagatgatccatattagtgcctaaaacacttcttcacacaatattagtgcacaatacgttgttgtcattttaaagaactttttctctgagtttttaaacactgcagtgtagtagtatttttttttcctttaagttccagggtacatgtgcaggatgtgcaggtttgttacataggtaaacgtgtgccatggtggtttgctgcactagacagtgtagtcttaatttaagatttgggagtgcgacatttcacattttcggtggtgtgttaggatgtaggctatgaatatagttttgtacttgaagtttttgtttaccaagtattccttggaaaaattgttcagtatttctttttaaatttatctgtactatgggtatggtaccctcatcagatggttgtggggtaaattaagtcttgagcaaagctcagtccttaaaaataacgtgattttttttttttttttttttttttggagatggagtctctctctgtcgtccatgctggagtgcagtggcgtgatcttggctcactgcagcctccgcctactgggttcaagtgattctcctgcctcagcctcccgagtagctgagattagaggcatgcaccaccatgcctgactaatttttgtatttttagtggagatggggtttcaccatgttggctaggttggtcttgaactcctggcctcaaatgatctgcctgcctctgcttcccaaagtgctgggattacaggtgtgagccaccacacccggccaaaaacaaaataatgtgtttgatttgagttagctttacaggataaagggtcatatattctttccatgggttgggaagtgtgggttgggttaggggcgggaagtagaaccaagtagctttgtgggatgcataaaacatcttcattgctggaagaagcaggtcttgctctcaacaggcatatgaattatcttcctgtaccaagcacctgcatagcttcaggggattcaaaatagtatagtaaataatttttatcttcaaagaacttctattgtaattggaggagaaaactacccagaatgaaatactcagcaatataaaacaatggaggagccatgtgtgtttgcgtagaggcacgtgtattccatgccttgtggtctcagactgacttcacagcatttcttcatgggttattcttctttaaatccacaatattagaggcttatttggatgagaaagggcaagagtacagttaatcagaagcctttcccccacctctgctttcataacactagtaagataactagagaaatgatggaaaatgggtgtggaatctggttttttgagcagctgaacctaggagatggtgctctttaggaatttcagtagtcagtattttcaaagtgttgtgttcctgaactcacaaattgacagtttctgcagcaactctccatgtctgccttccaaattggtaagagtgttctgaatttctctatttttatatttgtataatattgctctggattagggtattgacttttggcataataataagacgtcatttattgaaagattagaatgaactgatactgctaatttcatttagtcctcatacaaatctaggaaatagggcctcttatagtccccattatgcagtaatgaaactggcacttagattgtcaattgccaaaggctacacagccagttagtggtggagcttggacttgaagccagtatctgaaaccaccattagtatgtgcctcccatagaaagaagacaaaaaatataaagtagttgtttgaaaagaagacgactgtcagtcattttaagttttgaagaggtgtggcttgagatagttggaaatactgaatgcataaacaggtcctgaagggcagcctgtttaattttttcataactgaatttgagaagatgacatcccagtgagatgtgtccagttcctaaatctgttgaaaaaaggaaatgcagacaggccctgtcctttgactgtcacattcatatcagtagtaataaattgtgaagtaaaacatctgaatgttttgccttccactctccctacaccagtactagttcattcctttgaaatttttttttcctgttttgtgtttagggatgggaggaagttgaatgagaatggctgtccacaggaaaaatgaaaataaattaggctttgctgcataatttaatgttcaaaaatgtagagcgtcccagtgctgggagtaaatgggtttaaagtttacattattagtctgtgcctggaagccatattttacctctcaacttggaaacatttgtgagcataatagttgaactatttgaattaaaaccaaatcgatgtgttttcaacaggatgcattcagtctactagcatattcagatccctggaacagcccagttggaaatcagcttgacccgattcagagagaacctgtgtgctcagctcttaacagtgcaatattaggtaagtaaagccaaataaggcacaatttcagttagattctctgaaaatttaagagagggtgtttgtactggcatttacactttggtaaaatcatcaggaaaatgttttctatatttttaaaatataaaaatacctaaaatatagaaaccccctcctttaattccagattcaagtggatttaaatagaataaaaacagtaagatggggtacaacttgggatgtttgggaaatagaagtttttgtgtgcatgtatgtaagcatttctggtagccacgaatgtctacttctctcattagaatgagagatttggtggtccttgtgtataattcaaaatactaccctaccagagacattccttacagccctctttagtgaaaggcattttctgccactgatttctaggctaggaattgggtggcattctctcgtttggctgctgtagaaggaatcggagaacgttaagaacatagattaataattgtcacaagagttaggctagaagggaacagggtacatttgaagaaaagaggtcaagaaaggttttgatggagagaatgaaaatggaagtaagggagtgaagagcttgaatatcagagaagctcaaactgatccagtagagggcaggattcctagctggtcctcccctgttacctggttcccaaccattttgcttgagctaaatttgcaatgggtagcagcagcctaagccactggtatcacagctcccaccatgcttatgaatatgggcacaaggggcttcctgatgacttgtgagtacccggcaggatcaagccttgatgtcacattctatttgcatttatattagccggattcaactacatgcccttacccaataaaaagggtgggtgaggaagagaaaagcaatttaaaaggcgaggcttagccaggggtgagcatcaagtgcgaaacgctaattcgatgttcgtttggttgccattcctatgagcagctcactgtagcgtttgtgattatagtatttatatactgaacaagtactttttatatgaattgtgtaactgcacatattgtgcatttctatataaatgtgatagggtcgattgtttacataaaacaagtttgagttttgggcagttctcatcaaaggtaatttatataaagagtgagttttcatttgacttcagagtctaattcccaggtaattgggactccagtctagtttagaagtctgtgctgtgctgtttggccctgcaaggttcagggacttttagtcacatatttcaaactagtttaggaagatgagggcagtgccacaaaaagtagattaaagagtagtttagatagggagacttgcaatgagggccaggactcttacagcaagaatgtaaaggaagcaatgaaaagcattcatatttaagactcagtctgtttctttgcccttagaaaatttattaatttgttaaggaccaatactgaagtttgggaataggagtagtgtcctcagtgttgtagttctccggaatttaggatttgtatataaatgtgaattttctttggttaatgtgttatattttcattggttctacaaaattcatttagctccgttggtaaaagtaacttagtaataatgctggaattgtaaggaaaattatggtttactataaatgtctttttgaagttatattgtaggtaatcattaagacctaattattagatgatactaatctttaaagtgaccagttttcttacaatttagtttcttgagttcttcaagggaatttaattgttgagcaccattatctatagacacatatactcttacatattgtgctatattatgtagattcagccataaatagtgcttaatcttattaatataaatgtatgcgattcctgtaaaattaatgacacaattattaaactgctatagatgggcatgtatatgtttataaataccatgctatattatgtaggtccatctatatagtgttatgaaaatttcatacatccaaaaaagttaaagatgcatcgccagatgcttcctttggccaaaataaaattaaaaaaatattccctgtagatgtttgtctttgagcacggtcttccctgtgaaccctcaagacaccacactttctcatcaatctatgtgcccttttttgcacacgtttattcttaatcctgtttttgttttctcttctacctttaagtcctgaatttgcttctttctgatattgtgctttttcccttttggaaatttcctcttctttcttccaccatcaaattgcatcctctgaaccaagagtggagttaaaccatatgaagccttcctagccatgtgtcaactgtttttgccctttgttgtcaactgtgcctataaagaactgattagtaattttattgattagtttggacattgccttctcataaagagaaattaccagcttctgagtctggccacttttaccattagttcatttttttccatctctggcaaggaacaaattttgttaattattgcatttgtactacaaatgtctgacaaagaaacttatgatatgcaggaccctgaaaatttattggcatttttttaaatgtctgaactgtccactgtaaattagcacctccaaaactgtggggtggctctgctgtatgttctctcactgtcaccaccaccacttactccccaccagcccaaataacattacctatatatgccttggagatggctaggcagcctgtttggtcctatccacagaggtggaagaacccatcagtggaaacttgtaatgaaaacctggtgccttttttagttttagttagtatcaactgactttgatcaaccagaagggaaataattccttactctccactccaaatatcagataaaaaattgtacctttcccatcatagttaatatggaagtattttagtatctgatactttaaaagtctgattctgccagagtttatcttatagttgaatacacaatacccacactaccttgtcagaatagtatgtccaaggcggcatctgtcttttgcttagaaaccttcatttgctgatatttcagagtggtatgggagtggtagtttttaaagtcattgcagtattctcctgattgaaatgttttttaaaatgtcttgctaattgctgttctcatttttaaattatttttcctcagaaacccacaatctgccaaagcaacctccacttgccctagcaatgggacaggccacacaatgtctaggactgatggctcgatcaggaattggatcctgcgcatttgccacagtggaagactacctacattagctatgcatttcaagagctcacacttatattgtggcatatagtcaacatggaagtagaccagctctgctgatttgaaatttagattttttaaattatgtactggggacaggtttttgtcgctttacattgcttcctagtttacagcatgatgcaaatgattttctaacttagtgttaggagaaattattttccatctttaacctcttagttgtctaagagttaaatattactgaatttcagacgttcaaattgatcatcacaaatcctttaaaacaattacctaaaagaaaccaaaaatcctgccttctttgtgggggaggggggagagaggggaaggaaatggaacaagttgtgtttgtgttagcatgtgggtgatgtaaacttcaaattgggagatgttccgacccccactcccatataagcattcaatcagtgtaacttgcaaaatgcataaacatccgacagtttgaatttatagtgttgatggaagaaatcatttttaatgtgtactgtaaaacttgaaatactcaggagctgagtgaatatgtttgttgctacttacaatcccgacctgttagtcccagtagttttgttttaacatggtctttttcaactttgtttcctgtttaactacagatgacttctgttgtagactcacaagtttaactgttgtattataacagtattacatgtcaacggtgtggttatgacctttatttatataaaaaccaaatatttagtcaatttaccgtgtcttaatttaatctttgtacaccttccatttttaagtgcttaaatgagtactatattgcaataaaatgtagtgatataattaaccagccattaaaaatttacttctacaga

SEQ ID NO: 271 - DNA, 32764 bp, Homo sapiens
  source 1..32764: mol_type = genomic DNA; note = NC_000001.11:c155979617-155946854 ARHGEF2 [organism=Homo sapiens] [GeneID=9181] [chromosome=1]
agaatcaggcaggaccctgctaaccgaaggctctgtcccaggcctctctgtgcttctggtttctccagagaaatgggagaccctgagaggcagaaatgaacttcactgtaagtgatcatagttagactggaggaggaattttcccaatagcaggaaactcacccaaaggctggctcaggctggggaaaagggtccagagagatgaatgccccaccttaccctgcttcttggggagaggctggttgggccctaactttctttgactagggcaggctggtttctggtctttcagttccggcttaacttgcaacagagagaactgcagttagacacatggaaggccttcggtaaaagtggagaatcccaacctagtcccccaaagtagctggcagaggcggagctaggaggagggcagagtggggtcaggaaggccccagaagggtggggcatgtgggagaattctctcctctctgttcttcgacctctgggagtgaatcctacccttcccgtgtactgaagatccagcgtttagttctcctttgatttcctctccctctggccacccctgcccccaatcgtaaaaggggtcagtctgctcaggcctgctttgatgggaccccgaaggccaggaaggaactggtcctgggttttctaagagctgggggcggatggaattctcctgcctgcgggtctttaaagactgaggtaacgcagtaggggagggaaaaagggagggcgaggggagaagggaagaaggggagggcagaggggaaagggccaacctgggtccggcgagggctgcggggctgggttttaggaaaagaagagctaagaggcgggtctctggggctagagggcgcccccaggcgctggaggggaaataggcagaggggcctctcaaacctgtcctaggaccctcgtacctctccgagctgcccccacacaaaccctggcgtcccgtcctgcgcgcgggcaccccgccctccctccgctccgcctacccccttcctgagcttgggcgggggaggagactcgggtttgaggaactggtgctgggtgccgggcgaggggagtcagacttcctgtccccgagaccaacgcgtgcgggccgaacccctccccccgccttcccccaacaatacaggacgccggggtccgcgccgcgtcctccctggtccccccgtccgattatgtctcggatcgaatccctcacgcgggcgcggatcgaccggagcagagagctggcgagcaaggtgggctcggaaacccctctcctttcgccgcggtcctcgggtgctccccgaaccccggcacccgcggtgcatctcctgtctccccgcctgctttctgggcgccaaaatcgggcggagcggtggatcggcgagcggcgggacggggtgggtggggactgcgagcgagtgggtaggggtggggggagcggcagacgcgacggtgctgggatcccgggagggagcggagcggacctgggcttggtcgcctccaagccggcgggaccgagtgctttaggccgcttgaaagaaagttgctccggtaagggacggagcgggaagagggaggtgtgtgtctcgcgggtgggggcggtggaagctccggcacctcctctcaccccgggccccaccggcttgggcttggcgtggcgaccccccatcactccccaatcgctggcttggtcgttccccctttgtccccgccatccggcggaggggacgggagggggtggtttcccggcttcctcccaccaccaccaccacccctccaagacaaaagtcagctcctcctctcctcgcaaatggactttccagctgtgattcagttctcccctctgggtgggcgggtggctggggtcgggacggccgagggacggcttacttcccccaaaccatcacctctaggtgaagggagcagaggtctttgtgtagctgggctcctttcctccatcctgagcccttctgcctggaacatagggcctccatccctatctgccccgccagcctcctagctcttccttctcccaacctgaaacccttaggctgacacacctggcactatgcattgtgttccctgcccttcctcctcctcccccagcgctctcattctcttatctgctcgtcttggggtcccttcacctagcatttcatgagtctgggtgtataattatccacacgcctcccccatcatgacctcttggccactcctctccaagtaccctttatccctgcctttgtacccagccccattcccaagtgccctgacctttccacacccagaccccaggaaatgatgaagctgacttgcaggtgaataagtcagagctgaaaggaaggtggtgcctgcagacagcacctcccagctcctttggggcccccgcactgtacccattatcagaaaggacaggtcccagcccagagttggtttaatctctggcttctctccaacctgagtgccctactaccctggtgccagcctatgctgatcaccaacttcagccaagggagcagtaccccttaggagtccttaagggtgatggaaagccctcccctccacctccctggtagttcctagccaggctacctgtcttgatgctaaactgggagagacagaggttccatcctgggttgggggtggagggccagggaaagcagctttaaaaggactttccttagggggttgggattagattttgctatctggaaagcaactggggattcgagtagggcctaagacaaacagagggccggggtgaggtggctgaagtgtggtggaacagtggggtggcagacaggctcttcacagcctgcgccagcccaggccccagctccaaaagtctgtttattttttcaaccgtttgagctgagaccctggagtagagccaaggggggcgggggaggttttttgaaaccgcagaaatttggttccaccctaaaaaggaaagccatgggggagctggttgggggaagacctggctagggggtatagagagcggttctgtgggggcaggtagctactgggatcccttttccattattgtggggagctgggacgtcagacatctgggtgttcatgctctgtttttgtttttgtttttggtggtggggggactggctcttctttctactatgggggctggctgtgtggggcaggtaatttgggaatctggctggcagcagggagtcgggggctgagtgggtggatctgagagggcaaagaggccaccggagaagggtggttgtcagtttgggccggtcggaaggggagggccacctccggaaaactgtggttacagaagggggagttggttcttagccaacaaaccctggatcccctctccccctccccccagcacaccagctgtctcctttctttttatactgtggtgggaagtagaggggcacccgctggaaaagacattatttgaagaagatggtgtcccctgctacctccttggggggatgggtcacagctaagccctgacacctcagcccctccccattccttgcctcattccctgggagctcctcctaggaggaggaatgtaagtttaacctgcccctttctctgtcccatcctcacaggatctctctgtgtagccccctccatgcttcctttttcttttcactccatttctgttctcccaggctgtcttcagtcctccacctcctctgttctctctgctctacttcctacctccacaagccccaaacctcacaggtcccctttctctctttagtcccctgttcttccctttctcctttcccaaaccccaaccatcatatcccttagaacaaagggtccttttctgccaagcagggaccagaggtccagggatggctgtggaggctgggggtccccttggaatctctgtggtgggcaggtggagtggggagtgtgcagagcgactatttctttgttctgaggaatggagaggtggctggctttgtgtgcaggactaggagtgcagtggagaggagagctgggggagcccaggagggagctgagagggctgacggtgttggaggagagtggaagaatggggggtcctcctggtggctgaggcttctggggacatagacaaaaattctaggggtcgtggaggttagggagagagttgagggggaggggagaagtgaggataggggaagggagtctaaagcttagggaagtcactgagtgacttgcaggaggttagatggggcctagagaaggacctactgaggccgaccagaggagttacagtggggtctgatcttagccactctggctgtggaatttgaccttggaatcaaggaggggacagatgtgaatgtgtgcatcccctgtgtgcatgttactggtgtgctggtgtgtcagtgtgtctgtctgcctgcctgccctcctattctgtacccagatgctctgggctactgttttgaacagtggtcagcaaagtagggggttcgtgctctctggccacgaggaagtagcttcatccttagcttcagtttctggttggaaatatcatctaggagctgagtgagcggattggttaggatttctgaagctggtaagagaaaaggctgagaggagctggctggacccttccgggtttgtttatgtctctttgggagagggtgggggtggggttgcaggcagcagctgcccccctcccaacccagccggcctgccttgtgccaggagggcagggagtcctggcacagctattgttcacttgcacaaatgcctgtctgtttgcatcgcttaccccccctctctttctgcttgtctctctctcctggcctgacaggtgtggccgcgtagggggcaggctgggttccaggatgcttgggtctcagggtccctaacctgatttattccttgtggcccttagcaatcctcttccgtttcacccgtacccactcccattgccagtgtctcatcttcattcactaagcaagcatttattaagtgcctttgtgtgtgcagtgatgtctttctgtgttgtttctggctttggcattagtgtttccacttggctgccttcccctctgcctcctgtcttcatcttgtccctggaagctcataaaggagcagggcccggctgagaccaccccaagccctcttctcagtcccacccccagcaatccctcacctcttcatttcccagccctatagctcctcctccaggactcagtgcccttcatagccaacggcgcctctgctgtacaggggctgagccacaggtgactcgaatcctggtggaatgctccacaggctctccggtcactattacagagggtgtggacagaggtgtcaccatcttggggaaggggctgctgccaggtacagctggaggagaggtgattctgagtactctgtgactctcccagaagtcttgatttggacatacctgagagagaagcaaaggcagctgagagagctgggcacagtggctcgcacctgtaatcctagcattttggaagaccaaggcagctggatcgcatgagctcaggaatttgagacaagcctgggcaacatagtgagacctcatctctacaaaaacattaagtttttaaaatctattattaaaaaaaaaaaagtcagatgagagcttagggcttgcttggagaagctctacctcgcctgggtggatctgcctggccttgctgcctgctgggagcccaggaagccaaagtcctagccttggcattgccttcccctccatgtacgtcactgtttcctcatcccttattctgggagacaaagtggagagaagaggggagactgtgtttgcctttgagcttttcagtagagatccacaatgccctctgccattgctcccatctttctttcttttttcttttctttttttttttttgagacagagtctcgctctgtcacccaggctggagtgcagtggcatgatcttggctcactgcaacctccacctcctgcgttcaagcaattctcctgcctcagcctcctgagtagttgggattacaggtgcccaccaccatacccggccaatttttgtatttttagtagagatggggttttgccatgttggccaggctggtctcaaactcctgatctcaagtgatctgcccgcctcggcctctcaaagtgttaggattataggcatgagccactgcgctcggcctggccctgtctttctttcccaaaagtgactgagatctgggatgacagtggaaggaagtttggggttggtcttctgacttccagaggaaaccctcagggtctaaactcaaaggaaataggagagaatggcttagagcccttcaggaggagggagaaaagagaaacaagaagagacagaaggttctaaagctctgataaggaaggaagagggtttccagaataggggccagggtgctactgagaccccatgtcttggtgtccatacatccttccttgcttctttgcttccttccttttctttcattttgagacatgtattgggtgcctattgtataccaggtattgtgctaagggctttcatattctttatttatccttgatgtagcagtagtgtggatgaaggtgtgtagcaagaagaacttcccatgggatttgtgagaaagagacagaatgactctaggtctgagcgtggtggctcacacctataattctagcactttggggaggctggggcaggaggatcacttgatcctaggagttcgagaccagcctgggcaacatagcaagacgctgtctctacaaaaaaaatttaaaaattaggtgagcatcatgatgcatgcctgtggtcccagctatttggagggctgaggtggaaggatcacttgagcccgggaggtcaaggctgcggtgagccatgatcatgccaatgtactccagtccaggcaacagagtgagaccctgtctcaaaaaaaaaaagaaaaaaaaaagtatctagatgctggagagcaaaggactgaaccaagcaggaagggcctctgagcactggggtgggtgttatggattgtggagtaatgggccctttttcttggtgcataggttgggtcttggaggtaaagggctgtcctacttgggcgtgggtaaatgggagaccaatgtgattatcttaagaatacctggaaaagagtaggacaaagaaccaaacaagcccactcactccacctctggagcaggcacccctggtaagcaggccctatgtccttccatcctcagaagcctgagccctggggcgggcacaggcaacctccgggacaatagcactaggcagtgccagggtcgcttgctgctgggcagtgcccatgctgggatgtgctgctgctgtggctgctgcccgctgctggcccacctagagcaggggtcacttcgagagagggtgagtgttgggaggtggaggaggcagggcccagagtaccagggctgtctgtggagcattgatgccagagagaggaagggccactagagaccctgttctctggctgccccagtcttctccctccctttgccactccatctgagctggtcagacagatgagtgtttgtggatgccacagggggagggtggagggcaaaggacagaggtcaggtgtggaagagagtactcgtagcagcactggggcagagctgcagcactgcccattctggagtgaccctggtccagccatgttgttttttttaatactattttcagcttgcttgcttttacttatgtgtgtatatatatatatgtatatattttttttttttatagagatgggtctcgctgtgttgctcaggttgttctcaaactcctggcctcaagcgatcctcccacctcagccccgcaaagtgctgggattacaggtgtgagccacctcaccggcctcttgcttttaattcaaatgtaatacatgctcaaacttttggtttgagttatatagaaggctgggagggcaggagaggaggagaaaagggagagtatatggcagtgggaagagatttttggacttggtgtttgaggtcctgtgaggttattattcaaaggtgaatttgaacttctttttttttttttgagacatagtctcactctgtggcccaggctggagtgcagtggcccaatctcaacccaccacaacctccaacctccccggttcaagcaattctcctgcctcagcctcccaagtagctgggattacaggtgcctgccactacgcccagctaattttttgtatttttagtagagatggggtttcaccatgttggtcaggctggtctcgaactcctgacctcaggtaatccacccgcctcgacctcccaaagtgctgggattgcaggtgtgagccactgcacccagcctgaatttgaacttctaaagaggtataatttggtgcaagataggtggaggttagaccaaagggagcattttctagtggtccgggtaggtaggtgccagaatagaaaaaaggaggccagaacattttagaggtttgagttagaggctagaggcagctcagcttcctgaataagcctaggtagaggagcagttggcctgcgtgaggaggaggggaggagaggctgtgggcgggagaggagaacagtggcggagaagcaaggctgagaaagggaaggcagagcgggaggagcctaggagggagaccctgagaagagaagggaggacatagagagagcaggagacaggaggaggatgcgaaaaatggatgattggggatggggaggatgcatgaggggagaagggattgaccccaagacctctgggctctggacatcatcaggcaaacctggagcttgggaagagaggcaggaaagagaaggatcttgggcccaggcactgcagccccatgccctctgtccctgcactgttgactcagcccctccacacttcccctttctttctaccattttctgccccaagcaccaggcccgtgcatctcttcccctcctccacctctcagctgctggcgtggcctcgtggcctcggctgagtcagtactggtctcctagagtccgggctgagtgcttcccgctgaactgtaatcctctgtccccagtccaggtcctctgacttggggcttctaccctcagccatctggatcctgatttttgatttctgagagcctgggaaaccttggagggagtggtcttctcagcttctagtcctgctccaagagcggagggaaaatccagagatcagagtcacaactaaggaaggtcctagaatagtgggaagagtgatatccccctcttctcaccttctcaggctttttgggaatcacaggggcttgaagagggacagattggaggtcagggagaatgacttgacttgcagaggcaggggcactgggggaaatgggagacagcagagatggaaaatgcggctcagaggctccgaggaaggtgtgcgccatctgcggagatcaacactgaaggatggagggtagatgtcagaaaggacttcctaggatgggagagaccagttgggtaaggagcaatagaggaaactctcctaggttttaactctggaaagtagtatgagagggataaaagttagactgcaggagagattttccgctggaagcaaccaagatggctggctgagcttccttacttaaagatcccagagtggaagagtgacccaaaggcagctagctgcctttgcctcaaggttagtaggggacatgctgcctcccagacaggccctgtgtgccgtggctgagggttggtgaaaagagttagaggtctgggatcctgacccctgggttgggggtggcaggggaggcattctgcccccttcagccaatctaataaggggatctcctgccccccccactgtgactgccacagagacagcagatccaacactggttgtcatggttataagaggagctaactcccatagattggaaagcgctggtgagctggcaccctccgcttcgcctgctctcccctcctctctgcgcatcttccccctagcacagagaagagagtacagcagctcgggggtgagcagagctagggctgggaaggtggagtgaggacgcagagacctagagccagggagatgagtggcaacaggaggcagcccagccgtaggggccaggtaggtcagggacccagaacccatccgggctggctgccccagagcctggcctggtcactcccggacagctgcctctgacacccagttgcaggctctgctttaggaactggtgtctttccagcatcctcaggctggcattttttccttgcctctgcccccagcctgtctctctggactccaggcaccctggcattttccagcctcacttcctctccctctcatcccttccacagacccgggaaaaggagaagatgaaggaagccaaggatgcccgctataccaatgggcacctcttcaccaccatttcagtttcaggcatgaccatgtgctatgcctgtaacaagagcatcacagccaaggaagccctcatctgcccaagtaagttgtttggaccctgagagtcacccagactcggtgcccactgaccctgatcttttcatctgttttttctgcctggatccatgagggtcactcttctctctgatccccagctgggcccaaatgccagggccagttgcttgatcccttgctccctgtcctcactctgaggggtggtggctgttggaatatggcataagccggactatctgggaatgtgggggaggggaggctgtgctggctcctcttgcagctgtcatccaccaggcaccccccttgctccccgaacagctgctaagggttaggggaactgattggagaaggagcaggaatgttgtatgtgtggagggggtggggtggggggtgacagaggaactgggtggaaagctgccagccttgcagctggctctgcctgtcttcctgcgcagagctgggcattcaggacttcacagtccccttgcccctttctttctattgactatgggtggagcctgaaatctctgctgtttcaagcagaagatgtgattaggacccttcatctcaaatttctagtgagaaagagggaatgtagcagggatgtgtgtgttgaggggcaggggttagaattcctgcccttcatccacatctgagtgtagtcctgtctttagggagtataagccaggaattctttccttccccagtacacagagggctcctgctgccccctctccctcaattcctcctgaagttatggcagagatgcctctgattagagcaggattgaaggtattgtgacctgctactgaatagcggacaaaagctctagcctgtaaatccctatgaaacttggggaaggaacccccagaaaggaccagtgatgggcaacccgctcgggtccccttctacgctgtgggagctttgtcattttgctcttcacaataaagcttgctaccgctcaaaaaaaaaaaaaaaaagaaagaaaagaaaaccagtgaagcctccctactttcctcactgttcaatttagagttgtgaggatgaggagggaaccccaatctagatccctatagagacctgacaaaattcccaatccggaagcttgttgccaggggaacaggggaggcgggcagcactattttgagagcaggtggaaagcggaggttcaatccagagacactgagtgttgggggtaggagaagggagctccaggggggtgggggcagctgcaacccccacttctgtctgccccctctgctccaccctgtttgccttgtatttgtggaagtgagcgtggtgctgggtattgtctgaaagagttagcagagtttccggtgttgttggatgggggaggggaagctggagagggccgggagctgagggcatgtctgggaagggcacggccagggtcccagtgcctaggctcagcgaatcctcctttcttcttctctcctaccccatggcaaggtggggtggaggatggcggagaagcagatggagtgtgggagctgtggatttgcctgagttgggggaacaggactccctgggcctggaagggagaaggccaggcttggtggggagttgcctgtcccttctttaccactggagccatcaatcagccttggagctgctgaggcccagccagagtccagggcatgtggtgcgagggaaggagcacggcctttggattcaggcccaccggagtgtaaacaccacctctcccactagccgtgtgacctctgatggacgatttagccactccaggacaggttcctcatacatgaaatgaggataactgaacctccctctacgggtggttaggattaagtaaatgtggaacatttactattataaaagctcagggaatgtaaatttcccctctgcccctagcccccattctggctgcctctgtgccatcttctgttctgtgggagtcctctcttccatctgccattcgcaaccaccttcgtgcttcttgagctcatctctggcagccagtgacccctgctcccctctggtccgcccttcaggccaccttggggtcaggattgcccatcccacttgattgtttaatttcattcagcacctatacccccctcacttcatttcctgcttgaaggaagagggaggtgggaggagagggactggggtgtggtaatggcccagaagtcggggaaggggggagagtccccgaggactgtgtggccaggaggagatgggtgtctgcatgtgggtgtgtcccctcctgtaccacccggccctcccttcaccctctctaccccaccctcccagcctgcaatgtgactatccacaaccgctgtaaagacaccctcgccaactgtaccaaggtcaagcagaaggtgagacggcagggagggcagagggctgggggagagggtagtgagtgtgcggtaccctcatgccttttccattcattccctaccctgtgtttctcaccacccacctcctcaccaaggggcagcccagaccctcaaccccaggcctcgggccccaagtaggccaggcctgttgctgcagacatgtccccacagcactgggctcaatcaccctgatccccttaaccatagtgccagctttctcctaagggggccggccacctagctcctgtcccatgcctctgggggtgatccttgggtgacagccattcttggtatctctctcctgctctctgtctcacagcaacagaaagcggccctgctgaagaacaacaccgccttgcagtccgtttctcttcgaagtaagagtgagtagttggggagtggaggaggtcccctaagaccctggaccccaggctgctcaacccatgggctctgctgccccactaaggttgttcccaggcatagcaccttcctcttcttgattggaagcagatagtgggggcctaagggagggttcggactcttggacttagaggcagaaggggagagagagtccgaatggggatgagggctggggatgggtggtcgcctgagcctggccgcagcctgcatttttatcagttatttacactgcatttcgggagtgttggtagcagctgtcaagtgtcaattcagacagctttggtgtaacagaaagagcatggcccttaggtataaagagcagagcctcagtccctgcctagccattacccaagtcaccctggacaagtctttttgtctttctgagctcctgtttgtttataggcttatgtcagggaggagataagtaagaaaaagctctttgtgaacattagagtatggcacaaatgtaaggtggcattctcattaccatctttcttgactagaggggctgaggtggagtgagaggatgcctcattcctcattgaggagcctaggaggcctcaatcctgggaagcaccagagtctgatgtttgcctgctgggcatctctcccccacagcaaccatccgggagcggccaagctcggccatctacccctccgacagcttccggcagtccctcctgggctcccgccgtggccgctcctccttgtctttagccaagagtgtttctaccaccaacattgctgggtgagcctctgtttggggaaaggggcagccagagagtgtggcagtggaggccaagggggtgctgagaggtccctttccatccctgagttcagaactgtagacagacaaataaggagaacttagggggaccgcctcttggatcctggctttggttccctacctgggaagggatcttttgcccgactgggggtgatgcagacagcctccactttcttcagacatttcaatgatgagtctcccctggggctgcgccggatcctctcacagtccacagactccctcaacatgcggaaccgaaccctatccgtggaatccctcattgacgaaggtgagcaggcctgggcccaggggagccctgaggaacatgaagaggggctgggggatgagaggctggtgggagtagcctggaaggacaaggagggaagggatctagagaagggccagggacccagggaagggaactcaagacctctgagttgcttgccctgctaatgtccagcagaggtaatctacagtgagctgatgagtgactttgagatggatgagaaggactttgcagctgactcttggagtcttgctgtggacagcagcttcctgcagcagcataaaaaggaggtgatgaagcagcaagatgtcatctatggtaagccaagaccaccctagtcttcctcttccttcaccaggtcctgtttatctacttccttctttatttttctttttctttttttttttttttttgagatggagtctcactctctcaaccaggctgaagtgcagtggcatgatctcggctcactgcagcctccacctcccaggttcaagcgattctcattacaggcgcctgccaccatgctggctaagttttgcatttttagtagagacggggtttcaccatgttagccaggctggtttcaaactcctgacctcaggtgatctgcccgcctcagcctcccaaagtgctgggattacaggcgtgagccaccgtacccggctgtgtccttctttctaccagcccctacctctcaaaaccctttccctcttggcctacaagaccctgcctggtatcccacaggttgcccactaggtccctacctcttgatgctgttggtctccaacaccctctctttatcccttctttatctctgtcttcagtctttactctgtgcttgttccacgcttaacaccgtgctggagactgtgggaagcctcgacatgtagaagacatatggttcttaccctaaaatagctcacagcttgagatgataaggtgtaaagataaaaaatggaactgggcgtggtggctcatgcctataatctcagcgatttgggaggccgaggtgggaggatcacttgacgccaggattttgagaccaacctaggcaacaaagcaagacctctgtctctaaaaaaaaaatatatatatatatatatgtatatatatatatatatatatatatatatattttttttttttttttttttttttgaagcagagtcttgctctgtcgcccatgctggagtgcactggcgctatctcggctcactgcaacctccgcctcccaggttcaagcaattctcctgcctcagcctcccaagtagctgggattacaggcgcctacaactacacccggctaatttttgcatttttagtagagacagggtttcatcatgttggccaagctggtctcgaacacctgacctcaggtgatgcacccgcctcggcctcccaaagtgctgggattataggcgtgagccaccgtgcccagccgtctttaaaaaatattttaaaaaactagtcaggtgtggtggcatgtgcctatagtcccagctacttgggaggctgagacaggaggatcgcttgagcccagaagttcgaggctgcagtgagttatcattgtgccactacactccagcctgggcaccagagtaagacctcatttctggaaaaaaaaaaataataataaaatttttgaaagataaaaatgagggccgggtgtggtggctcatgcctgtaatcccagcactttgggaggccgaggtggggagatcacgaggtcaggatttcgagaccagcctgaccaatatgaagaaaccccatctctactaaaaatacaaaaattagccgggcctggtggtgcgtgcctgtaatcccagctactcaggaggctgaggcaggacaactgctcgaacctaggaggtggaggttgcagtgagctgagatcgcgccattgcactccagcctgggcaatacagtgagactctgtctcaaaaaaaaaaaaaaaaaaagataaaaatgattagaaaagtatctaagatcataataatgcagaatattaacctggaatggaccttgaaaacctcacgtgaactgtgaggtccttatcctagggccccacgagttttagccaagccagggtagaggccaaatgtcccaatgtcccccacagagctaatccagacagagctgcaccatgtgaggacactgaagatcatgacccgcctcttccgcacggggatgctggaagagctacacttggagccaggagtggtccagggcctgttcccctgcgtggacgagctcagtgacatccatacacgcttcctcagccagctattagaacgccgacgccaggccctgtgccctggcagcacccggaactttgtcatccatcgcttgggtgatctgctcatcagccaggtgggaaaaggcaggacccctgggtgacattcatggaaggaggtgtgactgggttgggcatttcttgggtccaaattctaggggttggaggggagccagggagagctggagaaacaggaagccagcctgtttggcaggaggccagaggtgtgtccagtgggtaaagtgtggctttgggggaatgctgacctaaccttactcgaccaacttctagttctcaggtcctagtgcggagcagatgtgtaagacctactcggagttctgcagccgccacagcaaggccttaaagctctataaggagctgtacgcccgagacaaacgcttccagcaattcatccgggtgagcggacctctccagatcccatgctcatggcccaaacccaccctccccaactcatgggggtagtgcctgtgagctgcacccacatggaggtcaggcattcgccacccgtgcagaccatccatacacagatcctgtcagcagtaacccctcagaatgctagagcacgttgtggtagtttcccaagtactttttgctccttcagttggtcctcacaacaaacctgtggcgttgttatccccattttccagatatgtcacctaggcaagcatgaggtaaatggccacgccagggccagcaccagagctcaggccccaggcctttctgttgccctcccctctggccctgagccctgcctcctcccttgtagaaagtgacccgccccgccgtgctcaagcggcacggggtacaggagtgcatcctgctggtgactcagcgcatcaccaagtacccgttactcatcagccgcatcctgcagcattcccacggtgagtaggcaggcccaggagagggccactgggagacggccacctggggtgaggaaaggctcggtatgaccacaggaagggtggggtcgggtgtgaaaccctgggcagcctctaaaggtggaatcaagacacgatgggaactggggtgtgagtgaaactggttgagccgttccccatgccaacccccggtgccagggatcgaggaggagcgccaggacctgaccacagcactggggctagtgaaggagctgctgtccaatgtggacgagggtatttatcagctggagaaaggggcccgtctgcaggagatctacaaccgcatggaccctcgggcccaaaccccagtgcctggcaagggcccctttggccgagaggaacttctgaggcgcaaactcatccacgatggctgcctgctctggaagacagcgacggggcgcttcaaaggtcagacctgctcggcagactaggcaggaattcaaagtcagatggagagtgggagatgcctgcaggtcttagaatcaacctctcttggccgggtgcagtggctcaacgcctgtaatcccagcacttagggaggccgaggcgggcggatcacgaggtcaggagattgagaccatcctggctaacacagtgaaaccctgtctctactgaaaatacaaaaaattcgccgggcgtggtggtgggcgcctatagtcccagctactcaggaggctgaggcaggagaatggcgtgaacccaggaggcggagcttgcagtgagcccagattgcaccactgcactctagcctgggtgacacagcaagactccatctcaaaaaaaaaaaaaaaaaagaatcaacctccctttatgcagcccatacaacagtgagactcagtgggagagaaaaataggatctctgtggcagaaaagcctgaattctgcagttaactttatggaccatacagggccttccctatcagtattttataatttctttggtccttgcatgcctagagagctactagttttactgaggaagacaaagaagctctcagactggaggacaggatcagttgattcccccagctggaatcccagctaccagggatgggagtaagcaagagctttggggagcgcagccagaggaggcccagaggaggggactgagccggtgaaggacaggcagggaggagaagagacagcagggcagagggagcagatcaggggccagggcacactttcccaggctctctttccagaatttgtctgcactggcaaagtctttctcacctaaatcaaagcaagagaatagcaggccttggctttggggatgagatgtgagggacaataggaaactgtgatacctgaggccaaagcctgcctgagcctctgtacctgtgtcatgaaatccctgctccctgggtttggatattgtcagtcttcaccagcctctttcctttatccctttctctccttcccatctctcccacgcagcagctaagaatataaaccatgggggattaaaaatagcaaggctggagagtgttatttctgaagcatttagcaaaagccctccccttctgtgtgcccacagtttagtaaaatccccaagggcaaaggaggagtgtatgttttctctctctttttttttttttttagaaacagggtctcgctttgctgctcaggctggggtgcagtggtgcagtcatagctcactgtaactcaaactcctgggctcaagtgatccttctgccttagactcctgagtaactgggactacagacctgcaccaccacacccagcacatttttaaattttttgtagagataagatcttgctatgttgcctaggctagtcttgctcagactcctggcctcaagtgattctcctgcctcagcctcccaaagtgctgggattgtaaatgtgagccactatgcctcgccctctgttttcttgattgtgacatccaagttttatggaattgatctttgtttcctccctcagtcttggagtgctgaccccataggatctgagagcttggagtgtgaagcagagaaagaaattgaagcaggggcctgctggggttgaaggagatgggtgggtgagggatggtctttcagtcctctgcgagaggaaggaaactttctccctccctaccaagctcaaaattagaagtgggaatatgccaggacagggagaatttaggtcagatagccgtaaaggtcttccttagttagatattagaaatggaatttaaaggctaaaaaatgtggtccaggctgggcacggtggctcatccctataatctcagcactttgggaggctgaatcaggcaggcagatcgcctgaggtccggaattcgagaccagcctggccaagatggtgaaaccccatctctactaaaaatacaaaaattagccaggcatggcagcattcacctgtagccacagctacttgggaggctgaggcatgagaatcgcttgaactcaggaggcagaggtcacagtgagcagagatcacaccactgccctccagccagggcgacagagcgatacttggtcccaaaaaataaaaaataggccaggcgcagtggctgatgcctgtaatcccagcacttcggcaggccaaggcaggcagattacttgaggtcaggagttagagaccagcctggccaacgtggtgaaaccccgtctctacaaaaatgcaaaaaattagccaggtgttgtggcgtgctccttaatcccagctgctcaggaggctgaggcaggagaatcgctttttcctgggagacagaagttgcagtgagccaagatggcaccactgcactccagcctaggcgacagagtgagactccgtctcaaaaaaataataatagaatcaaattaaattaaaaataaataaaaaataaaagtatggtccctcttgctctggggaaccttatgaatctcacaaaaatcttggaccctgtcacccaaaaaaatacacgagttatgttaatatgtaaaactatttacacaccttcagaaggtttacagagccactgaagcctgacatcccagggggtctgtaggccctaggttaagaaacctgaatcagtcaggtagaaagggttttctgtagacactgagtgatccctgtggttcctgctagcccacaacgctgttttgtctgatagcacatgaatctttctgcaccctgcccgccccccaccccccacccacactgtttttaagctgtaagaatgtgtgaccaggcgcggtggctcatatctgtaatcccagcactttgggaggccgaaactggtggataaacctgaggtcaggagtttgagaccagcctgaccaacatggtgaaaccccgtctctactaaaaatacaaaattagccgggcatggtggcacacgcctgtagtagtcccagctccttgggaggctgaggtaggagaatcgcttgaacccgggaggcggaggttgcagtgagccaagattgcaccattgcactccagcctgaacaacaagatgaaaactctgtatcaaaaaaaaaaaaaaaaaatagaatgggtgaggtgtgagaggtctgaaaaagtgcaagcagccagagggaagagaggccaggaagagggaaactgggagctctaacctgatgggataagcctggtccttgggaaagagggaagcagctgctcagaccgtctagtgctgactgttctcccaccttcatccccttccagatgtgctagtgctgctgatgacagatgtactggtgtttctccaggaaaaggaccagaagtacatctttcctaccctggtgagacattcattcttcacctttctcagcacagacaagtgttttagtctcttcttgctttcctgcccaagcccacgagagctctggagtcccccagagtcaaacagctataattgttactattaccgtaataataaaaaataagagcagctcacaggtactgttactgtgcacaggcacttttacacctgtgggaaaagattattttcgtcctcattttatagatgatgaaagtaaagcttcaagtcagttaaataatttgtcaagggttgcacacatttctaagtcccttctggctggcaccagtgcctggctcttaactggtattgtaagatgactcttcagtcctttcagtcctcgtccagaaggattgaaggcctaaatatgccaagggacaggattcccaggcttaatccttcctttcccctgactggcaggacaagccttcagtggtatcgctgcagaatctaatcgtacgagacattgccaaccaggagaaagggatgtttctgatcagcgcagccccacctgagatgtacgaggtgcacacagcatcccgggatgaccggagcacctggatccgggtcattcagcagagcgtgcgcacgtgagtgtctgcctgccgcctgcatgtgcttatgacctcagggtacctgcagcattagatcccaaccatagaactccctgggaacagaatccagcattcagaggtgggggaagaggttgagggagagacaaaatggcccaagactggaaaggtcacctatgttcttatgtcctgtaaagccacattttatacattgccaacctcaactccctttcaaattcagcatgagctgacaagcaagggaatactttgagctgtcacatggtggcatacctgccagccaacagtacaatttcagctgcattcacatgttcatctgtaggcagagggctgttatttggattgtattgtattttacatttatttttctaaaaatgaatgaaaaagaggataatgaaagcatcgatactagagaggaacaagtctcataaacagactcaacacaatagaagcaagaaggaaatcagtgtgtcaaagcagcaaatctttagcttctattggacacacattagatttgaggcagtcaactatgtgtctaattgtgatgggaaaaaacatcaaataaagcacaggtaagatgtttaaaatggattctggaagattatgcctaaagaatgaagtgtaagtgtaattctaattcagatttttacaggttttctttcttttttttttttaattttttttgagacagagtctcgctctcagctcactgcaacctccacctcctggattcaagcgattctcctgcctcagcctcccaaatagctgggactacaggtgcccaccacgaccccaggcaaattttttttttttttttttttttttggagacagagtctctgttgccgggctgcctcagcctcctgagtagctgggactacaggctcacgccaccatgcccagctaatttttgtatttttagtagagacggggttttaccatgttggccaggatggtcttgatatcttgacctcgtaatcgacccgcctcagcctcccaaagtcctgggattacaggcatgagccactgcacccagccaaatttttgtatttttagtggagacggggttttgccatgttgaccaagctggtctcgaactcctgatctcagatttatccgcccacctcagcctccaaaagagctgagattacaggcattagccaccatgcccagccaagatttttataatttttctttagctttcagggaatcagttctcaactttataatttgtaaacctttttttttttttaacttctgcaccatggaattttgaaaaggtttttagaaatgcatataaaagtatgaaattgcaggccaggcacagtggctcacgcctgtaatcccggcactttgagaggctgaggcgggtagatcacttgaggtcaggagttcaagaccagcccggccaatatggtgaaacctcgtctctactaaaaatacaaaaattagccgggcgtggtggcataagcttgtaatcccagttacgcgggaagctgaggcaggagaatcgcttgaacccgggggtggaggttgcagtgagtcaggattgtgccactgcactccagcctaggtgacagagtgagactccatctccaaaaaaaaattatgaaattgcctattccaagaaagcagttcaaaataacctgtcctgttgacagatctgtagtggcttctttattaatagtattaatatttataattgtggccaggcgctgtggctcacacctggaatcccagcactttgggaggctgagacaggcggaccactggagttcgagaccagcctggccaacatggcgaaaccctgtctctactaaaaatataaaacttagccaggcatggtggtgcgtgcctgtagtcccagctgcttgggagactgaggcaggagaatcacctgaacctgggaggcagaggttgcagtgagccaagatcctgtcactggactccagcctgggcgaaagtgcaagactctctctcaaaaaaaaaattataattgtggaaattaataatattaattgtaattgatttgttgagcttctgttatgttcaaagcactttaacatttcatttaatcctaatgaaaaacctatgaggaagatattaccttcatttttcaaatgaggaaatagagaggttaccacctggtaaacagtggagccaggatttgcatcctgtttgcttgatgccaaagcctgtacttgaccctctgcactgtgctgcctttccaagcgacctttggagagatatatctcagtaaacgcagataatcagtgctaagaaatgggagaaggtcggccgggcgcggtggctcatgcctgtaatcccagcactttgggaggcggaggatcacctgaggtcaggagtttgagaccagcctggccaacgtgacgaaaccccatgtctactaaaaatacaaaaattagccaggcatggtggtgcgtgcctgtaatcctagctactcaggaggctgagacaagtgaatcacttgaacccaggaggaggttgtagtgagctgagatagcgcccttgcactccagcctgggtgacagagtaagactccgtctcaaaaaaaaaagaaagaaaagggagaaggtcaggactaaattaaagctagggtgtgaggctgaggagtcttatcagaagatggaagcataaggcatgtttgggaaggagggaaggctgattctggtctataacctagcttctgtctctcaatggcatgcgacctgttacccctccagatgcccatccagggaggacttccccctgattgagacagaggatgaggcttacctgcggcgaattaagagtaagtccacccacaaggagctccttagtaatttataatacattcacacaatggaatattatgcaactgttaaaaagatgagatggctctatgagggctggtgtagatccacaactgaaacatattaagtgaaaaaagcaaggtttaaaacaatgtaaagtgtatactaccatgtgtgtaaaaataatatggaagaccaaggttgggtgagtaacttactttttcactgtaaggccttatattagttagggtatgatttaactgctatactaaaagaccacaaaaatcttcttccttaaaaaaggaagtagattggccgggcgcggtggctcacgcctgtaatcccagcactttgggaggccgaggtgggcggatcacgaggtcaggagattgagaccatcctggctaacacggtgaaaccccgtctctactaaaaaatacaaaaaaaaaattagtcgggggtggtggcgggtgcctgtagtcccagctactcaggagagtgaggtaggagaatggcatgaacctgggaggcggagcttgcagtgagctgagatcacgccactgcactccagcctgggcaacagagggagactccatctcaaaaaaaaaaaaaaaaaaagaagtagattggctggatgcagtggctcacgcctttaatcccagaaggatttgggagacaggaggatctcttgaggtcaggagttcgagaccagtctgggcaacaaaacatacatagcaagaccctgtctctacaaaaaattaaaaaaaaaaaaatagctaggcatgatggtacacacctgtagtcctggctactcgggaggctgaggtgggcggattgtttgagcccaggagttcaaggctgtaatacactataattgcaccactgcactccagtctgggtaacaacaacaacaaaaaaaaccccaacaaggtagaatattattgctgtcaacataacagttcaaagtgggaagtgcagagtagtggtgcagctctgccatctttaacatgaagttttcatctctatgtcatgtctgaagtggctactccagctcccactgtcacacctgtatcacacctagcaaggaggagtaaaggaatagagtttatacccttttttctttttctttctttcttttttttttttttttttttgagacagggtcttgctctgtcgcccagggtggagtgcagtggcgtggcgtgatctcgactcactgcaacctccatctcccacgttcaagtgattctcctgcctcagcctcccaaggagctgggattacaggcatccaccaccactcctggctaatttttgtatttttagtagagatagggtttcaccatgttggccaggctggtctcgaactcctggcctcaagtgatccacctgccatgcccagcctatacccatttcttttaagagcagatctggaagatgctcatatccattggccagaatgtagtcatgtagcaatatagtcacgtgcaagtcaggctggaaaacatagttgttaactgggcagccatgtgtgcccagatgaaacttctatgcattttctcattaaaggaagatggaaagaatgaacactgttggacaacctgcaaccccttccacaaatcttttttttttttttttgagacagagtcttgctgtgtcgcccaggctggagtgcagtggtgtgatctcggcctcactgcaacctctgcctcctgggttcaagcgattcttgtgcctcagcctcctgagtagctgggactacaggcgcgtgccaccacacctggctaatttttgtattttaagtagagacagggttttgccatgttagccaggctggtcttgaactcctggcctcaagcgatccacctgccttggcctcccaaagtgctgggattacaggtgtgagccactacacctgaccaacagaaagctttttcttttttataaatgccaaaataacaaaattaagtctgccacactgccccaccctacccctctcccctagggctgtcctctactggcgctcttgcatacccctacgtcctctcatgtcctcacttgttccttatctgcagtggagttgcagcagaaggaccgggcactggtggagctgctgcgagagaaggtcgggctgtttgctgagatgacccatttccaggccgaagaggatggtggcagtgggatggccctgcccaccctgcccaggggccttttccgctctgagtcccttgagtcccctcgtggcgagcggctgctgcaggatgccatccgtgagggtgagggagctcccagggaagagtccaggctcaagcactcaccgtcacagaatgtggacatgtgactagacatggacaaacacagacaagtgggatgccaaccctataaaccataaacggccctgagtgcctcttctgggccagttcctgggaaaggcaggggaggaggtgtggtccttgctgctgctccatatcgtccatgctgcatggactctgctgcctcgtaggcatttactgccctttacctcatcagtggttgtgtgagtgaaaccccactgccagtgcagggggcattcccccagatgcccaagtgtcccacatgtgggggtgaatggcattcccctcagggtcctgtgtcattcctgttctcacctcttcctctttccccacagtggagggtctgaaagacctgctggtggggccaggagtggaactgctcttgacaccccgagagccagccctgcccttggaaccagacagcggtggtaacacgagtcctggggtcactgccagtgagtaccagggcaggggaccaaggtagtaggtgggaggggccaaagttagtagagtggtaccagggatcaagtggtatcagggccccagggaagtgagctcagccatccttttctccttctcaacagatggtgaggccagaaccttcaatggctccattgaactctgcagagctgactcagactctagccagagggtaggtcctcaagaggttctgggacttggcaagagggtgggagagggacagccagcctctggatcctcaacacaaagctgtcaggggcaggcacccaggatttgtgtgcctgctgactccccattcttgcccatttctgcaggatcgaaatggaaatcagctgagatcaccgcaagaggtgagatgggaattgatggtataggagactgaagggaggatgttcttagtctgagtagttagagcccagtttggagtggggtggggaaagcgtctacattcaagtatgtctccggatcctactgtccccacacccacccttgttcaacttttgggcagttctcccatcctaaagctggggccctgttcccaccctgtctgtcctcaggaggcgttacagcgattggtcaatctctatggacttctacatggcctacaggtcagtaggacaagggcttgaatggggaaggggaggagccaggctagagatgcctgtttaggtggggcatggtcatcccaacaggcctttctaaataccctcccaatccaagctctccaggagcgatgatctgggccttggagggtgaaggcgaggggtagaagagcacaggggttctgataaacccttctgcctgcattctactcccaggcagctgtggcccagcaggacactctgatggaagcccggttccctgagggccctgagcggcgggagaagctgtgccgagccaactctcgggatggggaggctggcagggctggggctgcccctgtggcccctgaaaagcaggccacggaactggcattactgcagcggcaacatgcgctgctgcaggaggagctacggcgctgccggcggctaggtgaagaacgggcaaccgaagctggcagcctggaggcccggctccgggagagtgagcaggcccgggcactgctggagcgtgaggccgaagaggctcgaaggcagctggccgccctgggccagaccgagccactcccagctgaggccccctgggcccgcagacctgtggatcctcggcggcgcagcctccccgcaggcgatgccctgtacttgagtttcaaccccccacaggtaaggtggcctgcagtggtgaatggacctggggtggacataagggtccatggagcccgaaagaaattgggccattggggatttgagcccaaatgcaatcagtcaactgacttgaaggatattgagatactggttggagaactgaaaagaaatgtagatgggtgcaggggtggaggaaattaactcgggtcgtggtgctgaaagaggccagttggtggtggatctcctgaaggggactcatgggtgagccccaggggggagagctgctgccttcagccaagcagaacctccaatcttcacactactcagtccctgacctgctgttcttcctgcccactgtccacagcccagccgaggcactgaccgcctggatctacctgtcactactcgctctgtccatcgaaactttgaggaccgagagaggcaggaactggggagccccgaagagcggctgcaagacagcagtgaccctgacactggcagcgaggaggaaggtagcagccgtctgtctccgccccacagtccacgaggtgagaccctggcggagacatggaccagaggtagagtgcagcctgggtacaggccattgggctgtggcttccaaatgggccctaactgacctgtgaggcttgtagtaactctagggagggacttcctgttttgtctgatgatgaatgggtggtggaagtctaggaagcaggaggggcctctctcctccaactggttggtgattcccaacctttagaagtaaaaacagattcttttttaaaaaggcatggcggctcaggcctgtaatcctaacactttgggaggccaaggcaggaggatcgcttgagctcagaattttgaggccagcctgggcaacatagtgagacccaccttctctacaaaaaaaaattcatttatttatttttttattttatttaattaatttatttcattattattttttgagatggagtcttgcactgttgcctgggctggagtgcagtggcgtgatcttggctcactgcaacctctgccttccaggttcaagcgattctcctgcctcagcctcccaagtagctaggattacaggcgcccaccgccacgcccagctaatttttgtatttttagtagaaatggggtttcactatgttggccaggttggtcttgaacggctgacctcgcgatccacctgtcttggcctcccagagtgtcgggattacaggcatgagccaccacgcctggctaaattttttttttttttgagatggaattctcactctgtcgccaggctggagtacagtagtgagatctccgcttactgcaacctccgcctcccaggtccaagtgattctcctgcctcagactcccgagtagctgggactacaggcacatgcctccacgcccagctaatttttgtatttttagaagagatagggtttcaccatgttgcccagtctggtctcaatctcttgacctcatgatccgcctgccttggcctcccaaagtgctgggattacagatgtgagccactgcacccggtctattttattttattttattttattttattttatttatttatttatttaagatggagtctcactctgtcacccaggctggagtgcagtggcacaatctcagctcactgcaacctccacctcctgagttcaagtgattctcctgcctcagcctctcgagtagctgggatttacaggcatgcactaccacacctggctaattttttttgtattttttagtagagatggggtttcaccatgttggccaggctggtctcgaactcctggcctcaggtgattcacccacattggcctcccaaagtgctgggattacaggtgtgagccaccgtgcctggtcccccaaaatttttttaattagccaggtgtggtggagtgagcctgtagtcctagctacggagagtgagagtgaggtgagaggatcacttgagcccagcaggttgagttgacagtactccgtgattgctccagcctgggcgacagaaagagacccggagacccagacagaggatctcactctaaaattttttatgttagagagagggtcttgtgctgttgccgaggctggactcaaactcctgggcttaagtgatcctcccaagtagctggggctacaggtacataccactgtgcctgggaaggtatagttttttgttttgttttgttttgttttttttgagacagttttgctctgtcacccaggctggagtgtagtggcacaatctcagctcactgcaacttccacctcccaagttcaagcaattcttgttcctcagcctcccgagtagctgggattacaggcgcatgccaccacatatagctaatttttggcatttttagtagagatggggtttcaccatgttggccaggctggtctccaactcctggccttaagtgattctcccaccttagcctcccaaagtgttaggattataagcacgagccatggggccagtttttaaagtaaaaaaagtttcaaagaacttcaagtttttacagttggttcatgaaataaaaaattaccaaaagctttaaccttaaagtattttgtattttcctaatcaaattgtatctttggatactgtaaaagtgtatccggtacctaggtatggataccttgcttactttgttgccaaaggttttcctctcacccaagaatttacagaaccctgtcatcccttcacagccccagagccccctgagcctgcagatggggaggcattagtctaggggtacagttcctcatgggagtctctgctaactcactggctttgtcctgtcccccttcagactttaccagaatgcaggacatcccggaggagacggagagccgcgacggggaggctgtagcctccgagagctaagggggcccctcccccctgccccgtgccccactgaagaacattactgagggggctaaccttggggactccaatttgccaatgatgagggaacatttgaaagaactgcaaattgtccttgccagctcttgggatccttggatacctggggccatttaagaagctaggggaattaggccacaacaccccctgggacatccgaaagctacaccacagatgccagtggttcatgccttcttcccgcaactttaggaaaatttatttatttattgtttattagttatggggggagaggggagatttaaaggaccagggacatgggaaccaagccatagggatcagagggccttgtccttgaacactactggggtatattcaggctcatccacgcagctgctgggttcttgccctaacggccctcccctgcaacatccgtcttggaggagaggctgcagccacagcaccctactgccctttaaataaaggagggctgtgggcagggccatgtccctttctcctctcccctcaacctcttactgctgttctccctttctccgtccttcatggaagccctgggagataacctggcttcctggagttgatggaataaaggttggggtggccataatggtttgttgggggtgagggaaaaaacccacagggaccagaatgttttgttgttcttttgttttcttttttgtaccaaagtcaactgcacgtgttttatatttttaagagatcgtaggcaattagagatcgaagcctcctatctccacatctctgaagaagttgaggggtgggggagagaatgacttctgccttcatctgcagtaacggggggacctatactgacctcttccccagccatttagaaacaagttctagggtgggttggaaaatctccaagagccctgacctcatcttccacctcagcaaccatgacctgaaacctcagcgtgaatttgggggatttttcagtggaacccttgcccccaaatgtcgaccagcccccaaatgtcgaagaattttcttcttgccaattttgttgtttaaaaaaaaaattcagggaaaattaaaaacctggaactcca

SEQ ID NO: 272 - DNA, 45824 bp, Homo sapiens
  source 1..45824: mol_type = genomic DNA; note = NC_000016.10:68530249-68576072 ZFP90 [organism=Homo sapiens] [GeneID=146198] [chromosome=16]
ggcgcctcccctgcaactagcctgccgcttccctcccggcacccccgccgccagccccgagcgcggacctggagcggagaagagaggtcggtgcctccaacccggggccgcggtcgaggggcgcgcgtcgttgctctgggactcactgtcgaccaacccccattcctcaggggctcggctccttccccaaggctcaggacgtagagcttgggcggggccccctgcccagcagcagtcagcggagctgcacgagtcagactccacttctggtgcacctggtaccttggtgcgctgggctgagggcttaggggtggttctggttggggtggcgttttggatctgtgagcaggagccgatgaattcccccgagtgtgtgtgttcgtgtgtgtctccgtctgtgcagaaatccgagccaaccactagagctctgtgaatggggagagcttcactctccaaaatatccagttggtcccctctcccatagcaactccaggttttataaataaaaatttttgagaccgggtgcgatggctcacgcctgtaatcccagcaccctgggaggagaggcgggtgggtcacttgagcccaagttggagtacaataaagccaaaagtgtaaacaacccacatgcccaccaactgatgagtgactagacagaatgtgatatgtccgtataatcatattattcagtaatacaaaggaatgcgttggtgatatgggttacaacatgtatgaacctcagaagcactactgttataggaaagtggtccctatccagaccccaagagagggctcttggctgtctagcaagaatttagggcgaggtccacagtgcaaagcaaaagcaagtttattaagaaagtaaaggaataaaagaatggctatgccatcaacagagggctgctggttgcccatgttaatggttatttcttgatacgctaaacaaggggtgaattatttatgtctcccctttttagaccatttagggtaacttcctgatgtcatggcagttgtaaactgttatggcgcttttgggagtatagcagtgaggacgaccagagtcactcttgttgccgtcttggttttggtgggttttagccagcttctttactgcaacttgttttatcagcaaggtctttatgacctctatcttctgccaacctcctatctcatcctatgacttagaacggcttaactgtctgggagtgtagcccagtaggtctcagcctcattttacctagctcctatttaagatggagttgctctgggtcacacgcctctgacacgacaagtgaaagaagccagtcacacacatacaaatatataccgcatgaccccatttatgtgaaatgtccagaataggcaaactacatagagaaaaagtagagcagtggttgcctaggactgcaaggtggcagggtaggattagggaatggctactaatgggcataagttttcttttggggatgatgaaaatgttctagaattccattatagtgatggttatataactctctacatccagtaaaaactactgaattgtacactgtaaactgtgagcgctatagtatatgatttatatctcagtaaagctgttagaaaaagaaagggcctggtgtggtgtctcacgcctgtaatcccagcactttgggaggccgaggtgggtggatcgcctgaggtcaggagttcgagaccagcctggctaacatggtgaaaccccatctctactaaaaatacaaaaattagctgggcgttggggctggcgcctgtaatcccagctactcgggaggctgaggcaggagaatcgcttgaacccaggaggcggaggttgtagtgagccaagattgtgccattgcactccagactgggcaacaacagcaaaactccgcctcaaacaaaaaaaaaaaaaaaaaaaaaaggaaatgggtggagtggggagaaaggtgggatgtagagaaattctaggagttccagaaaaggcagtattggtagccagtggaggaaagagttccagggagataagtgccataaagcattagataaaatctgcctgatgtccagtcaggtcatcaactagctaaatcactggacatgttgggaaaatcagtatcagagtaaggtgaaggtagaagccaaacaacagtcaaaacaaggcatgaaggggaagtgaggacttggtcttcacaagatggtatactttttctagaagttcagatgaaacgcataggggtaaagaagaatgggagctgagagacatctggggacaagaaatctgtgtgtgtgtgtgtgtgtgtgtgtgtgtgtgtgtctttcagaagggacagatttaagcatggttataagtccaatggaaaaagccaaaaggaaaaaaatgtgagatgtagaagaaatatggatgatagattagaagggattggggaccaaagaccccgagagagcacgtttctccaaatcagcaaaggaacatctgtctctaagactggaggtgaagtggagaagtgggttgaaaagtgggtataaaaattgtcaacaggctcattttcccagcaattttcagctggcatgatactggactttgtaggtcagtttcaacacaagtggggataaaagaatcaagagccctggtaggaaaaaagttcagttgactggctgtgaggtcttcataaaggagaaagagaaacaaatactgacattcagagaaagtgagagaccgagaggccatagggacctttgacatatagtcaacccactgaagtccctctttatcctccaaaacaatataataatcttagaacctttaatctctcatcaggagaaccttgatttttttctgttgacctggattttagtttcatctttttttaaacccacaagacataatcaatagttttatatagtcaattttaatttagatttacacgtagatttaccacttttttttttttgagacggagtctcactctgtcacccaggctggagtgcagtggcgcgatctcggctcactgcaaactccgccttccgggttcgcgccattctcctgcctcagcctgagtagctgggactacaggcgcccgccaccacgcccaggctaattttttgtatttttagtagagatggggtttcaccgtggtctcgataatcctgacctcgtgatccgcccacctcggcctcccaaagtgctgggattacaagcgtgaaccaccgtgcccgggaggtagagttaccactttctttgttcactgtttccttgtctatatatgactgcatgtggaatcattttccttccatttgaaagacacccaactttaatgagtctctgttgatgacattctgttttttgtttttccaaaaatccctctatttaatcctcattgatgaagatataattctagctgtcttccattgttgccatcttctaattctccttttttgttgttgttttgagacagagtcttgctctgttgcccaggccggagtgcaatggtgcaatgtcagcttactgcaacctccacctcccaggttcaagccatcctcctgcctcagcctcctgagtagctgggagccatcacgcccagctagccatcttctaattttcattccttcaaaggtaatctgttttttctctctaggattttaaagatcatctttggtgttctatagtttcactatgatgtgtttcaatgtaaatttatttttattcatctggcttggagtggcaggattccagaatctttatatctttaatcagttctggaaattttcagcctttatcttctcaaatattgcctcaattctcttctttttctggaacccagattagattgttatagctctctgccttttttaaacttttttttatctctttgtccatttgtggataatttcctcagatcgaccttctattcactaattttatcttcgggtgtgtctaatctattattaaccatgtgcattacatttttaacttaaagattttctttctttctttttttttttttgagacagcgtctcactgtgtagctcaggctggagggcaatggcgtgatctcggctcactgcagcctctgcctcctgggttcaagtgattctcctgcctcagcctcccgagtagctgggactacaggcgcatgccaccacacccggccaatgttttgtatttttagtagagacggggtttcactgtgttagccagcatggtcttgatctcctaaccttgtgatccacctgcctcggcctctcaaagtgctaggattacaggcgtgagccactgcgcccggccatttttaaaattctatttggttcttaagattttggactcttgttctttattcatatgtccaacccctactttagtttattaaaataaatttttgacagccgggcacagtggctcacgcctgtaatcccagcactttgggaggccgaggtgggtggatcacgaggtcaggagatcgagaccatcctggctaacacagtgaaaccctgtctctactaaaaatacaaaacattagcttggcttggtggcaggtgactgtgtagtcccagctacttgagaggctgaggcaggagaatggtgtgaacctgggaggcagagcttgcagtgagctgagatcatgccactgtactccagcctgggtgacagagcaagactgtctcaaaaaataaataaataaaaataaaataaatttttgaaacatattagacatcataaattttgtgtctgacaactccctatatttgaggttgttatgaatattatactattttttctgtcattcatggttccatgttttatgcatgtgctttgtgtttgtgattcatggctgtgagctcatatttcttgggattatatctggggaagttctttgaagcctggactgaaggtaagttctcccagactggatttatgtttgattctgccagatgcctggaagcactgttagccgagaaccaatttaaactacattctcagcttgcagttttttggaccacccagggactgtgaatacaggctgtaattccacataggaaccaggtttggttacaaattctcgggaaagatatccaccaacgcccctactcattgtcaaagtttgaaacaggtaatttaccttgcagtctctaccatgggagtattcatctatggagtcccaatttttactgggtggggtggggagtgtctcctattagataccctgctttggatggggtctgggttttgtcacttggctcttgtgcctacaggactatgaaaaacaaagctcttagctttgtgcagtggcagtatcttaaccaatgaggtttatctgaggcacaattattgctaattgaaaacttttcccaacactgccataatgacttgagctatactaggcattggcaatttaatttttgacagtctctacggagactgaaataaaaaaaaagaaaaacaaagctcaagtttgcctcatttggcaaatgattcccaggtgaaagctagcgttccatgttctgcctactactctctaagtttattcattttgtttgggtttgggcttctcggtattccctaccaattttctagctcatcaatacattttaaaagatttttaagttattttatccagcattaaagttgctgagccacactcccagaagcagaagtgcatctgtgagttccttaaaggaaaccaatagatacctgacttggaacacccggctctgcttcagcttccttcagtctccaaatgggtgtgagctgaagttctcacacccagttaattccatagcctcttactattgtgaactgcgcacctttcccctgggggctaaaagcccaattattttccagtacatgcactttctacacaaacagcagaaattcaggttgctctccttacaaacagcgttgttctctttcccttttctctgggaggtaccagtgcaggttttaaaacctctgctctcctgggtaggctcaatgtttgagtgctctttctcacattcatcttgcaagtaggagcggtggtgaacgctgccttccgcactaggtggaaggcttactcgtctaaggaattctttttctttcttttgagagagggtcttgctctgtcacgccagctggagtacagtggcacgatctcagctcactgcatcctcaacctcccctagctcaagctgattctcccacctcagcctccccagtagttggggactaccggcatgccaccacacctggcattattattactattgtagaaacaaggtctcactatgttgaccaggatggtctggaacgcctaggctcaagcgatcctccctcctcagcctcccaaagtgtgggaattataggccactgtgcctgggtacggatttttccttttctttcccgtcatactcttatatagcctgggaaaagaggggtggcattgcgtcagtggttaatagtaacagcaaattcagaattcagcacccagcttcctttgataagacctgagaggttctcaccccaaatgttttcatctttccttagaatgcagaacttaatcctcaactcttgagacctggttaccaattctgggacagtaggaaaaattcctcttattctctcatagtaataagtgactccactgctgttactaagccaatggctctcatcacactcaaaatccacacccctcatcacaacctccaaagccttgttccatcaagtcccagtctacctgccctacctctgctctgctcactctcttatccctcactctgctaaggtacattaggcatctatctgttcctaagcacaccaagcttgttcccatctgacagcttttgcaccttcagtttcttcagcctggaattcttttccccttatgcacctgcagttgttttgttgttgttgggcttttttttttttgagacagagtctccatctctcacccaggttggagtgcagtggtgcaatcttggctcactgcaacccccacctcccaggttcaagcgattcccctgctacagcctcccaagtagctgtgagtacaggcgcacgccaccacaccctgctaatttttgtatgtttagtagagatggggttttactatgttggccaggctggtctcgaactcctgacctcaagtgatctgcccccctcagcctcccaaagtgctgggattacaggcgtgagccaccatgcccagcctgcagttgccttaagttgcagctactaagtcacttgcctcagagaggcctcccggtccactctaattcatacttgtgaattatgcattctgctaattccagaccactatattcacaaagcagtgatagaaagcattcattaatttttatatatattttttgagacagtctcgctttgtcgcccaggtcggagtgctgtggtgaaatcacagcccaccacaacctctgcttcccgggttcaaacgatcttcccacctcagcctcccaagtagctgggaccacaggcgcacactattgcaaccagttaatgtttgtattttttgtagagacagggttttgccatgttgcccaagctggtcttttaattcctgggctcctccctcctcagcctccctgtgctattgacgtgttatttcattacttgttagccccttgcgcaggattttgtgtttgggacaagccaacagtgatggaaattttctcccttttttgttttgttttttttgagatggagttttgctgttgttgcccaggttggagtgcaatggtgcaatctcggctcaccacaacctctgcctcccagattcaagcgattctcctgcctcagctttctgagtagctgggattacaggcatgcgccaccaagcctggctaattttgtatttttagtagagacgagctatctccatgttggtcaggctggtctcgaactcctgacctcaggtgatccgccagcctcagcctcccaaagtgctgggatcacaggcttgagccaccgcacccggcataaagcatttatttttgaatgttcatatttttgataaagcagtgtgacatcaggaacatttcgttgcagtcattttctaccatgttggtatgcaatgctctaatgttaagaaatcaagctgaaatctaggaaatgtagcctgaatgtctgtgatatataagacataattacataaacgtaatagctgtatctaaaagttgacctatctttgtgttgaaaatttccatcgggccgggcgcggttgcccatgcctgtaatcccagcactttgggaggccgaggcgagttcgagaccagcatgaccaacatggagaaaacctgtctctactaaatatacaaaattagacgggcctggtgacgcatcgcatgcctgtaatcccagctactcgggaggctgaggcgggagaatcgcttgaacccaggaggcggaggctgcggtgagccaaaatcgcgccattgcactccaacctaggcaacaagagcgaaactgtgtctcaaaaaaaaaaaagaaaatttccatcattgtttgcttgtcccaaacaaaatcctgcgtaaggggatacgaagtaatgaaataacacggcagtagatctgcctttgcacattgctcaggaggccacggatttgtccgaagtttcttttttctctaaaatgagaaatggaaaattgccttttgaagaagatgtaaatgccccaccctctgacgctgtctcactcccttcctgtgtcactcttaccgctgaagtcaggacctgacattatcttgttgacatgtttgcgtttttatcgtcagcctcgtcgaaaggggcgtacgattgctccccgaaaccagggtctttcccggccgattccccagctagcaacaagccccttgcaaagaggaggcggacagtgactggaatacagggacacgcacactcgagccacactggccgcctccctcggccctcgcaagggtccctaacgcgccttcggaagccgcctaggcggggcctgcgcgcgcgggcctctgggaagtgtagttcgcgcgcccggcgtggacccggggttgcaggagcgaggctccgagtgcgcaggcgcacttccagttctgccccaccgctgcggccattgtccgaccccggtgcggctgaggcccctttgggcagcccctccgcagatcagaattggagataaccgaggcttcggcgggggcgggaggagctgcccgaggctctgggtgggccggaggtcgcgaaatccggagccccccagaggcggtgattctgagtgcgcgggtctgggcgggacccctcctgggtttggcgggtgtcagccgggcctcgcccaccaccctgcgaaggggactgggcgtggccggaggggggtgtccgggaggccgctgagcctttcatttcggggatggggagcggcaggcccgggctggttccacggtcctcgccaccatctcccctggagatgtggtttaggggcggaggtggggcggggcggggcggggtggggtcggtgttgcagcggggtgagtgggccctgtcctttctccccagctcctgccccggagccgggccctggcgaggcaggaatggccccgaggcctccgaccgccgcgccccaggtgagcaacgcgttcctaacctcctgggcatcccatccatctatccatcccatctcccaagggtgtttggagcagtcattgttctctgcctggcgactcccttacttgcttggctcgatcggagcctcctggccatggaaaaccccaggctttggggagctggattcccaaaggggaggctgctctgtggggtagagagggccagtgtggtgcgatcttgtgggaggagttgagattggatgcgttgggaagtgtcagttttgagagtcctgaatgccacgccagttttttgaactcttgtcaataagaaatggagagagtggggtcacaggatggaacactgtagaggaggaagtgactgtcggcaagtgtggagagaggagccccagcttctgacccagggcccatagagagtccgtaaggggccgtagaagcctggttagaacatgtctaggaagaggctggagatgggctttcttgggcaaggaggcaaaaacaaaacaaaataaaaaacaaccaaaaataaaaccagggctgattctcccagagctttttgtgtctgtccttttctgctttaacaaaaatgtaatagagcaactcactccccaccgccagaagtccagccttcaccttaatgtgaggctgattcgtgaacccatttattcttgtggcagagggggcattttctagaagcgtcacaactctaaggttatccattgatttacatattggtgaaaatacatcaagatccagatggtatctgtatctttgaatctacattctctttagaattaagggaaaatgacagattgtagttgctaggtgtgtgagacatcaagatcaattcaaataaaaataccaagttgccaggtacagtgggtcacacctgtaagtccagcactttgggaagctgaggcaataggatcgtttaagcccaggaatttgagaccagcctgggcaacatagtgagactccgtctctgcaaaaaaaaaaaaaaaaaaaaaatttaaaagataaaaacaccaacttagtaatgtcctttaaaagagcagtttatagtgaattaagcatacaatacatcatgccttttttttttttttttttgaaacagggtctcttgtcacccagtctggagtacagtgacatgatcttggctcactgcaacctctgccatggtgcacgccaccatgcccggctaatttttgtattttttggtttattttattttttgagacagtctcattctgtcacccaggctgaagtgtagtggcatgatctcggctcactgcaacctccacctcctgggttcaagtgattctcctgcctcaacctccctagtagctgggattaacaggtgtacaccaccacacccggctaatttttttgtattttagtagagtcagggttttaccatgttggccagtctggtctcgaactcctgacgtcaattgatccgcccacgttggcctcccaaggtgctgggattacagatgtgagccaccacgcctggcctaatttttgtttttttttgtaaagatggggtttctccaggctggatttgaattcctaagctcaagtgatgtgctcgcttcagcctcccaaagtgttgggattacaggtgtgagccaccacagctgggcatgtgccaccatgcccagctaatttttgtatttttagtaaagatggggtttcaccatgttggccaggatggtctcgatctcctgacctcccaaagttctgggattacaggcgtgagccaccgggcccggcctgcgtttttatatatatatatacttcttattatatgtttctgtttttacagggatgagccttaaggagtaagacacctgccaatactaaaacaagacagttacttggtttgaggagagccagagcacatcatgatcgttatcccctttacatgcaaagtatcctccataggcttgtgagaattagatgacttaacacctcatcagggactctggtcttttccatagtgggaggatacctttttagtggtgaaagtggattcatgttctgagcagtgaattttaaggaccactgtaaacttgacttttcaagctatgttccctgaacgccctggctcagttgcattctcattgaatggcctgatgatgtccatgtgggttatctaactcaggctgcagataaccagggatgaaggacagaacagaacactggtcctaaacggggcttttcaggcagaaatttccctttagcagtggttccctgagcatgaccctcaggggaatgcaaagattagtaatgagtcctgtgactgcttaactgtaaagttaatttagtgggagcagacagtctcctgcagaagtagagcgcaagagagctggtgtcaagtgttgttgcggaggtccagaggctgcttggagttgagagggaccaggacattctgccggtgggaagaagtcagtggagttttcacctttgaataggagcagagtctaagcaggtgaaaacaaaaggggactgtaatcccagcactttgggaggcggaggcaagcggatcacttgaggtcaggagttcgagaccagcctggccaacatggtgaaaccctgtttccactaaaaatacaaaaattagctagccatggtgacgggcgcctgtagtcccagctactagggaggctgaggcaggagaatcgcttgaacctgggaggtggaggttgcagtgaaccgagatcctgccactgcactccagcctgggtgacagagtgagactccatctcaaaaaaaccaaccccaaaaaacaaaagggagagggtagagctgattgatttggtgaatcgggagttgggaggcaagaagatggcggtgcatgttcattaaagcattttctttgtaacaccagctgtgggctgctggcagtgggtagaggagaatagaaggagtttggacttgttctttttggccttgtaactcgttcattcatcattcattcatctactcattcaccaggtagtcattgagccctatgatgtgtcaggcacttttctaggcagttgggataacttcagtgaacaaaattaggaccctgctctcaaggagcttacattctagagaggacagacagaagaattcagtaaataaataaattgtatggtatcctagaaggcagtagtatctcaagagggaaaaaaggtagagaaaggtaagggggtctgagtggggaggtgggaggtttgtagtcggggtgcaatttaaaatgatgtggtcagggtaagccttatccttattgagatggtgacacctgagcagacttgaaggcgatgagggagtagatgtgtaggggaagagtgctctgggcagagggaacagcctagcggcaagatgtatgtctggtgtattcaaggagcagcaaagaggccagtgtagcttgagctggtgatttggggcagggaactaatacaacttcatagattttttaaaagattgccatgaatgatgaatcctaggataaaaagtttgatattatatttgataatagttcctttagagaggtgttttgatgagtgggacctttcccctgaacatagttaacaaattcctgaactggctccacctgaagcgggatgggactaggagcagagatggaggagccgggatacccatttagaatgtttacgtagatatagctgtgtatttataggattgttagtagcaatgtctatgtaaacattatacatccttatttgcctttttttctttttttttttttgagacagagtcttgctctgtcgccaggctagagtgcagtggcgtgatcttggctcaccgcaacctctgcctccctgattcaagctattttcctgcctcagtctcccgagtagctgggattacaggcatgtgtcaccacgcccagctaatttttgtatttttggtacagacagggtttcaccatgttgaccaggatggtctcgatctcctgacctcatgatctgcctgtctcagcctcccaaagtgctgggattataggcgtgagccactgtgtctggcctgcccttttttttttttttttcgaggtagagtcttgctctatcagtgtgcagtgtgcaatgttgtctcgctgcaacctctgcctcccaggttcaagcaattctcctgcctcagcctcccaagtagctgggattacaggtgtgcaccaccacgcccggctaattttttgtatttttactagagatggggtttcactatgttggccagactggtcttgaactcctgacctcaagtgatccacccaccttggcctcccaaaatgctgggattacaggtgtgagccaccacactggctggcctctttttcataacatgtgtactacatttttagttaggaaacaaaaaaggcatttgccattcttaaagttgaagccaccagagcagtaagaaatgagagaagttttaagctaggtgtggtggcacacacacctatagtcccagccacttgggaggctgaggtgagaggatcacttaagctcaggagtttgaggctacagtgagctatgattgcactactgcactccagcctgggcagcagagagacatcccatctcaaaacaaacaaacaaaaaaacagaaaagagaaatgagggaagttttataaggaaaatgcttcatatggagaaccagatctcttcatgttagagaagagatttccttgatagagaggaaatggggaggaggggtcagggcctggtctctgttgactctggattacagaagctctggttagatcatcagggtgaacagacccagcaaaacctggcttaggtcacccaaacttagacaagatgcttctggggccaccaggggaaaccagaccacttgctgaatcaggtcaggatgtttgtagtcaaggatgtccgagctccctctgtccagaggttccccttctcagcttcagcctgagctgacaggaggtggtctctaagtctcagctgagattgcaccttcccgtgtaacgttaggtaccgctcctgtgtgtgcccatagcacctgtgaacacctttttttttttttttttttttttttttttttttttttgagatggagtctcattctgttgcgctgaagtgcagtggcgtgatttcggctcactacaacctccgcctcccgggttcaagcgattctcccgcctcagcctccagagtagctgggactacaggcacgtgccaccatgcccagctaattttttgtatttttagtagagatggggtttcgtcatgttatccaggatggtttcgatctcctgacctcatgatccgcccgcctcggccgcccaaagtgctgggattacaggcatgagccaccgcgcccggcccatgcactcctattataatattcttacatggaatggagtggtgcatttacccagccttctctgtaccaggttttgtactctttcagagtaaggccatttgacccctcccttcaaccccttgcccagactaaacacgaggtaacatgatcattcagaatcacttaagcccaagcagcaattttatactttctgctactaatatagcacaaattatattttccagtcacaatgagcctattttattttctgataaaatgattacatgaaacaatgtgatttgcactgaacagtttttaaaaaatttgtctttaggatgttaggatgtcaaaacctgttcctctaagaactgtttcaagccaggcgcagtggctcacgcctgtaatcccagcactttgggaggccgaggcaggtggatcacgaggtcaggagatcgagaccatcctggctaacatggtgaaaccccgtctctaataaaaatacaaaaaaattagccaggcatggtggccggtgcctgtagtcccagctactcgggaggctgaggcagaagaatggcatgaacctgggaggcggagcttttagtgagcagagatcacgccactgcactccaacctaggtgactgagcgagactccgtctcaaaaaataactgtttcaaaaataagattcttttccttacttttccgtgttgtattacttttgttaaagtatatcttatggccgggtacagtggctcacacctgtaatcccagcactttgggaggccgagacaggcgaattgcatgagcccaggagttcgaaaccaacctgggccacatagtgaaaccccatctctactaaaaatacaaaaattagccaggtgtggaggcacacgcctgtaatcccagctacttgggaggctgagacatgagaattgcttgagcccgggaggtggaggttgcagtgagctgagattgcaccattgcactccagcctgggcgacacagcaagactctgactcaaaacaaagtatattttattaaagtatgtgagcatatataatattagagactttttacctttgatataatctttgtcagtttttataaattttgataaaatacacataagacaatcttaagtgtacagttcagtggtattaaatacattcatatgtaatgcagccatcaccactacccatcttcaaaattcttcatcttgtaaaactgaaaactctacaatccattaaacaataacttttcattctttcttctttcagcccgtgcaactaccattctgctttctatctctatgattttaactactctatctcatataagtggaatcaaacagtatgttttgttttgttttgttttttattaagacggattcttgctctgtcacccaggctggagtgagtggtgcaatctcggctcactgcatcctcagcctcctgggttcaggcggttctgtctcagcctcctgagaactgggactacaggcatgcgccaccacgcccagctaatttttgtgtttttagtagagccagggattcatcatgttggccaggctggtctcgaactccagacctcaagtgatctgcccacctcagcctcccaaagtgctgggattagaggcgtgagccaccacgtctggccaaaatcacacagtatatctttttgtggctggcttatttcacttattataatgtcttcaagattcatctaagtcgtagcatatatcagaactttcttttaaaggctgaatacagtgctttaaaataaaagcctttctaaggctaaatacaattccattttgcttatccattcatccattgatagacacttgctttgtttacatgtttagctattgtgaataatgctgctatggcactgaacatgaacatgaggcattgaactattgaacgtgggggtacagatatctctttgagacctgactttaaattcttttggttatatacccagagagaaattgcggggtcatacggtaatttttttccggaaccaccatactgtttccatagcagctgtatctttttacattcttaacagtgcacaaagggttctaatttatccacatccccccaacccttgttattttctgttttatcttgatagtagccatcctaaccagtgtgaggtgatatctcattgtagttttgatttgcatttctctaataattagtgttcttgaacatctttgtgtatcttctttggagaaatgtttattcaagttcctggcacatttttgaattgttttttgttggatttttaggagttctctatatattctgggtattacttgcttaataatctagactttttaatagaaaaaagtcatttatgatccctcttccttaggacctctgtatttgttttggtgaattttcttttctccttatgcatatttttccccttaaacatttttaattacaatgtattttaaatttcatataaattttatgaggattatttttgttgttgtttaaaatcagttttaatgactatattatattgctttgtatgaatgtaccaaaatttatttagccatttctcagagaacatttaggttgtttctgaaatttttactattatacataatgctgggataaaattccacttggttgtaatacataagtttttcaaaatacagttgatctctcttttttttttttttttgagacagagttttgctcttgttgcccaggctagagggcaatctcagctcactgcaacctctgcctcctgggttcaagcgattctcctgcctcagtcttccaagtagctgggattacaggcgtgtaccaccatgtctggctagttttgattttttagtagagatggagtttcaccatgtcggtcaggctggtctcgaacttctgacctcaagtgatccacctgcctcagcctcccaaagtgctgggattacaggtgtgagccaccgtgtccggcccagttgatcattttttaatatctgtattactaagggaaatagccaccagagagaaagcactctcttggatgggttttggtgtcatgcttatccttaatttgtagaaacattcagattgcttttcacctttttctgtcttttgaaagaatttacctataaaacatttagactcaggatttttatagacaagatgttttggcaacaattttctctatttcctcctcaattataaaggtttctgcttttttgtgtaaacattggtagtttagaatttaaaagttttttgttaagattttttgcatttcttaacacactagtgtgtatatttcactgttctgtttatcctccttttttttttttttttttttttttttttttattgagacggagtttcgctcttattgcccaggctggagtgcaatggcgcaatctcggctcaccgctacctccgcttcccaggttcaagcaattctcctgcctcagcctcctgagtagctgggattacaggcatgcacctccacacccggctaattttgtatttttagtagagatggggtttctccatgttggtcaggctggtctcgaactcccgacctcaggtgattcgcccgcctcggcctcccaaagtgctgggattacaggcatgagccactgtgcccagccttatcctcctatctttaagttcatcttttaaaaatttcttcttactcgatttatcagaggtttttctatttggctggtgcttaagaggaaccagccttagatttggctgttaatgccatcgtttttctgtttgcctctgttttttataatccaagaatttaattcactaacccatgtgtttttttttaatcctcgaaacaactcctcattttcctgcattgagaattacccagattctgtatccattcactcagcagacgtgtttggaatgcttgctctatgccaggcagtggttcttaaccagggtcatgcttcagaaccagtcaggaagtggtgcctgcttcctctggggtggtgacaaggcttcagtgaggaaatgtggtgagagtgcacgtaaatgactgagtttagtgtttgcctagcagcgagtgttcaagaaatctgagctgttgctctttgataatgaaccacctgaggagcttttaaaagatgctgggcaagaccctccatgcatggacaatttagaaaagctgcccaggtgattctggacactctccacttgcagtgtcagagatactgaaatgaaaaggagtttaagaaatttttggctgggcgcggtggctcatgcctgtaatcccagcactatgggaggctgaggcaggtggatcacgaggtcaggagatcaagaccatcctggctaacatggtgaaaccccgtctctactaaaaatacaaaaaaaattagctgggcgtggtggcgggtgcctgtactcctagctactcgggaggctgaggcaggagaatggcgtgaacctgggaagcggagcttgcagtgagccgagatcgtgccactgcactccagcctgggcgactgagcaagactccatctcaaaaaaaaaaaaaaaaaaaagtcttgagggagaaaaatgtaactagatggctacggttctgaaatggagatggggaccaaatgctgaagggggatggggagcacggaggatgtggggaagcttcaggagggaatggaacagtgaactggttctacaaggatgactaggaatttttcctgtggaactgagggaagaaagtacattatggtcagaataggatgtataaaggcaaagaaacacaaaagaaaatgttgttactgggccaaagagtccatgtggcagaagctttgggtatatgacaggaggcagcatttgagagaaagatggcctgaggtggagacctagaacaatgtagaacggtggtgtgccaaagaaatacacattccatgtgtaattttaagttttctagtggctacaatataaaaagaaacaggtgaaattaattttagtaataaatattatttaaaacaatatatccagaatattatcatctctacatgtgataaatgttttaaaattactaatgaggcattttacattctttccttgatagtaaatctttgaaattcggtgtgtattttattttattttatttatttgaaacagagtctcactctgtcgcccaggctggagtgtagtggcgcaatcttggctcactgtaacctccgcctcctgggttcaagccattctcctgcctcagcctcctgggattacaggcatgtgccaccacacctaggtaatttttgtatttttgtagagactaggtttctccatgttggccaggctggtctcaaactcctgacctcaggtgatccactcacctcagcctcccaaagtgctgggattataggtgtgagccactgcgcctggcccagtgtgtattttgcttaatcacacatgcccatttggactagctacattgcaagtgtgacttttaagtttgtctgctctttttcttttcctcctagcatttaaaaccagtttgtaattgggtgaacatctaaatccttaatttaaaaacataatgaatagccacatgtggccagtggctgccatattagactgtgtggctgtagattgccattccctggattaatgctgtcattagcaagggaggatttcagctggatttgaaggatgaaggcaagggactgaattcaggagacatttctgaggcttttggtgactgcaaggcataaaggaaaaatgaagagtcaaggaggaggtccaggtttccagtcttcaatactgcagatggtgatgcagtaggaatctgtgtgtgtgcaaaggttgacagtgatgttcttctctctgtacaccattgttagttacacggtcaactatcggcttgttaaactatgatcaatctggtatcagaggccacttagtgcttaagtggagataccacactgtattgccgtaaatgtgatgttttctgattgggcaaactgtatttgtacatgtcctttctggaagtgccctttcaccccatctgctcataaaactctttatttctgtagttcagggaactcatgttattgatgaggtaattggatctccaggaggtgtgagatctactcaaggatattatgcatttattcattatggagctttttaggagcccatgaaattgagtcttctcaacttagtatatgctgttcctagttccttgctttgggctcaaccatttggccaagatccttgtatgtcagcataaggaaagggaacatgtgatcctttttttttttttttttttttttggagacggaatcttgctctgttgcccaggctggagtgcagtagcacagtcttggcttactgcaaacttcgtctcctgggttcaagcaattctccctgcctcagcctcccaagtagctgggattacaggtgcccgccaccacgtccagctaattgtatttttagtagagacagggttttgccaggttggtctcaaactcctgatctcaggtgatccacccgccttggcctcccaaagtggtagcattacaggcatgagccactgcacctgtctggaacatgtgatacttcttaataactttgttcgttgctttttggtttttgtttttgtttttttatttaggcagagtctggctctgtcacccaggctggagtgcagtggcgtgatctcggctcactgcaagctccgcctcccaggttcacaccattctcctgcctcagcctcctcagtatctgggactacaggcgctcgccaccgtgcccggttaattttttttaaatttttattagagagggagtttcaccgtgttagccaggatggtctcgatctcctgatctcgtgatccacccgccttggcctcccaaagtgctgggattacaggcatgagccactgcgtctggctgctttgttagtttttaaaaggggttgatgatgaagtcctgttacatctggaagaaggatgagcagctatctgcaaggtgttactggatcatttattagggttcaaggtgtgacctgtagcatgagatgccctgaagttgatctgactcagagtgactaacttccaccaagagtgcattttacctatttactccggcaaacttttgattgtctgttatgtaccaaactggttctcgcctctggaaatttgaaggtgcctgagccaaggtcttgaccttctaggagcacagtttggtaggagtgaccactgggtaacagacacctgaatgtagtagtgtcttatgagctgtgctagagagaggcccagggaggagagctgctgggatgggagggggacacagcccagacctggggtacgaatggggccccagaggagagaacttgaccaagtcttggtgaagagtgaagagtgagccttagccaagccgaggaagaaaggctgagcgcttgaagtaacgcttgccgaggtgaaagaacgttctggtttcaaggagctgtaactcttctgcatggccaaatgttagtgtctgaggggaggagaagccagagtgggggctgtggaggtccccaggggactaggccatgaagggctctgaagctcacactgaggaatctaagttttaatctcaagacaaatatttattaaatatttgtggatgaggcatggtggctaatacctgtcatcccagcactttgagaggctgacacaggagaactgcttgagcccataagttcatagaccagcctgggcaacatagagaaaccctatctctacaaaagtaaaaaaaataggtatggtggcacacacctgtggtcccagctgcttaggaggttgaaatgggaaaattgcctaggcccggtaggtcaaggctgcagtgatctatgattgcaccactgcactccagcccgggcaacagagcaagaccttgtctcaaaagaaaaatgtattaaatatttgtggagcacctactacatgtcaggtctgttctagacaatggagattcaacagtaaagaaaataaatagtattcttgctctcggggtttacattctgctttgggatatagaccgtaaacatgatatgtcaggtggcaaaggctgtgaaaaagacagtgagaatgtagaatggggtgctattttgtgtaggatggtgagggaaggttgctctgataaggtgacatttgaacaaagagctgaagccagtgagtggggagccacgggcgtacatgcaggaagaggctttcaagtcaagggaaaaggcggaacacaggcaccagggaggaagtaggtttagtgtcttccaggaatcagaaggagggtggggtgggtgcaggcgagagctgcaggcaggggaggaggcttgaggtgaagtcagggagctagctggcacccagattgtgaagtgcctataggcggccataaagactttgactttacttgaaatgaatcggtgccattggaggccttgaaacagaggtgacttgatctggcagatttttgttttgttttgtttttctttgagacagggtcttgcactgtcacccgggctagaatgaagtggtgtcatcgtggctcactgtagccttgaactcccgggctcaagcagtcctcctgcctcagccctccaagtagctaggaccatagatgcaagccaccatgcccagctaattttaaaaaatttgtttgtgttagagatggggtctcactgtgttgcccaggctggtctggaactcctggcctctagtgatcttcccacctcagcctcccaaagtgctaggatcacaggtgtgagccaccatgcccagcagtctggcagattttaacaagatctctctggttgtaatgtggaaaatggacttgggtggtggggcaagagtgagaggagagatgaactaggaggttgtagcagtagttcaggtaagagatggtgacacgaactagggtgagggtgacagaaatagggaaaagtgggagacagtgaagggtttatgggttgtgttttgttttgttttttttttttttgagatggagtctcgctctgttgccccggctggagtgcagtggtggtgtctcggctcattgcagtttccacctcccgggttcaagtgattctcctgcctcatcctcccgagtagatgggattacaggcgcccgtcaccacgcctggctaatttttgtatttttagtagagacggtttcattccgctttcccaaagagtttgccacgttggccatgctggtcttgaactcctgacctcaggtgatccacccgcctcagccccctaaagtgctgggattacaggcatgagccactcagcctggctgcagtgaagtgtttgtgaacatgatcaaatttgtgttttgaagtaactctgatagtgcccaggggagaaaaaggggattgggatcaagagttaaagaacagaggccagtggttgccctgtcaaggcaagaagttatgagtggcttggagcagacgtttgcttgctggttagcacattcttcaccttgagtgcagactctttgggaaagcagaatgaaaccaggaggccggccaggctcagaggctcacacttgtaatctcagcactttaggaggccgaggtgggaggatcacttgagcccaggagtttgagaccagcctgggcaacatagtgagaccccatctctattaaacaaaataaaacaaaataaaccaggaggccatatgttaaatatgaggaaccagttaagcaaaggagtcctggttgggcaatgactattactaaaccgaagagacaatatgtctagagggtagagtaggcagtggggagaaggttttacttctcaccacttatctcaaaatggctggtccaacccctttatccttgctggccatgcctctcccaagaccagcctcccttctcaagcttcccagtccctggattggattcccacattttcttcttccatgcaggtggcacttacctcttaggacctggtacagagcctaccttgaagtgttctctccctctcccaatcttttgtgctttgagcgcctgcagcacctcaccttactgtgtattgtctcatattgtgctctaataaataacgcttttaaaataaactgaaccgtattcaaggactgcagtgtttttcttttgcatttttagtctgccacagtgtatatagtaaatccaggcaccttgtaaatatctagtctgtcaaatctctaaccttgatcagaaaaatggccccagtttcatccctcccctgttcctgcagggacacagccaagtgttgaacagaaatatggggcagaggagccagtatggtgtgtggatgtggtcatgcacctcactcagtagaaggggccactcctgccttctttaatattcaaatgtcatccatctccttaaggctcaactcattcaggaaacagagatatagtgtgagtcaggtacttgctggacaatggtgttgtagaatttcaaaaacaaccaaaagtattatccctgccctcataatgtgtaccatttaactaggaaaacaagcattaaatagatgagtaggtttgtttgaataatggtaggtgtgcagagtggtttaaagcacatgatagggaggttgactctccagtgggggatcagaagacttcactggagatctgctaactggcacctgaagtatgaaatggaattagctaagggaaatgggaggacagaatgatactcttgaggaatttgagtgaatcggttcagctatacctaagcaaacaagagaagggtacagaataagctgaagcctctgtgaaaccttccctcactgctccagctaactcagctctgctttcgatgtctttttgcactaattgtctttgccatactttattatatactttctgagacagaagtctaaccaggaattagctagatatggtggcatatgcctgtagtcccagctactctggaggctaaggtgggaggattacttgagctcaggcagttgaggctgcagtgattcatgattgagccactggactccaagctgggtgagagagtgagatcctgtctccaaaaaaaaagcctaaccaaaagtacatagctcaaggaggccatggtcacaggtgactcatggtttaacaaagccaagtgattctagacaatcagctctctagcatcagagctgacaattgggaggcatggggcacctcagccagccagccagccatgtgtccatgggatggtagaggaaaaagtgattagagtagggtatgaggcagtgaaagacctttgacctagccgttgtaattttagctagcgagccaggagaaatcctagcatgtttgcccaaagaatatttattacagtaatgtttacaatagcagaatactggaaataatcacagtacctgctgacagggactggttcattgattcattcagcaagtattttttaagtgcccactaggtgccgggcgttgttctgggcaccaggcatgtaactgatcaagataaagtccctgttcccatggaacttacagtggagagacagacaatagggtaacaagctaatatctccgatcattgctagaaacacaagtgtcctttttctcggaatctgttcttgagttcaggtgaaaagaactgggcagtgagagatagctggactagcaggaaaattaaacacaaaatgcgatggatagtggaggtgctaagacagccttcccgaggaggccatgcttgagatgatgcctgaataactggttaactagttgtcaaccatgtggacatgcaggaggctagggaataacaaaagggctgggaacaagtttgatgtagtcaaggaacatcaagatcagcatgcgacagcctggtgagccatgagggaattgcattttactctctttttttgagacagtctcactccgtcatccaggctggagtacagtggcatgatcatggctcactgcaacctctgcctcctgtactcaagtgatccttccagctcagcctcctgagtagctgggactgtaggcacacaccaccatgccaggctaattttttgatcttttgtagagatggggttttgctctattgcctaggatggtctcaaactcttgggctcctgtaacaaaggaagtgaaccggctcaagcgttctgccggccttgacctctcaaagtgttaggattacaggtgtgaaccacccgcgtgccctgtcgcattttattattaatacggcgaggtgttgttggttttaatcagtgggtacctgtgatacaggtgtactgtggagtactatgaagcagttcaataaggtgcaattattccactatgcaaagatctctaggatacatagctaaatcaaaaagtaagttgtagaacaatatgtatggtatttcataaaacaagattctgtgttggggtgtgagtatggttaagtgggtgggtggggtgttaataaacatgaacaagggactttgtgtatacaccaaactattaagagtggttatttctgaaagtaaagtgggattggttatggtggtgaaagaaggtcatcactttttactacccactgtatttggattttgtaacaaagaaagtgaataggcagcaatgacttggtgattgtataaaaaggcttggctttgaaagaaaccaagaagatagctaggtagcaatacaggtctgcaggacaaattgcccctcataactttcctgcctgacatactagatcctttacaaaattatgtaaacaataagtttatgtaacccaacattgcctcctcaatctaacaaatgtgtgatcaccacttctgatagctcctgcagtatgttcccagcattgccttagaacatttgtggggttgatccccagttgaacaggaatgtgattttacaggaatcagtgacattcaaagatgtgtctgtggacttcacccaggaagaatggtaccatgtcgaccctgctcagaggagcttatacagggatgtgatgctggagaactatagccacctggtttctcttggtaaggaccacttctctgagtgtctttcctgctgatgggcctttccttccttggttgctatagtggtggtgcccagagcttaggtaactgtgaccagggtgctcaggggtcagagcttgttaatctcattgggacccagttttatggggttttgagcctgctctttaggtaaaaggtctttattttgcaaaactggaaataggcaatttgattgcatgactccttaagttgcaccttttttttccttcagagttcctgaggatcaaggactagtactgacttgtccttaggagggttctttgtccacttgcacaaacaaccaaatcttgtgtatttacccatgagcaggatatcaagtttccaagccagaggtgatcttcaaattggagcaaggagaagagccatggatatcagagggagaaatccaacgacctttctatccaggtaaatgagtgagagtcaggcattaggaatgaatgcagttaatggcacaacttagggagggggagataccctccagcagctggcttgcgatctcctagatctgcataggaggctgaagccatcgcctggccgacaccttgtaggtctctcttcaaaagggtgctcatgctcttgctggattatttttcctctggtggcctctgattcccttcattaattagagatcccttctcttactcattcagaattgaactcccatatttcttccctgaattgaactcccgtatctctttgttgtgttgatctcccccatcttttccttgtttagtcttgctgctttcactgtcagatgccccagacttgtaggaaacacccacagccttccttgattctctctcccttgataacctgccttcagactatgtgccttgccaccatcttccttccatctcatgttcatgctgctttgactcattacctccctccacagttctgtagtatcctcatctcccagttcctcgcttgttaagagctgcttagctttaggtctttagcttttcttgcttttctgcctaagtgaccctgccttaaggaacctgccttctagcctcctttcttgattacctccttaacagagtacctgcctcctggtagttgcagctctttattctatgccatagactcagaagtcttccttatttgtaccatggttacttttatccttctcagaagtcacatagttcatattaaatacataaaatctaaatccgtcacctttcatcccccaccagtatgttttgctaccttgcctatttctcatttctacccttgcctattagaatccaaaggatttttaattgctcaggctggataccctaattagtttagtcttttatttcaacccaggttgttttcttcctatgagaagtagcttagattttcttgccttttaacttctactggtggcactgtaaaccagggcccagatttttaaattaattaattaataattttattgagacaggatctcactctgtcacccacgctggagtgcagtggtgtgatctcggctcactgcagtctctgcctcccgggctcaagcaatcctcccacctcagcctcccaagtagctaggactatagatatgtgccaccacacccggctaattttttgtatttttagtgaggaagaaacgaggtttcaccatgttgcccaggtggtcttgaactcctgagctcaagcaatccacccaccttggcctcccaaagttctgggattacaagcatgagtgaccacaccagcctaatttttttattttgagacagggtcttgctctgtcacccagggtgcagtgcagtgtctctatcacagctccctgcagccttgacctcctgggctcaagcaatcctcttccctttgcttcccaaagtgttgggattacaggtgtgagccactgctgaggtcccagatttagattgctataatttccagttggaatagctcactctgttttttctttttataaatcaaatggatttttaaaattgtagctttattgaggtataattcacataccatgagattcacccctttagagcatagaggtcagtggttttttcatatattcagatagttgtacaaacagcaacactatctaatttcagaacattttcctcacaccagcaagaaatgtcatacccattaacagttactccccattccccactcctctcagtacctggtaaccattaatctaatttctatttctatggatttgtatatcctggatagtttgtataaatggaatcatataatatggcactggcttctttcacttagcatgatgttttcaaggttcaatcatgttctagcatgtatcagtacatcattcttttttaccattgaggaatattccattgtatggatatatcacattttgttattcatcagttgctgaaccacactggattttatttatttatttatttatttatttatttattttgagacagaatctcactctgtcacccaggttggaatgcagtggctgtgatctgaggtcactgtaacctccacctcctgggctcaagcagttctcatgcctcagcctcccaagtagctgggactacaggcacgcaccaactcgcctggctagtttttgtatttttagtagagatggggtttctactaaactgctattggccagcctggtctcaaactcctagcctaatatgttcatcccacctcagcctcccaaagtgctgggattacaagcctgagccaccatgcccagccactggattttaatgctttatcttcttttttttttccgagatggaatctcactctgtcacccaggctggagtacaatggcatgatgcagtggcatgatctcgtctcactgcaacctccacctcccgggttcaagcaatgctcctgcctcagccatctgagtagctgggactacaggcacacgccaccatgcccggctaattttttgtattttaatagagacagggtttcaccgtgttgcccaggctggttgcgaactcctgagctcaggcaatgtgcccacctaggcctcccaaagtgctgggattacaggcatgagccactgcgcccagcctaatgctttatcttcttaaaatttctgacaaaccattgctattactctctgtactttactatagaaaatagaaactccctgatttaaaagttccctatcgtacttccagtattatccttctattcctgctaaaacagatccccttaggttgaacttctcttaatattctctgtatgcagcatatctttttcctcattaggcaatatattctgcctatccaaagccatttgttctttgagttcaaaatctatctaatccatgagatgtgatatatactaatatttatttcttcctttcctgacaacaaatatcatttatatcatctacactataaaaactcagatttaataatatgccatctgatggttttacccttttctagttgccaaaagattgtcttgtttctcttcaagctctgtttattatggtattttaatatattttatctgtgtggcagagcatatagaaagcaatcagaacatacttgactgatcagtaagaaatctggttagcaagaaaacttttctcatttaatcatttccacaagcattttttgcatgtcccactgagaacaattcttaaaaaaattacaaggcattctctgtcctcaggagttgagttgattcttattgcagggtaaggagtttggggatttagggtcttattgtgatttcctctctcaacattttattaggaacattttcaaataggaaagttgaaaaaaattttacagtcaataccacatacctaccaccaagattatcacatttgttgttgttaacatgttattttatttgctttgttaacatgtgttttatttgctttatcatgtatttctttagccatctatcaatccatcttactttttgatgcatttccaagtaagttgcaggcataattacatttcacccctacacttttagtatgtatgtcgttaactagaattcaatttttttcagtttttaaaagaaaatgttatatgcagtgaaatgtacaagtcttatatgtaccatccagttggttttgacaaatgcattcacttgcctaacccaaattcctattgacatagaacatttccatcactccaaaaagctctctgcccttagtttttaaaggttatcgttcttaaaccctaaaaatcaatttgcttgtatcagtgttctgaagtaaaaacagggacttaaagatcaatttattagccagattgaaataaattttttggtcaaaggaggtaattagtgtagaaccggagctcaaatagatgaaaaccacagtaccagttgtaaagacaaagatgatttgcctcctgatcaaggacctccttgatctccaagggttatactttacaaactgagaaaatgcagtatttcaaataatcttttcagttgtatcactgggtacagattttctctgcagcatttggagacctggaacctgagagttgacagtaaagaaattatgaaatggatatattaggaagacagattttgtggtggtttataaaaggataggaggcatggagagcatataggatcctaagatgggctgtgatcctgttccatttgtatctgtgcctaacacagtcctgctcacttatttccttattttctaaccaaccctcctagatgggctttcctcattctctggacttaccacatactctgaatctgcagtctttgctatcatttcttcacttttccttttctccattttgggtcgtcttctcaggatacaggagtaatttcaaaacagagtcatatgtaacttatatgtctttcttcattcctactctagcagtgtatttcaacaggaaggaataggggacttttgtactttggatttctttcagactggaagaccaggcctgaagtcaaatcatcacatttgcagcaggatgtatcagaagtatcccactgcacacatgatctcttacatgctacattagaagactcctgggatgttagcagccagttagacaggcaacaggaaaactggaagagacatctgggatcagaggcatccacccagaagaaaataattacaccacaagaaaattttgagcaaaataaatttggtgaaaattctagattgaacaccaatttggttacacaactgaacattcctgcaagaataaggcctagtgaatgtgagacccttggaagcaatttgggacataatgcagacttacttaatgagaataatattcttgcaaaaaagaaaccctataagtgtgataaatgtagaaaagcctttattcatagatcatcgcttactaaacatgagaaaacacataaaggagagggagctttccctaatggaacagatcaaggaatttatcctggaaagaaacaccatgaatgtaccgactgtgggaaaacctttctctggaagacacagcttactgagcatcagagaattcacactggggagaaaccctttgaatgcaatgtatgtggaaaggccttcaggcatagctcatctcttggtcagcatgagaatgctcataccggagagaaaccctatcagtgtagtctctgtgggaaagccttccagcgcagctcctcccttgttcaacaccagcgaattcacactggagagaaaccctatcgatgtaatctatgtgggaggtcctttaggcatggcacatccctcactcaacacgaggtcacacacagtggagagaagcccttccagtgtaaggaatgtgggaaagcctttagtcgatgttcttcccttgtccaacatgagaggactcatactggagagaaaccttttgaatgtagcatatgtgggagggcttttggtcagagcccatccctttataaacatatgaggattcataagagaggcaaaccttaccaaagcagtaactacagcatagatttcaagcacagcacatctctcactcaagatgaaagcactcttaccgaagtgaaatcctaccattgtaatgactgtggggaagactttagtcacattacagactttactgaccatcagaggatccatactgcagagaacccctatgattgtgagcaggcttttagtcagcaagctatttctcatcctggagagaaaccctatcaatgtaatgtatgtgggaaagctttcaaaaggagtacaagtttcatagagcatcacagaattcatactggagagaaaccctatgaatgtaatgagtgtggagaagcctttagtcgacgctcatcgcttactcaacatgagagaacccacactggagagaaaccctatgaatgtattgactgtgggaaagcctttagtcaaagttcatctctcattcagcatgagagaactcatactggagagaagccctatgaatgtaatgaatgtgggagagccttccgaaaaaaaaccaacctgcatgatcatcagagaattcatactggagaaaaaccctattcttgtaaggaatgtgggaaaaacttcagccgaagttcagctcttactaaacaccagagaattcatactcgaaataaactctaggaaccgtgaaattaaggaatttgcagaatgctttagctaaaatgttctgattcaggatcagaggattcttagagagcttgggaatgtaatgaattacgtgtgtgtttatacgttgtgtgtggagaaaactgccagtagacagattttttttttttaacataaagacacattctcagatctgattacagactagtgtaaaaacagctacatgtatgtagctggttggggatgatatgcctgtatgttggactttgcttttgaatatatgtatgcaggatatcatcaagtttcaacatcttgacttgtgacccccaatgtcaacagcttttttaaaaagcaaattcctgcagtaatgaccaaaacccattttaaaaattgcttgacaactgcactcaactgcagctcttacattaacttcaccatggaaaccagttccaactccaggaagtcaccattcaaagaattagatcaactagcccaaccacttcattgtacagatgaagactgaaagccaaagatgtgaagtggtttccacagtatgatacagcctataagggtaaagctgggttaaaaatgcaggtttcctggatttggggccccatggccttgccagtgaaaaggttatttttggactcagagggctttaaaataaattttaagatgtatcagatacacaaacatttaatgggcacctatgggttggacactttgagaattcttaaaagtataagtgggagcaaaatgtatgcaaatttatcacaaactatttaaagcaacttcttggaggcttacaaaccacaatttaacagaaactgtagatggttgaactactagtgacttttttccccttttcccagttacaattatactttcagctaacatatgccagtttcacagaactattaagtccccttattgtactttttatggcatgcccatgaaaaagcactttcttaagcctacagtatcagatcaatgggaaaacaacagaaaactaagaggagaattttcccgttaattttcttgcagaaaagttaagtctaattgcccattgccataaattttgccttgtactcagagaagcaacatgcactggctcattttatgtgcaaagaaaagatttcaccattaaaaaaattaacttggctaggtatggtgtctcacacctgtaatcccagcactttgggtggctaaggcagatagactgcttgaacccaggagttcaagaccagcctggacaacatggtgaaaccccatctctttaaaaaaaaaaaaaaatccaaaaattagctgggcatggtggcatgcagtggtagtcccagctactcaggaggctgaggtgggaggatcactggaacccgggagcagagactgcagtgagctgagatcacactactgcattccagcctgagcaacagagcaagacacacacacatcaatttattttagttgtataatgcttttctattagtaaagcatcagctaagcttcagtggcctgctccatcccctaatgactcccatgggctatcctaaaggaacttccagaacctttgttggtgtgttgacattgaccatgcagaccaatttgggcacaactggacattgattccttttacacaagagctgcctcccaaagatagataaattttcccagccctaaatatgaatcatggggcaagatattggtcgtattgatggtgaacctttcctactggattctttgcatgccacatagcaggattcattgcctttctctcatcatggatggcatgcagcagcacccaagtattcttcattctttgcagggaaaaaattgtgcatgggggctgaaatgtaatatgtgtagctcaattagtctctcctctgtgatgcaaaatggaatattcaatggcagatctgcccttctgagatgctgaccatccaaaacaccttgtttatggtgcaccatgattagctcacacacaatgccaaggctgtgcttctattatctgatacatagtttgacaatgggtaattctactcagaccctccctactgattggctaggatgcctgtcaggaactcattatgctactggttgtttggggatccccatagtggactactttcaggaatggcatgaattgtaaccaactgagtgctgcccccactgttacggaagtttataaaaccttagttccagaagacccaaaggagagtactggtttgtgtttggtgcttggcctagatccagccaccactctgaaactcagcacatcttcattgacagggagggagcccaggacatatgtgtggctcattgaccagaaggctttcttagtcccaacagccatgaaccatgcacttatggatacccagccttttagggctacgtgaaatgcatccttgtaacatcattgtattctttcaataaatagccttctgagttgaatgggagtcagtttgtcgttttcaattttcagaacttggctaagattaaagagtggtgcaccaagagggaggaattaactgctaaactcatcacagccaggtgagttaatagctaccatttattgaatgcttactactttaaagacattgtgctaggtgtttcacatctgtcattcaatccttataacttctggttagcggtgtggtggtagttcttgtctttgcccagcattttcccccttttcctcttgcaacaatctgattgtattgactgtaggaacctaaatcaggatgtccctggggctcactgatagttttaggggcaggcatgagacctagttcagctaatcagagtcctttgccagaattttttccaagtagagctggaaggagccctactttgggcttttgtgttgctaggccaaaagataaaggcctagagcttcctggaacctgatttcttaccagagatgggaagtaggagaggacaaggttgacatgatggtgttcttgtttctatttcctgatgtccttagacctggctcaatttctgaagctctccttgggattcaggaagctccccatcagtccaacagtttctcctttttgctcaagctaattttttatgtttgttgcttgcattaaagaaacctaaaatatgtatgatatacttttacctgccagagcatctagcgcacctccatggaagatgagaaaagacttctgcacttttaggcatattgatggtggtgatgcttggtttttttaatagctgcagtaggcttttcactttgcagtattctgacttcaagattgagcactttttaaaaatactaaggtggttaattcctactcatctgttaaaatgcaaatggtgcttcaggaaaggttttgctgactctcctatttcaattacattggtctcccttttaaaaattttcatggattactgttaatgtcctccatgttaccacagtttgtatttgtgattatttggttttctttttcctacactagatggtgagttccaggaaggcaagagtccatgtctgttttgatagctctttttattaccctgctaattaatgccaggcatatggtagatacttaatatagtgatatagtgttttaagtgagcaattgagtggagattgattgctagacaaagaagactggtaggtaaatgaaaagatgctcaatcttgaagtcagaatattgcaaaataaaacaatgtaatactgtttcctaccaattaggctggcaaaaattgagaaatctggcagaggggaattagaacttttatacactgctggcaagagggtaacttggtataattattttggggagtaatttggcaatatccagtaaaatcaaagctaagcatatctcatgtctcagcaataccactaggagatacatatcctagactagaaattctcccttgtgaggaaaagagacacacacaaagatgtttattgaggcagtgttttaaagagtaaaaatatgaacacaacagaaatactgggaagtgaataggttaacaataagtcatggcatattctttttgagacagggtcttgccttgtcacccaggctggagtgcagcagtacgatctcagctcactgcagcctccacctcccaggttcaagtgattctcatgtttcagcatcccaagtagctgggaccacaggtgtgcaccaccacacccgactaatttttgtatttttagtagagatgagttttcgctatgttggccaggctggtttcgaactcctggcctcaagtgatccatttccttggcctcccaaagtgctgggattacaggtgtgagccactgtgcccagtcaatcatggcatattcttataatttaacatacagtttttaaatgaaggaaccagagcatctggcgaaacaataaagaagagcctagagctgcctattccactcctatatccatccagctaaatgtggctgaagaaaaacaactatgacaattagtcccacttttttttttttttttttgagatggagtctcactctgtcacccaagctggagtgcagtggcatgatctcaactcactgcaacttccgcctaccaggttgaagcaattctcctgcctcagcctcctgagtagctgggactacaggcacgtaccaccatgcccagctattttttgtatttttagtagagatggggtttcaccatgttggtcaggctagtcttgaactcctgacctcatgatctgcctgtgtcggcctcccaaagtgctgggattacaggcgtgagccagtgcgcccagctgattagtcccacttttcttgtatgctatcctccagcatttgttttcctatccagtcattgtcccactcttttaagttgctattttatgacttctctctttaacctctgcagcacttcgcccagtcctcactcagctggtgaccttatttcctagttaactgagaacaagaaaaggaatcagaagaggccaggtgcagtgactcacacttttaatctcaacactttgggaggctgggtgggcgaatttcttgagcccaggagttcgagaccagtctgggcaacatggcaaaactctgtttctaccaaaaatgcaaaaaaaaatgagtctcataacgtggtctcaaaaaaataatttttttaaaaaaggaatcagaagataattcctcttctctgtgcatcttattcttgcattctttctgttgctatggttgacactttgttctcttacctaagatcaagtcgtcctctagtgtattagatcccatccttaaactagggcataattcctacagttgttctctttcctgcatttattttttttttcgtctactggatctttcccattagcatagtaacatgtatttttctcatctcaaattatatgtgtgtgtgtatacgtgtgtgtgtgtgtgtgtgctatatccccctctccctacctaccactccatttcttgcatcactcaatagtaagattcctcagtagaggtgtggaatactcatctctaattcctcttcttccattcgctcttgtacccactccaatcaggtctttgtgtctgctctcatcaaagatccctgatggattccatgtggctaaatccagtggtctttttcagtcctattgatgcaggcagatgagctcatacaggtgcttggcttctcccaggaaagaattcaaaggcaagccagtggtgttagcaagttttactgaactggaattgctcctgtgaagcacatccaactcctaggcagtgcaccccaagtgagcacttgtggacagttggctagctatatttatacccatttttaattacatgcaaatcaaggggagggttatgcagaaatctctggaaaaggggtggtaatttttggattattgtcatggaaaggggtggtaacttcttggccattgccatggtatttgtaaatgtcatggtgctggtgggagggtcttacgctaatgagcaacgaaggaagctagaggttgctttcagcactgtctgctggttcccaccatttcttctctttatcctgttgggactggaaaataagtcctgctggtctcttacctcacttttacttgtcttttcaacattatttgatacattagttgatcacttcctcacagtgaccctttttttttcacttggcttccaggttacacttactagattttcttatcctttattgacagctgcttctcccaagttatctttccttgctctagacataggaattcccccagggctcagttctgtgaaagggccatgtatgcaaagcaaccctcagatgctgaaggagctgggaagccaaagaatgaggcagacaaatccagtttgtcggtttgggtgattttttagggggaacttagagacagaagtgtggtcttgggtggctggaaggtagatcttcacaccacaccccatcagaaccagggcttgtatcttgggggaaagtatacatgctgttgaaggaatgtgctgagggaatgctccgggtatcacagcctatgatttctgcaacagcatcaagggttgttttgagggaagggaaataggtgtttctatgtaaagagtaatacatcaactagacattttagaggcattcccagactgagggttaggttagtcagaagtcacatggtggattaaaatttaaaatcgctattttccaaactagtctttattaaactcatttgaaaggcaaaaaataataatagtaaataataaaatttaaaacttttgtccccacagtggtgcataggtattcgttgtatgtgcctctgtgaatgtttaaactcatttacagttaaagttggcctcctttttcttatctgattcctcctcccacacaaccacctgcttggtttccctcagggcataagcctggataacttgtacaccagcacacctgaaggatttgggggaaggaataatgagcactgatgctcctcagagtgagaagctgatccaagcctaagaaagaagggagggacccagcacggcggctcacacctgtaatcccagcactttgggaggccaaggtgggaggatcacttgaggccaggagtcgagaccagcctaagcaacatagtgagacctcatctcaacaaaaataaataatttttaggaaataataaaaaattgttaaaagaaaaagtcttggcactgtcagaatcaggcagagcgttgccacttgccagaaatgccttttgaggcaccaattaaaaagggagggcagaggagcagagggcttcctgcagatgaggagcatgagtgactatttgcaagagttggtggaaggatattactaatttttgctaataacttttagtaaaaccctggtcattttggaaaaacatacttttttaacaaacactttttttttgaggtggggtctctgatgcagtggtgtgatcatagctcactgaagcctcaaactcctgggctcaagtgatcctctgtccttagtcgcccaagcagctaggactacaggtgcatgccaccatgaccagctgacaaacactttttttttttccatttggaaaggtagcagacacactaaaagacaaacacattttaatggataaaggagtcaagaaatctggacctgaattataatggtattttattgagctgtgaacaggaagtattattgtagtaattaatggggcttttattttactgtctgcattaaaaaactggcaatttgcaattccaaagttagagttctcacaggatcttgacagggacttttctgttggcttggagttgctgataaagctcctaaggtgaaaacaaaatgtcacattcctctgctttctaaagggtgtcacagagactggacacatggtcccataggactcactagatgtgagagtcacagagccacttgatccttggcccctatagatataaaaaccatgtaaggaggttctgatccagaggagatgggcctcatgctcctgggatgaagcccctaccctgcccctacaggggtgggggacttgggcaccaagaatgagatattgggagatctgaaagcatgggagcttggcatctccatctccagcaaaaccacaggcccacttcacagctgtcacctggagttcttgggagaacttaatgtttgttccttaaaatgtgttccctgtagtgtggaggtggaaggtggtaaaggatcgaacagagaggggtgcccccaactgtctggagatttcagaagggagggggctgctgctggattagtccctagcagcagagtggagatctctaagggtctgcatttgtgttatccctgggaaggaaaggataggaccactccatctgttttccttgacatcagagatcacaagtcaggatttcagtggttcctggatagggtgtccttataattgattgtccaaacagggaccctgagaatgaaggggaagctaatcagatgggaagctcagattgtgctctaaaacccagatgtatgttcaccctgtacctggagctcctgggaaggaggacaagtgggcaggagccataaggctgtgtcaatggctgctctgccaaactcaccttgagactggttagaggcaaggattgcgtgaggcccaagggaaactaggctgccctgctgtgaatcgacacagagagctgggatgaagctggacccaggggtgccatcagggcaggccacaggcttcatcgccaggtgcagtggcacacttaaaatcccagaacttcaggaggcttgaggccagcaggtccaggctacagtgagccatgattatgccattgcaccccagcctgggtgacacagcaagacctgtctctaaaagcaaaacaaaactctatatatatatggtcagactaagtttcaataactgaaagtaagcagaaaattgtatttgctcaggttaagggatcctaacatgggatttgacagtgttggggagtgggaaggcattttaagggtaacatcacacaggttagaaaagtttacaccaccagtttacaattaataataggaagatctgggtgtgccttttaaagaggtgtccaaaggaagcccactggcatcatcatacattttatgagctgaggttgagatgtgtagttccgccaggtgtgttgcacacacatgtcaagagagcacctcctgaacgcagggacatgtggcacagctagggactacgttccccgaaagccttagcagcagctcacttccacttctgggctgaacgtcttccctcgcagtcgcttttggtctgctcggccatgtgcagtgctgagttttcgcttccttctgagtggcacagcgtgggtacaagcttggctgcgtgcctttctccaggtttcctgcatgcagggacaagtcattctcctcctgtggctgccactagccatctgtgtcccatgcctgggacatcctggaccaggcccctcctgccttctgacctttgccagatggcaggagactgccatctcctatcatgtgacctactggacaaagtgcggataagttgaaccatatgaaattgtctaagcggggaaactccaggtcaatgtgtctcctttttctgaaaaaaaaaaaaaaaaaaaaaaaaaaaaaggtttttctttaagtttctcctccccctgaaacaaggtcataaagaacagagatgcaatctcatcttccctgtctccttccaaccccttctcccatcttctggaccagacggccttgtgcaggcaggctagagggagaataatgaaaccttgagtggggagttatactcccaataacagtggtcgaggtaattaggcctgaatttcccacagaaaataagctggcaaacatgttgaaaaaaaaaaaattattcccaaaagcaccaaagagctaaggagagtaaagaattggggatcaaactttaggagaagcaagaaacaattcctgatcctagcactcaaatctgcttttgtctggaggcattttgctgatgaaagacacgcgtggaccgggtgtggtgcctcacacctataatcccagcattttgggaggctgagtcaggcagattcctttgagctcaggagtttgagaccagcttgggcaacatggtgaaaccctgtctctaaaaaaaatacaaaaattagctggcatggtggctcacacctgtagtcccagctacttggcagactgagcctggagaattgcttgagccagggaagcagaggttgcagtgagcagagattgtgccactggcatatgccagcctgggccacagagtgagaccctgtctcaaaaaaaaaaaaaaaagtggaaaaaaaaagagacactgtgaaacccagctgtgacattggtagacttaataattaccccatatttgaactatcaccccagatgaagacaccctcaggaaaatgttgaactggggaaaataagctgtggtttagacaacttaggacaactgacacaggatttttctcactttgcctataggggcctctgtggccagcagtgtccccacctgggcctcccttggccctgggcctgccacaggaggcacctcatccactcagcccaccatgctgtgcctggcttgtgcactgggatctgcactcggtctgtggctgggacaggcgtgcctcagcctgcctgtgtcacagttcatacccgcatttgacagttgccaagttcttgtcctgcatccaagaagaatgaggttatgctgacaactgaagggtgaggagggcagagaagaattttattgagtaacacaacagctctcagtggagaggggatgtaagggtggtcccccacccaaagtcaggtcatctctctgttgactgggtccagggcttttatgggctcagaatggggagtgtgtgctgattggtttgtgagtatgcaaaaaaaaaaaaaaaaaaaaggctaaaacaaaggcactactcaaaggtgggcatgacagtgtagaaaaccaattaggcaagggtagttatatgtaaaatagatgaaggttagtgatcaatcagaggaaagcatgccagatgggaagacaggttctcaatccggtctgtggatttaccgaggatttgtagctaggcatcaaactgtcttcagcttgaaggttgggtttcagtggggacctgttcctgtctgcctaggatttgtctgcctcctgccgctgtcgctaccatctgggagtaagggcgaaagaagacagaaacttccaagaaagaatcctgagtgatgtcagcaagaatggctaagtaaggacctccagaagttctctgccccgtacaagccatgcaaatactgacaaaactgtgagaatcagatttttcacaactctggaacatttattccagcaagcagcaaatgttccccttgcagcaagctaggaaacatttatttaaaaaaaaaaaaaaaaagcatttcattaacaa

SEQ ID NO: 273 - DNA, 13524 bp, Homo sapiens
  source 1..13524: mol_type = genomic DNA; note = NC_000007.14:c56093450-56079927 PHKG1 [organism=Homo sapiens] [GeneID=5260] [chromosome=7]
tcttggacttaaacaatcctcccgcctcggtctcccaaagcgctgggtgtgagccactgcacccggcctccctaacctgtacaggtctgcattatgtagggtgatcatgcacactgtccctgcgacagcccgggcagtcagctgctgcagtcatgcattgagaaagtctccagggcagtgctctcagcatacgtggaaatcaaaattgctcccagagaagcaagtgccctccgcacaaggctggatttacgttctctgggcctggaggccaagggagctccagaggggagactgatcactcttacatcctgtctggcctggtctcaggccacacaagcttccctcaccctccaccagaggtcccccaccttccgcccggagactgggctccatgccctgtccctgcggagccttggcctgcctcccgggtttgcagttgtgatttatttttggcacgttagcctccggtcatcaaatagcaaaacccaaaacaacagcagatgatatcttccaagtgtctgctcgggacacggcttcagccctctgtggtcccctctccccggggggctttgggattcttgtcaagctccttcaagagcctgcaagcacttaaccgtgagtagctagcccagtgatggacaaaagccaggtgataggcagggagcggggaggactgggggtggagaagatagaaacccccacatccattccatccatgtctcttttctgaaggcggatggaccagggagagtggcagcattgacccttgaaacctccatctgcaggaattttctacagaaaagaggtccccgggactgatctggtttttggactcagagttcaggggagggaagttatgtgccaaaaagtaccaggccaggcaggcgcgatggctcatgcctataatcccagcactttgggaggccaaggtgggagggtcacttgaggtcaggagttcaagaccagcctggccaacatggtgaaaccccatatctactaaaaatacaaaaattagctgggtatgatggctcgtgcctgtagtcctagctactcaggaggctgaggcaagagaatcgcttgaacccggaaagcagaagttgcagtgagctgagatctcaccactgcactccagcctgggcgacagagcgagattctgtctaaaaaaaggactgggccacctactcccatgtggtgaccctgtccacaggggtcttgggaaaggtgtgaggggtgggtggggcagtagacagaggcacaaagttggccccagtcagagctggggctggggcaagataaccgcctcctcagccccccaggaaaggtgagtgcagccacaagttggccaagctggctgtgccaaggactggaggcttgcgcctaggctggcatctcatatgggggtccaagtgtactttctgctcatggagggctgggggagaggagagagctagcgctacccagctttgggaggtgatgaggcaaaggtgcccattgtgaggacttaggacttaccagcaaatgggcttgtttttatgggaaacagacagtcccgggctccgccaagttgctgatggggcaggcagagaaggcctgtgtgtgagcagcccaggggcctggcaccagcagaggggacttgttattctaaaccttcttctggtaaccaggcacccagtagtggggccaccaggattcctggaacagcctgcccaatcccggaggcagccagagctgctgttggctggtcagcaaattggctcctttgtgagaccaggccttcttaggcccagaagcagtgggggaaagggggttggaggcagctttggcactgctgagtggcaggttgggcctattttctatctgcccttttccctgttggttttctgcattcctcaaatcctgcatctgattttgttttgttttgtctttttttttttgagatggagtctcactctgttgcccaggctggagtgcagtggcatgatctcagctcactgcaagctccacctcccgggttcacaccattctcctgcctcagcctcctgagtagctgggactacaggtgcctgccaccacgcccggctaattttttgtattttttagtagaaacagggtttcaccgtgttagccaggatggtctcgatctcctgacctcgtgatcctcctgcctcggcctcccaaagtgctgggattacaggcatgagccactgcgcccagcctgttttgtcttattttttgagacagagtctcactcactccgtcacctaggctggagtgcactggtgcactctcagctcactgcaaccccacctcctgggttcaagtgatcctcctgcctcagccttccaagtagctgggaccacaggcccgagagccatcatgcctggctaatttttgtattttttgcggagatggggtctcgccatgtagcccaggctggtctcgaactcctgacctcaagtgatctgcccacctcagcctcccaaagtgctgggatgacaggtgtgagccatcacgccacgcctaaatcctacatctgaagcaggagttgagttccctggtaggagcctccatgttcctgacacaaagcggggtagctcagcgcctctgtgtacaggcctgagtgtcctggctctgtactgcctctatcctgcagcaggacccctcagggctcactggccattgttaagtaggacatggggcattcttccagcaggaccctgagccaaaggggtacctgcccaacccttgactcacattcaaggtatagcccctgccggacacctgcactgggtatggggggcagagatggctaggacatcctagagatgataatctagtgggggaggtgacagcatacactgacaagtgacaccagaggcggaccaggatggacccacccagctctccatccctcagagcacccagcatggtggttggcaaagagtgggtgttcagtgtctgcagaatggagatgtaatgaatgagtgagtgagtgattatgaaagtcccagttatggatagaatacatgaggaagggccaggtgcagtggctcatgcctgtaatcccagcactttgggaggccaaggtgtgtggatcatttgcagtcaggagtttgagaccatcccggccaacatggtgaaactccatctctactaaaaatacaaaaattagccaggcatggtggtgcatgtctgtaatcccagctattctggaggctgaggcaggagaattgcttgaaccttggaggtggaggttgcagtgaaccaagaccacaccactgcacttcagcctgggtgacggactgagactccgtctccacaaaaaacaccaaaaacaaaaacaaacaaacaaaaaaacatgaggaaggagcagtgggatggagtgcaggaagcctgtcctagaagggggtgtgttttcagagaacacagtcacaacaaggggagataaggagaggctacaggagtggcctatttaaaaggaaattgtggccaggtccagtggtggttcatgcctataatcccatctctttgggaggctgaggcgggaagattgcttgaggccaggagtttgagactagcttgggcaacatagggagaccccgtctctacaaaaaacttaaatattagggcctggcatggtgtttcacgcctttaatcccagcactttgggagaccaaggtgggaggatcacctgaggtcaggagttcgagaccagcctggccaacatggcgaaaccctgtctctaataaaaatacaacaattagccaggcgtggtggtaggtgcttgtaattccagcttcttgggaggctgaggcaggagaatcgcttgaacctgggaggtggagggtgcagtgagctgagagccaagattgtgccactgcactccagcctgggggatactttagtcctagctactcaggaggctagggtgtgaggatcgcttgagcccaggtggttgagccggcagtgagctataatcgtaccactgcactctggtacagagatgggtaacagagcatgaccccatctctacaaagatttttttttttttgagccggagtctggctgtgtcgcccaggctggagggcagtgatgcgatctcggctcactgcaacctctgcctcctgggttcaagcgattctcctgcctcagcctcccaagtagctgagactacaagcgtgtgccaccacatccggctaatttttgtatagtagagatgaggtttcaccatgttggccaggctggtctcgaaatcctggcctcaagtgatctatctgcctcagcctcccaaagtctgggattataggtgtgagccaccacgaacggcctcaattcacaaacatttatttggaacattcactataggccagtgtagtgccaggagatgtaaggatgagtgagaaacagttccagaccccaaggagaacagcccctgggtcaggaaggctgacagcttctttcttttcccctctcagagccacccagagttccctcactgaagatctgagcatgacccgggacgaggcactgccggactctcattctgcacaggacttctatgagaattatgagcccaaagagatcctgggcaggtaaagcccaagctttccccacgaagtgctgtcctaggctccagcagaccctgtgggctacagccagctctgctccaccccgagtactaacgccactttcatccccaaagtgctgttcacttggagaaaccctttgtttggggtcctgccctcctgaagccaggacagataagagaaacctctcccagcaaaaagttcccaggggcaggcgcaatggctcacacctgtaatcccagcactttgggaggctgaggtgggaggattgcttgaggccaagagttcaagatcagcctgggcaacatagcaagaccccgtatcttttttttttttttttaagatagggtcttgccctgtcatccaggttggagtacagtggcatgatcttgactcactacgatctctgcctcctaggctcaagtgatcctcccacctcagcctccctagtagctgggacaacaggtatgtgccaccaggtctggctaaccatctctatttttttttttaaaaagggggggccaggcacagtggctcatgcctgcaatagcagcacttcctgcaataccagggaggccaaggcaggaggatcacctgagatcaggagtttgagaccagcctggccaacatgttgaaaccccatctccagtaaaaatacaaaaattagctctgtgtggtggcaggtacctgtagtcccagctactcaggaggctgaggcaagagaattgcttgaacccgggaggtggaggttgcagtgagctaagattgtgccactgcactccagcctggcaatagagcgagactccgtctcaaaaaaaaaaaaaaaaaaagcactgaacggctcaaaaaggaaaaaaaaaaaaaaaaaagagtcacacggcctgagagcaggcttgttactcaccagttctgggcaaatcacctgtctgtgcctgtatttattcatccaccatttccaaaagctcagaggaagttgggggaaagtgtaaatctctgtcaagggcaggacatctctgctgcagcctctaatctgggaccccccatggggtgaggggccccccgaggccatctgtcctctgcactcccaggggcgttagcagtgtggtcaggcgatgcatccacaagcccacgagccaggagtacgccgtgaaggtcatcgacgtcaccggtggaggcagcttcagcccggaggaggtgcgggagctgcgagaagccacgctgaaggaggtggacatcctgcgcaaggtctcagggcaccccaacatcagtgagtgatggccccaagccacacggcagggtgcccccctgtgattctgccctgacagcccaagccagggagtgtggccccaccgcacagccaactagaaccacccaggctcaaggctcccagctccaccctcactgctctgatagaaggggtcccaggcagggatggatgcaggcaggggaatgggggtttgatgtccctgggctgaattagccaggcatgctggtgcatgcctgtaatcccagccactcgggaggctgaagcaggagcatcactcaagcccagtagtttgaggctgcagtgagttatgattgcactattacactccagcctgggtgagacagtgagatcctgtctctaataataataataataataataataataataataataataataaagtccctgggcctgcccacatcccaggttgacgtctttgagcaccctcctgattcccctgtcagcttttgaagttagcccacagcagcctcggtccctgacccccgtgccccggctgcccctgcctgggctcccctgctacttgagacaagctagccatttccatttcagtacagctgaaggacacttatgagaccaacactttcttcttcttggtgtttgacctgtaagtacccagcactggagcaagccacacctgagagaacctccgactgctgtcccctccccaaccccagggctgcctggagaccacagccagctcctgcgctgaggatgccaaatacaatcacggtgtttagacagatcagcccctggggtcaggctgccggctttggaaacctgggttcaccacttgtgggctggatcatttctttaaatcttggttttctcatcagtattatgggagtgataatagcacagtgactggcatagtgtgaatactaataattattagctacaggcgggcgcagtggctcacaaccgtaatcccagcagtttgggaggctgaggccccagctacgcgggaggctgaggcaggagaatcgcttgaacccaggaggcggaggttgaagtgagccgagatcacgccgttgaactccagcctgggctacgagagcgaaactccatctcaaaaacaaaaacaaaacaaaacaaaaaaaaccccaaaactcttggcctcacgtgattctcccacctcggcctcccaaagtgctgggattacaggcataagccaccgtgcctggcacagtatagtgatataattgttctattttattattggttgttagtctctgactgtgcctaacttataaacttcatcttaggtatgtacatataggaaaaacatagtaagtataggcttcagtgctatccatggtttcaggcatccactgggggtcttggaacatatcctatgcagataaagagggatgactgtagacatatataaagtagaacaaggggttagcaagagacaggggcttccttagaccgagtggtcaggaaagcatgtccaggaagtgacccaagcagagggtggcaggatgtaaggtcggtcagcaccaaagaccaggtcctgcaggcattttagccatagtaaggagtttggagggtcaagactgggagggtgacatgatctgatttacttttttttttttttttgagacagagttttgctattgtcgcccaggctggagtatagtggtgcgatctcggctcactgcaacctccgtctcctgggttcaagtgattctcctgcctcagtctcccaagtagctgggattacaggcacccaccaccatgcccagcaaattttttatgtgtgtactgttttagtagagacagggttttgccatgttggccagtctggtctcgaactcctgacctcaagtgatccactcgcctcggcctcccaaagtgctgggattacaggcgtgagccactgcgcccaggctgacttccttttgaaaagatctcactgactatctagggacgactgtaatgaggcgggattggaaaaagggaggccagcagtattgaggagagaggcaggtggtagaggttgcatctggggtgtggtccaaagatcaatatcatcatcaccatcaccaccatcatcaccatcatcatgcccctgctttggcatcaataggattagtaagatgagccccttatttctaagcatcaaatgtgaacaatacaaagtgctctgtgaaatgcaaattccagacttatcatgggccaggcacagtgcctcacacctgtaatctcaacactttgggaggctgtggtgggaggattgcttgaggccaggagtttgagaccagcctgggcaacaaagtgagaccccatctctacaaaaaaatataaaattaaggccaggcatggtggttcacccctgtaatcccagtactttgggaggctgaggcaggcggatcagatgaagccgggagttcgagaccagcctgggcaacatggcaaaaccccatctctacaaaaaatacaaaagttagcccaggatggtgacagatatctgtaatcccagtcactcaggaggatgaggcacaagaatggcatgaacccaggaagcagaggttgcagttagctgagatcgtgccactgcactccagcctgggcaacagaggaagactttctcggacccctccagactcaccagctgcagctgtctcgactgctctgtggcactgtcctgtatagcccttggggacagctcaaatgtctttaacctttgaagaagttgctgggggaagctatttttaatgctgccctgaggagccctccagggtataactagattgttctagcagagtcctttctagatcatcccaggaggtaagaagattgaacctcaattcttaatcctgtaattggcaaactttgctcctgcaactcttgcacagccgattcttcccatttgtttcctgggaaaaaatcgggatactcggccaggcgtggtggctcacgcctgtaatcccaacactttgggaggctgagacgggtgatcacctgaggtcaggagttgaagaccagcctgggcaacatgatgaaacgctgtctctactaaaaatacaaaaattagctgggtgtggtagtgggcacctgtaatcccagctactcgggaggctgaggtaggagaattgcttgaacctgggaggcagaggttgcagtgagccgagattgcatcattgcactccagcctgggtgatgagcaaaaactccatctcaaaaaaaaaaaaaaaaaaaaatcgggatactcacgtccttctgatctgggtctggggtcctgggccagtggttcatagtcccctctttcagcctccagccatcatttaggccccgatacatcccagtccacactgtcacttccacagatgggaagacactgatacaatggagatggaacagaaatggtgcttgggctgggactctcccaagtccaccaacttcagggcccagggcagggcaaggtactgctcacagggccaccagctcggggcccattgcttccctggtcacttctagccatcctggcctggaactagggtaatgggaacctggggaggggacttagctgaagaaatgcctacctcatgaaatggtgggaaaaatttttccaggggaaaaattcagtcaggggagaaacctaggcctattcctcggagggttgatgagagcctgagcccctgatgtgggccacctctccagcctcctctgcttttctcccagttcttccagaacacttctcacttccccggctcctctccccagactgtggttctccacggagagtggcccacttagcttctagaggtatcagggtggaaggcagctctctgggagcagggtaagggcagtggtggtcttgggaccgatccagctatcaaccctctgtttccacaggatgaagagaggggagctctttgactacctcactgagaaggtcaccttgagtgagaaggaaaccaggtgagggtccctttgcccttctctccgctccctcccacgtggcttagggccacaggcactggggtctcaggggaggcagggcgtgcacatgtctgggctgggcgtgtgtgctgctcccttgcagtgtggctgaaatgtgagctgtgtctccctgcctgttacctgaccctgagcagaggaagagtaacaagtgtgtgccccaccctagaaagatcatgcgagctctgctggaggtgatctgcaccttgcacaaactcaacatcgtgcaccgggacctgaagcccgagaacattctcttggatgacaacatgaacatcaagctcacagactttggcttttcctgccagctggagccgggagagaggctgcgaggtctggtaacatggccttggcccacgtccaggcctcgggtgctcaatcaaccatctgcagaatagagatggtctgggtttctcccctaacttaattgttccctggaataaaaattccaccatttcaagggctagggatttttttttctttttctttctttttttttttttttgagatggagtctcactctgtcgcccaggctggagtgcagtggcacaatctcggctcactgcaacttccacctcccgagttcaagtgattctcctgcctcaacctcctgagtagctgtgattgcaggcacgcgccacaacgctcggctaatttttgtatttttagtagagacagggtttcaccatgttggtcaggctggtctcgaactcctgaccttacgatccgcccgcctcggcctcccaaagtgctgtgattacaggcgtgagccaccatgcccagcagggctaggcatttcttcaggtaagtcctctcccaggttcccattacccttgttccaggccaggatggctagaagtgaccagggaagcaatgggccatgagctggtggccctgtgggcagtatcccgccctgccctgggccctgaagttggtggatgttgggggagtcccagcccgagcgccatttctgttccatcatctccattgtctctttggacttcctctcttttttttttgaaacagagtctcactctgtcaccaggctggagtgaagtggggcgatctcagctcactgcaaactccacctcccaggttcaagcgattctcctgtctcagcctcctgagtagctgggactacaggcacatgccaccacgcccagctaatttttgtatttttagtagagatggagtttcgccatgttggccaggctggtctcgaactcctggcctcagatgagccacctgcctcggcctcccaaagtgctaggattatagaaatgagccactgcggccagcctggacttcctcttctgagtgccctgctgacctgccctgatgatgactgttcctgcagaggtctgcgggacccccagttacctggcccctgagattatcgagtgctccatgaatgaggaccacccgggctacgggaaagaggtggacatgtgagtgcgccgggaaaggaggagcacccagctaggctgggcaagggaggaagtaggcagggctgggccggtgcccctggcgctgggtaagtggccctgggccctcgcatgtccaggtggagcactggcgtcatcatgtacacgctgctggccggctccccgcccttctggcaccggaagcagatgctgatgctgaggatgatcatgagcggcaactaccagtttggctcgcccgagtgggatgattactcggacaccgtgaaggacctggtgagaggccaggccaactggctcctgggctcagggctgcgatgccaggcgcccctgcccggggaggccctgcctttcctgacatgctggaggggacctgccttgacattctcggttcccctctcctcctctcacaggtctcccgattcctggtggtgcaaccccagaaccgctacacagcggaagaggccttggcacaccccttcttccagcagtacttggtggaggaagtgcggcacttcagcccccgggggaagttcaaggtactaagcgtcctgatccaggcccgccagctccctaagtgcaaacctctaagccccctcctctcccaggagtccttacaccccgtgaatttccagagtacccatccctcccctcccagctgccctgtgatggcttcaaagacggcaggtgtcagcccactggctcggtccctgaggatgctggccaagtgggaagtgggggacactaggaaggccccgcagaagccacccaaggcttcgtggcaaacgagcccagagcgtccctgtgctggaggggcagggcctggcagggcgggggctgcagcccagcttctccgcctggccctgcaggtgatcgctctgaccgtgctggcttcagtgcggatctactaccagtaccgccgggtgaagcctgtgacccgggagatcgtcatccgagacccctatgccctccggcctctgcgccggctcatcgacgcctacgctttccgaatctatggccactgggtgaagaaggggcagcagcagaaccgggcagcccttttcgagaacacacccaaggccgtgctcctctccctggccgaggaggactactgaggggctggccagtcagggagggctagggggcaggtggggaggggaagccatggaaatacaagtcaaaggggtgagatgcgtgcaggcctctgcagaaggagcacttggccctggccaggaacccctggaactgaggccacgatcccctctcaaaggctgtgcacaagggaagtgggtgttcccaccacacagcaatacctgcaggctggggcaggccctgggtgggcagagatcacacgtggcctgagaaccaggaaccccctgctcctctacttcctagatgagccaccatctccatttctctttaggggaggcccagagttactgacactcaggctttcttcccttagggtcacagggtgaggatcaaagacacaaatgtctgagatacacaattgcaggagattttattggccccatgacatccagtgacagtgtgggagcaggctactctccagggacatgtttttggaggcatatggagaagggggcccaggcgaggtggctcacacctgtaatcccagcactttgggaggtcgaggtgggaggatcgcttgaggccaggagttcgagaccaccctgggcaacagagcgagatcccatcactacaaaaattcaaaaaattagccaggcatggtggtgcacacttgtagtcccagctactcaggaggctgaggtgggagaattgcttgggcccaggaattcaaggctagagtgagccgtgatcaccagtgcactctagcctgggcaacagagaaagaccctgtctcaaaaaaaaaaaaaaaaaaaaaaagaataggaagcttctgatatttgtctttctggagtactatttgctttgtgattcccacaatgcaatgcttcacctagtacatcatctggttctcccagacccttttaggactgaactgtgctttaaatagttacatgtctgcctgttacacagtggaaactagtttccttcagagggacacgaaaccacagatgaggccacaaagaaagcattctccttccacagcaactggctgagaaaacagaaccaggaaaattctgccttgaggaaacaatgtcagcttcctgaatcatccagggagaaagggggagagaatagattttaaaatgcttaa
